United States Patent Application Publication US 2017/0114356 A1 - sequence listing, part 5

SEQ ID NO: 5207 - DNA, 2165 bp, Zea Mays
ggccacaagcacgggactggcatatattatccatgtaaataaaataaagtatataaataaccccataaaaagctaccattccactacctcccaaactcgcgagcgagtcgaggctccaaccccggcacatcacaggaggaggaggacgacgcgcccaccatggccatggcgacggccctccgcaagctctccgccaacgctctgcgccgccagccgctctcccgcatcacgccgctctactacatggcgtcccttccggcgacggaggagagatccggaatcacctggactaagcagttgaacgcgccgctggaagaggtcgaccccgagattgctgacatcatcgagcacgagaaggcccgccaatggaagggtctggagctcatcccgtcggagaatttcacgtcggtgtcagtgatgcaggcagtgggttccgtcatgaccaacaagtacagcgaggggtaccctggcgcaagatactacgggggaaatgagtttattgatatggcagagtccttgtgtcagaaacgtgctttggaggctttccgtttggacccggcgaaatggggagtgaatgtgcaacctctatccggttcgcccgccaacttccatgtatacactgcactcttgaagccacatgaaaggatcatggctttggatcttcctcacggtggacatctttctcatggttaccagactgacactaagaagatatctgcaacttcaatattttttgagacaatgccttacagattggatgaaagcactggattgattgattacgatcagttggagaaaagcgctgttctttttaggccaaagttgatcattgctggtgcaagtgcatatgctcggctatatgattatgaccgtatgcggaagatatgcaacaagcagaaggcaatacttctagcagacatggcacatattagtgggcttgttgcagctggtgttgttccatctccttttgattatgcagatgtagtgactaccactactcacaaatcactccgtgggccacgtggagccatgatcttttacaggaagggagtcaaagaaataaataaacaaggaaaagaggttatgtatgattttgaggacaaaatcaatgctgctgtctttcctggtctgcaaggtgggcctcataaccataccattactggcttggctgttgcgctcaaacaggcaactactccagaatacagagcttaccaagagcaagttatcagtaattgtgctaaatttgcgcagagcctgatttcaaaaggatatgaactcgtctctggtgggactgacaaccatttagttctggtgaatctcaagaataagatggttcaagggtggagaaggttttagaaagtgtgcatattgcagcaaacaagaacacagttcctggtgatgtttcagctatggtgccaggaggcatcaggatgggaaccccagcccttacgtcgagaggatttgttgaagaagatttcgctaaagttgctgacttcttcgatgcagcagtgaatctggccttgaagattaaggctgcaacgacaggtggaacaaagctgaaggactttgttgccactttgcaatctgatagcatccaagttgagattgcaaagcttcgccatgatgtagaggaatttgcaaaacaattcccaacaattggatttgagaaagagaccatgaaatacaagaactaatatctggatgacaagagaatgaggtcactcttcttgcagtaagcattcgaagcaagatgccacgatgattattgggagtttaaccatggtgtaatggcatcttatgttaaagagatgttggcaatttacagcatgtggaactttcgtcaatcatattgtagacacataccgcgagatgctatattgaccggacaattgcatttccatatgtgtacatcctttgcgttcaaaaaaaaaaaaaacgtacatcctgacacacactccacccccatccccactcacaagcacacgtcaccctgcccgcaaggctatctactcatctctataatcaaactatactatgtgaaagttatagtctacggtgcaaaatagtgttttagatgactatgtggataaactaatgaagacagtataactatatgtacaacctcatttaaaaggtctctaagagattaattaaaaaaatacgag

SEQ ID NO: 5208 - DNA, 3300 bp, Zea Mays
tactgctcgaaacattactgtattattattagtaccagtttgctttacagttaagagtactcgacaggcggcagtggcaacccaacaacattcatacacacacacacaaaaaaaagtatactagtagggaactgaaaccaaaacatggagcgcagtagtgcagatcgattgttcatttctcggctgcgccgtactacgcggttcgccgcctgaaattgtttccgagggcatccaatccacatatctttttcacaaaggttttgctgttgggtgtcgactgtcgacgcaagaaagagaccgccttttgctgctataatttcattcccttttcccggctgtccaaatccatagccgtagaccgacgcaagcaggcaggcaggcgtaggtgaggtctacccgcccgcccaacaagtttccaagcgttccctctcatgcttgcttgacgtggagtggttaggtcacacgcacgcacctcatcgcccacccctccaccgccgcgcccgcgccggtccccagccacagccaagagaacacgcacgaaagacgaagaagaagaagaaaaacggcagtagatgagcggcggcaagccggcagccggttgatgaccgaaagatttttaaccaaaccacgagcagcagcaacgagacgtagctttccatacatcggctgtcctgtccttccttgtttatccccacagcaataacttcctcttctgctgacactggcctgggaagtgggattctgatgccaatttaattggccaggtaggcgccctgaattgccacacctaccggcccgccccaacccaatcatacatccatacggctacgagcgacggagcgagcgagggaagttgatgttgtagatgccatccttcctctcctccttccggatcgtagtcgtggcttgactcagcgtagcggccagggcagcggccatgtcgtcgtcggtccggcacggctcgtcgaggggccaggcatggttctgcaccacgggcctgcccagcgacgtcgtcttcgaggtgcacgacatgaccttccacctccacaagcgagcaggaggaccagcgtccgacgcggggacggcggcagcggaggagacaggtgaggagcagtgacggagacgatgacggtgctgcggaaacagagatcgaggaggaagaagccgagcctgagcagcagcaggttaggacggagggggagggcgacgggcagccgtactgcattgcgttccccgacttcccgggcgggccgggcacgttcgaggcggccgccaagttctgctacggcgtccgcgtggacctcaccccctggaacgtcgcgccgctgcggtgcgcggccgagtacctggagatgacggaggaccacgccgaggacaacctcgcggcgcgcgcggaggcgtacctggaccaggccgtgctgcggcaccccggcgacgccaccaaggcgctcaagtcctgcgaggagctgctgccgctcgccgaggacctcggcattgtgtcccgctgcgtggaggccatcgccgcgcgctcgtcgtccgcgtcgcggtcctggttcgacgacctggccgtgctcggcctgcgcatgtacaagcgggtgatggcggccatggccgcgcgcggcgacgtcagggcggaggccagggagagctgcctcgtgtcctacgccaggggcaccatcccggggctgtcgaggtccatgcggcgccgcctcgcgtccgcgcccgtgtcctccgaggtggagcagaaggagctcctcgaggcggtggtcgccagcctccccgcggacaagtgctcggggcgcgtcgtcaccgccaagttcctcttcgcgctgctgcggacggcgcacatcttgcgcgcgtcggacgccgcgcgcgcggcgctcgagcggaaggccgccacgcagctgcagcaggccgcgctggaggacgtgctcatcccgagctactccggcaccgcggagacgctctacgacgtggactgcgtccagcggatcgtcaggtatttcctcgcggaggaggagctcggcggggaggcgtcgtcttcggccgcgatcgaggaggaggaagcggtggccgtggcgcggccgtccgccgtggtcatggtgcaggtgggcaagctggtggacaattacctcgccgaggtcgcgtcagacgccaacctcaagcccgccaagttctgcgacctcgcgctttcgttgcccgaccatgcccgtatctacgacgatggcgtctaccgcgccgtcgacatctacctcaaggcgcacccgcggctgacagcggaggagcgggaccgggtggtgggcgtggtggactgccggaagctgacggtggaggcgtgcacgcacgcggcgcagaacgagcggctcccgctgcgggcggtcctgcaggtgctcttcttcgagcagctgcagctccggcgcgccatcgcgggcacgctcctggcgccctccgccggcgccgctccgcgcgaggctgcggcgtggcgaggcgcgacggcgctggcgcaggacagccaggtgctgcggctggacatggacagcatggcgagccgggtgcaggatctggagcgcgagtgctccagcatgcgcagggccatcaagaagatcgacgggcgcggcggcagcggcagcggcagccggtcccccggcggccgcagcgcggacgggtccaggcccgcggcgggcgggtggagggcgcggcacgggtgcaaattcagcacgcaggtgtgcgactcgcacgcgcgcaacgtggtggcgtccagggcgtccaggatggggatgagcccgtagccaccgctcgtgcagtgcggccgtcctctccgtccggcgctctcggtccagacatgggatttctcacgcgatcgcgattcacagtgacacacgaccagagagatcagcacgggaagagaatggctgagaagttccagatcttttaccgctccaagtctcagcaccagcctctcaggtctcgcacgtttttacatctctcgttcgtggacgtgagaggtgtgatggccatttgttcgtttgttgtgcgtgtcgtgtcgccccaaatgggcgtggatccgtgtgagttgtcttgtctgtgccggagggagggcggtctgtaactcgccagcaagccgtttccattcagcttgtttctactactcgattgcgccgtgcatatccggttggattttttactgtactaatgtgggttctgatgtataaaagttcagataatacccaccatccacactggttggtgtcctctctcttctcttctctcgcagaggaaagagagacatgaatagccttt

SEQ ID NO: 5209 - DNA, 2789 bp, Zea Mays
atgattttcagctcacctttttcttttaaaatcagtagttggcacaaccagtctatagcacagctcaaagcacagaaacatacgcctaagaaacataacacccgccggtaccagcgcagcgtgttgccggccggtgacacaatgacgcgcaagacattatggtgtcggctaccacctccttggacatcttcaggaacgggtccatgttgtggtggtacccgccattttgcctcactcctatggatgttgctctccaggacaggtgagttcatctttaactcacagcttgctgctcattgttggaccggtagccatcatgtctcgcatggctaggccctcatactcctcatctgacttggtcgagtgttcgtccatagagccgacatctatctgcaagtaccctgtgacgcggaagaacattagctttgtagtgttaggaggtgttgaaaagataaggaaaacaaaaaactaaattgttgaacactgacataaatcgcccatacctcgtgcatgtgcagcatgtctctttcttcatcggaggtcttctcctggactgagtttttacacgcaacacatgagtatataaacaaagaattagtagtctcacaacataaatatttttagacggtcctattacataagtttttgtattcagagaaaaacttgacgttcgatgcatgggctagagccccatatgcataataatgagaattggtgtggaaaaagcatacaaccttaatccatagaacttgaccttaatcaagattacatataatctaaaatccattacatacaagtactaattcaaaattagattcatcatcgctgaactgaagataaggattaggttcccaataacaatgtggcatgtgcatacttaaaagtattttctaagaagaactgaaaaaatagagacaatgggtattccagttgaatttgaacatcaaaaacaacattgtatgtcacttttacttgaatcattcaggccttcaagaggataatgctaaaactataaaaaatcagaagcacactcatgtagttcctccacataaattcgaaccagtcacaatgtacaagctctactcccctttagttgcactcatgctaaaacaccccaatgaagtttttaaatagacaaaaacaacaaacatgtgtgccattctattgtcccaaaattttaaccaaatcatacatagagcagagtatcttcagttatcagttggtctgtactaacatgggtgcctatatttgaggggcaactcaaacaaaccacctcaaatcaaagccatggtccaactaaatttcaagcgttcaaaacatttttttgcatcacggcatcacgggatcagaaacacaaatttgattatttaagtcattcttggaatcagtggagagtcatccacctaaaacaatatttactattcagtctagatttatctccaaggaaattgaagatgttcttcctgggacacatcattgtctttgtcaacgactcattaaaactaacctcaccagcacagacgaataaaaacatatataagcattcaccaagcaataacaaagtaacctatacctcggaggcccaatcgatgacggtcacgatggggcggcacaacccacaccaacataggtgtcatggaggtcctcaacctggaccatctcaatggtttgcattcagcttaattgaagaaatgggcaaacagtgaacatataggccactcataaattcaatggcaaaatattgatcaagctcagcatctccaagatataacaaaaataaaatgacaaaacagaacgacattgcatcagtacactcatgttaaaaatataaaaagatgccttgtggatgcatgtacaatgaaatctcgatctcattatatataattgtgtcatggaccaggcctctaatgcatgactgtttgtctcactaatacaatttacagtctctggaaaattctaatgtagaaaaaatacacaagaagcctttgtggctgcatatacaattgggcaacagcttgactgaacaatacaatctacagacttaggctggtgccaatgcaggctatagtgagggcgatagcgcccagcaggaggcgagagcggggctggaggcgggcgagagcgacccggcgggcgctactgctaccgcccggcgataggcaggcgagagcggggcgacgcgttgacgatggcgtcttcgcgggcgagagcgaggggcgacagtgagtggcggtttctgattggtccacgtgtgctatagcctgaggctgtagcctgctgcagcctgtgcactggagcagcaggggcgagagtggaggcgagagctgacgtggcagggcgagagagaggctgtgcactggactcagccttagggacaaacattttcatttactaccaggggacaagtccttgttatagatgggcccaaaaatggtagaccgttataatagatgtaaaacatgccacactctagctttctgaaaatacatggaacagttttcatgcataagataaaggaatgtgagacggtttttcttttatctgcattagtaggaacaggtggtagaaaacttgaattacatctacagaaaggtgtggttcgaaacaacaatgcttgaagcattttttcaccaactgatcatgaactaaggatagttttataaaaaaagttttcagtgaggaaagacatacctatggacgctttggtagcgcaagtcgtattctattgctcaccgaaggggccctagcaaatgctttgaaagatgtgaagattagctgtatggagcaag

SEQ ID NO: 5210 - DNA, 2946 bp, Zea Mays
aaagggttcgacagttcgccaacgcccagctttctacgtgctccggccagcgccgcctcgcccagccacctccgcggctccgctcctctgcctcggcctcgcgccctctcccagcagcttcctcctgctcgcccctcgccgtctccgggcgaccgggcctgcaggcgccggcgcctcgccgcggcgccgcccggagcggcagctcctcggccggctcccctcagcggcactttggcacggcacttccgcagggcccaggtcccagcgacagccgacaggctcacaggcaacaccccttcaggcctcaggagctgtctcaagcctacagccgttccgcctcgctcttgtatctgacggtctgaccctaccctatctctgaggaggtcgaatctggcctgcccttctctctctttctcctacgatcctttctctcagtccaacgaaaccctcggaggcacggttcggttcgacgacatgctgtctggcgtgaagctggttccgcgagaccagatccagtctgatcagaagcgtaggggtgaccagggctccgattccgactcctccgacggcaagaggccgtggaagcacagtaaaagagggcgggacaagaaagagaagaagagacgaagcagccggcggcagcggaggcggagcaagaggtactcgtcggaagattctttggggtcagacaccgacgattcaatcggagaggaagaggaggatgatgtcagtcggagcaagcgtcgcgggaaggacaggaggcggcgacgcaacttctctgacgacgatgattccgaatccggcgaatctgaccggggaagagcctctcgcagggggaagcagagacgtgatgacgaggatgaggaggaagagactgaaggtgatgggcttagggcaagtgaggtggtcaggagggagatggggcttgaatggatgctcaagccagcaagcagcagccaaactgagggcaccggtgttcgtaaggttgataatgtcgagaaggatgaatctgcacatgaagagataatggaaccggatacccagaagaatcaaccccatcaaatgctggcagtcagttgcttgcatcctctgttgtgggtgatggaggtgccagctggagacttaaagctttgaagcgtgcaaaggagcaagctgctcgcgaaggaagaaaacttgaggaggttgttgaagagagatggagctcattaggcgacttagctgtttcagtatcagcatcaagagctgcccattcacatgctcatttgcatgccattagaggcagaaaatctggtaatgctgacaactcagaagaacgtgttaaaagaaatccagagggtcagctggatggtagcagtggcagacgtgaatatctacgggatgtttcttctcagcaccatgccatgagaaaaccaaaacctgattctgtcccatggaaaaagagaagacagaatatatcttctgaagatcaggcacttatctcatcagcggtagcaagcttaaataagttttctgatgatggaagctttatggaaaagattagcaatgttgagagcaagaacacaaatgtttccactgctagtgctagtgctgatgagcagagggacaatgggcagaaaacccctaaggagagttcaaacaaagtacaattagtgagcactcagaaactaaatgcaaaccagatggctgcaaagattctgcagctccgaatgaaaggcaagcatcaagaagctgaacaactttcgagagaaatggaagctttgctggagaatcaggatactgcccatgagaagcctggtcatggaaaagaaagaagctcaatcaggcctacattgaagcctactgcagctgatcacaggagaagagaagatgatgcggaccttcatttggctaataaaattatgcacaacaagcagtataacatgtccaaaagtatagaagatgaatatgattttggtgatgctcccactaaaaaggacaaaagaaagaataaagaagcacgtgacgagaggaaaagcactgatagacgtatgttgactcagaaggagcgttgtatgtattgctttgagaacccatccaggccaaaacatctggttgttgctattggaaacttcagctacttgatgctgccacagtttgagcctgttgttcctgggcactgtattattctcccattacagcatgaatctggaacgagaacagttgatcagaatgtttggggggagatccgcaacttcaagaagtgtctgctgaagatgtttgcacagcaggacaaggatgtgttgtttatggagactgtcataagcctggccagacaacggagacactgcatgattgagtgcatccctgtcccttgtgaagtgtcaagcaatgccccaatgtacttcaaaaaggctattgatgaagctgaagaagaatggacccaacatgagatgaagaaggttatcccgacaagtgcaagccgcaacttgaggcaagtcatcccggagaactttgcctacttccatgtggagttcgggctggaccgtggctttgttcatgtaatagatgacgagagcaagttcagtgctggatttggattgaatgtcattagagggatgctccagttgccagaggaggacatgcaccgtcgacgaaggcacgagtccatggataaccagaggcaggctgttgctagcttcatgaaagattgggagcccttcgattggacgaagcaacttgattgaatgtgaatacagttttgagaacgctcgaagaaaaattgcacgacttgtactaaaagattttgtaggaaacttgtattgatgttatgctatcactttgttttgtttcccaacatatatgtttatttccccagaaactaacaggcgcatgttctagctgtaaaatgatatcgactgagcaatgactgtcatttaaacttgcataacgatggacctatgtgtgatt

SEQ ID NO: 5211 - DNA, 2939 bp, Zea Mays
aaagggttcgacagttcgccaacgcccagctttctacgtgctccggccagcgccgcctcgcccagccacctccgcggctccgctcctctgcctcggcctcgcgccctctcccagcagcttcctcctgctcgcccctcgccgtctccgggcgaccgggcctgcaggcgccggcgcctcgccgcggcgccgcccggagcggcagctcctcggccggctcccctcagcggcactttggcacggcacttccgcagggcccaggtcccagcgacagccgacaggctcacaggcaacaccccttcaggcctcaggagctgtctcaagcctacagccgttccgcctcgctcttgtatctgacggtctgaccctaccctatctctgaggaggtcgaatctggcctgcccttctctctctttctcctacgatcctttctctcagtccaacgaaaccctcggaggcacggttcggttcgacgacatgctgtctggcgtgaagctggttccgcgagaccagatccagtctgatcagaagcgtaggggtgaccagggctccgattccgactcctccgacggcaagaggccgtggaagcacagtaaaagagggcgggacaagaaagagaagaagagacgaagcagccggcggcagcggaggcggagcaagaggtactcgtcggaagattctttggggtcagacaccgacgattcaatcggagaggaagaggaggatgatgtcagtcggagcaagcgtcgcgggaaggacaggaggcggcgacgcaacttctctgacgacgatgattccgaatccggcgaatctgaccggggaagagactgaaggtgatgggcttagggcaagtgaggtggtcaggagggagatggggcttgaatggatgctcaagccagcaagcagcagccaaactgagggcaccggtgttcgtaaggttgataatgtcgagaaggatgaatctgcacatgaagagattatgagaccgaacccaaaggaacttaacccataccttaaagataatggaaccggatacccagaagaatcaaccccatcaaatgctggcagtcagttgcttgcatcctctgttgtgggtgatggaggtgccagctggagacttaaagctttgaagcgtgcaaaggagcaagctgctcgcgaaggaagaaaacttgaggaggttgttgaagagagatggagctcattaggcgacttagctgtttcagtatcagcatcaagagctgcccattcacatgctcatttgcatgccattagaggcagaaaatctggtaatgctgacaactcagaagaacgtgttaaaagaaatccagagggtcagctggatggtagcagtggcagacgtgaatatctacgggatgtttcttctcagcaccatgccatgagaaaaccaaaacctgattctgtcccatggaaaaagagaagacagaatatatcttctgaagatcaggcacttatctcatcagcggtagcaagcttaaataagttttctgatgatggaagctttatggaaaagattagcaatgttgagagcaagaacacaaatgtttccactgctagtgctagtgctgatgagcagagggacaatgggcagaaaacccctaaggagagttcaaacaaagtacaattagtgagcactcagaaactaaatgcaaaccagatggctgcaaagattctgcagctccgaatgaaaggcaagcatcaagaagctgaacaactttcgagagaaatggaagctttgctggagaatcaggatactgcccatgagaagcctggtcatggaaaagaaagaagctcaatcaggcctacattgaagcctactgcagctgatcacaggagaagagaagatgatgcggaccttcatttggctaataaaattatgcacaacaagcagtataacatgtccaaaagtatagaagatgaatatgattttggtgatgctcccactaaaaaggacaaaagaaagaataaagaagcacgtgacgagaggaaaagcactgatagacgtatgttgactcagaaggagcgttgtatgtattgctttgagaacccatccaggccaaaacatctggttgttgctattggaaacttcagctacttgatgctgccacagtttgagcctgttgttcctgggcactgtattattctcccattacagcatgaatctggaacgagaacagttgatcagaatgtttggggggagatccgcaacttcaagaagtgtctgctgaagatgtttgcacagcaggacaaggatgtgttgtttatggagactgtcataagcctggccagacaacggagacactgcatgattgagtgcatccctgtcccttgtgaagtgtcaagcaatgccccaatgtacttcaaaaaggctattgatgaagctgaagaagaatggacccaacatgagatgaagaaggttatcccgacaagtgcaagccgcaacttgaggcaagtcatcccggagaactttgcctacttccatgtggagttcgggctggaccgtggctttgttcatgtaatagatgacgagagcaagttcagtgctggatttggattgaatgtcattagagggatgctccagttgccagaggaggacatgcaccgtcgacgaaggcacgagtccatggataaccagaggcaggctgttgctagcttcatgaaagattgggagcccttcgattggacgaagcaacttgattgaatgtgaatacagttttgagaacgctcgaagaaaaattgcacgacttgtactaaaagattttgtaggaaacttgtattgatgttatgctatcactttgttttgtttcccaacatatatgtttatttccccagaaactaacaggcgcatgttctagctgtaaaatgatatcgactgagcaatgactgtcatttaaacttgcataacgatggacctatgtgtgatt

SEQ ID NO: 5212 - DNA, 1319 bp, Zea Mays
aaatagtgaatcctgcaaccacacataatataactttgtagcacttcacctacaagtaagtatcccaaggtatcaatatttatttgatcccaagggaaagcagtagctagaaattataatgagtaagtccaaagagtgatgaaataagtagtttaaaggagtaatcagttatggacatgtttttatgacttcttcgattatggacacatttttctcaccatttaatcgactcaaacttatcacaaacaagaaggacatagttaagattgttattgtactacacatagaggttttcttacaaccacacacatttcagggtccaattacttcaatgcatacaataccaacacaacaagaacacactaccaacagaatcaacatcttcactgctctgagcaggacatctactgttcttgccaaaccattaatgtctacattgtattgatgttacattgttactagcaaggttgtttcttctatgctgagcggctgcaagtagcatctgctcctcgaaatgaagtgtagctagcaaggatatatggctggcttagcatgattatcccatcttatcttaggtagcacgtagcagagtagcgcttcagcagcggcgttagtgttcattgcagactacagatgaacactggatcatggaatattagagagaacatttgtttctgagtgtcttggttcctcgtgatgccactgcgatgttcgtgtgcatggtatcttgcacgggttcagattagaaccctgctctgaagtgcgaagcgaaccttccttgcaaggagtgcgtgcaggaagtagaccagtcagtgtccatgcttgccacactccgctcatccaaataaaacgcgtacctgccggccttgctgatgagaacatggacgcctcacgcctgccctgcaacacgggaagctcggcggatcactgccgtctccatgagtcacggggaatgaagctaccgactcgatcgacggatccggatggaagaggaaggagccccgtgtaagcacaagcaccgagcgcaactgatagatatacccagcgacggggaaaggagaaagaggaagaagcggacgccgagagccggacgcgacagcagagatcttgggcggtgcaccccccgatcgatcagatgctattcgcgtcgctttcctttcgggacagcggtggactggttgctgtggtcccgcgcgcgcggcgaagcaaacggaccgcggccaggcagaggcagaggcacgagcacgagggaagccgatcgaaccaggcaatcccgtcgtcgtcagtcgtcaccacgtccacatgctactcaggattcc

SEQ ID NO: 5213 - DNA, 1132 bp, Zea Mays
ccacaggcctcccgtgcgccccgcagccgtctccaacggccgatccatgcccgtctggcgtcttcctcagtcgcatcccctcgttgaggtcgacagcgacggccatggcggcggcctcttctgcggcgccggcgaggcacagctgcgcaaagctctcggtcccagtggaggaccccaaagcagtgacggcgggcggtggcaccgtcttcgtcaaagccacgtggctgccgtcccgcttctccctcgccgtgaccgatggtgccggcgcctgggtcgccgacgcctctgaccacgagctcgcttggacatttgaaagacaaggtaccaagttggaatggcggtggaagctgcagccttcaccaaacacgcagcagactatatctgagatcctggattttcttatggatgcaaatatacgcttaagtgaagaggttgtgaggaaaacacaatcctttgacaagttgaaacaagaagctgagaagtgcttgcaacaaagtgaaagatttaacaatgagaaagctgagttcgaacaagccgccttttcaaagtttgtggccgtgttgaattcgaagaaggccaagctcagacaactcagagataaagttgtggagctcgaacccgctgtcaagcctccaaaggaggaggcaggtcaggagcaggaggaggaggaggagaactcaacggaccggacagagctcttcgagggagagaatgacaaagaagcaagcgccaaggatgaacactccggcgagacaggcagcggcaacgttcctagttctcctggggaatcggcagctacctccagaggaagaggacgagggagaggtcgtaagaaggcaagaagataggctgcctagactgacaatagcaggtcctactcggaaattcgctaatcgtcgtggtgcgtctttagccggctagtctcatttccaagagcacgtgtctttcatgtacctttgtgttcgcgtgctgttggcaggcagagtattgcctgtgaaactgattgtccgtctgcttcgtctcatcagtggaaaatattttccatttcatcacatgtgtcagtcatgtgacatgcttttcacctgcgcgtggaaaaaaaacgaatgaaaaaaggggggaggaatgtttgacc

SEQ ID NO: 5214 - DNA, 3805 bp, Zea Mays
aaacatgcacagagtgctctcctggcgtctgcgttggctgctggactggaccaaataatcgtctgcgcttccgttccacgcggcaaaaacatttcctgcggttgaccacaccacctgctccccccctccccccaccccccagccttcgcggcaccggcagacggggaggaagcaccgccgcccgcctccgcgggagagcaagcgggagaagacgaaccggatctggaagcgaacctaagctgcgcggtttgtcattgaaaacagtgcgaagagtgagatgggtgaagctctgctaagagattcttcaggtttcttcttggggatggaatcattgccgtgtccatcttggtcagttgagttggagatgggtgcaaccctgaacaaggaattgagaactcgagattgttcgtggggctggaatgttgggcccatctgttccagttcttgtgggggtgcgagcggcaaatacagcgccggctcttggtttccaagtggccccctacgtggaaccttctgagacggctatcctacgtgtacgctagcctccaaacttcaaagcgcgtctctgcagggctcgcacgtgctctttttccctcctcaccccgaattaacaatcgcgaaatcccaggtttgacctttcccccagccttgttgttccagtggggcccactacacccatgtccccttcttcctcgcacacgcgggacactgcacctgagcctctcaagccctcaacacgccaatttgaccacgtgaccgtaatcttgatccacggcctccttgcacttgcaccgcaccggtgcctatttaacccgcgctcgaacaactctctgccggcaacgcaaccaaaccgctctcgctctcggctctcggctctccaccagtctccgctctctggacgccggaaatgcagatggactcctacaactacaactacgccagtttcttccacgacgaggctccgtccttctacccgcacgttgcggtgccgccctccccggagctgcccatcggcctcattgcctcgccaggggagccggagccgcccttcgcgccgccgatgccggcctcgttccaggactacacgggcgccgtgggcgtgggcgtaggggtgagagcgccgttcgggggtgccagcgtgcacgggcaggcgatcgacgcgctgggcgggggcgacgggcagcgcgagcagagcatggcaatggcggaggacggggaagagccggcgccccggcggcggcagccggcgggaggccccgccgccgccgccgtcgagagcagccgcgggttccggcacatgatgcgggagcggcagcggcgcgagaagctgagccagagctacgccgacctgcacgcgctggtggcggcccggtccaggggcgacaagaactccatcgtgcaggccgccgccgtgtacatccacgagctcaggggcgcgcgggaccagctgcagcgccggaacgaggagctcaaggcccgcatcctgggccacgacgccgggcagcagtgcgtcaaggtgcagttcgaggtggacgagccggcgtccgccatcgactccatgatcggggcgctcaggcgcctcaagggcatggacgtcagggccaggggcatccgctccagcctgtccgggcgcaggctgtggacggagatgaatgtggagaccacgatggcggccgacgaggtggaaaggggcgtggaggaggctctgctgcaggaagtggagaggaagcagcagcagcagcttggagctgggagcgccgcccctggttttccaggcccgtcatcgcacgtgcaaaacgtgttttgacacgcgatcctcccccacaacaagaagcgaaaaagaaacatgaaccccgagcctcatttcttgattcttttttctttaagaaccggatgcgcaaaacgagcatccgcgtccctggctctattgatttatttttaagtagaaatcggtgctgtttgtgtacaagtgttgtcgcagcctccaagtgggattttgagcacgtgtataaagttatagggctcgtgttcttacaacacacacacacaaaaaaaaaaagagacgtgcggacagtgaggactgaggacatgtgggcagggatcaagtgggccggaggaagcgggcgagaaatggggtcgagggacaggcacgttccggtcgtgccgtgtggagattcctagccgcggcggcaaccggtcaccagtgtgctctcgttgtccttggtctctactactcctgctacaaatggtgacgcctttattttatcgtgtggagtggatgtaaatggacgccaccacaataaattagagtactaaattaattttagtttaaaaataaataaataaaaatagagtatgattctaatcctattcactcttaaatctctactactacttatgttagtatggtaggcgtgcacagttgtggttctgccgcgcctccacgtccctccgcgccgcccgaaatcttggatcgcatcaacagccgcaatgcctcgcctgcccctgtctccgcgaatctcgcctcccccgcccccacaaatctcgccgtcgccattatctcaagttctcaacccgtccacagcctcctctccaacagcaagcgccgccgccgcctcgcctcggcaaacccggctccagggcgacagctcccgccggcgggacaacatacttcagcgccgtgaagccgtccgtgatccagctgcgggggcccaccaaggtcagcgtcttcatcgccagcaacgacgccgagcaggcctgccgcctgcgacttcaggatcaccggaagctaccacgacagcgcctgtgccgtctccctcggtgactccgacaccgtcatcaccaaggacatggacatcggccaccatgtgaatggcctgcgtaagcacccatccaacgaggtctggcaactggtgaagctgctcgttaggaaatggaaggaaatagtggatgattgggtgaggctgcacaactcaggtggtgatggtagtggctccatcatatgcgatggtgactcacctgacaaagtccaatccaagtaccatcaaaatactcatgatcattgcgtctctgcgagctaatcagctctgtgagcgtctccctagccccaatggcgagtcaactattgattgccatcagatctcaaagatgccaaatcttgcattcaccatagcaaataagactttcaccttaacaccagagcagtacatagtgaagctagagcaagcaggacaaactatctgcatcagtgggtttatggcatttgacgtaccgcctcctcgtggtcctctctggatacttggtgatgtttttatgggtgtctaccacactgtttttgacttcggcgagaacatgattgggtttgccaaatctgcatgaggactggagttctgcgctttagtagcatgtccagtttgttatcccggtattgtacatatatatgttgccaactggtgtaatccgcagtgtttaatagtatatattcatgcagaaatctagaagattgtggcatgatatgtgtttgcaaatggagctatgttatgtatggagctccaggacctagagttttatgtaaagggagacgatgaggattagggcttttaacctattctcatcacgttattgtcctgattactatgtgtaagtatggttgctgagcttgtttgggagcaagacaattggaggggatgagtggactaaaattcccttcctatcaaaattgaatataaagagtattttagctctctcaatcttcttcaattctcttgctcccaaacatatccttatagtttgggggtgtgtcgct

SEQ ID NO: 5215 - DNA, 3904 bp, Zea Mays
cctgctccccccctccccccaccccccagccttcgcggcaccggcagacggggaggaagcaccgccgcccgcctccgcgggagagcaagcgggagaagacgaaccggatctggaagcgaacctaagctgcgcggtttgtcattgaaaacagtgcgaagagtgagatgggtgaagctctgctaagagattcttcaggtttcttcttggggatggaatcattgccgtgtccatcttggtcagttgagttggagatgggtgcaaccctgaacaaggaattgagaactcgagattgttcgtggggctggaatgttgggcccatctgttccagttcttgtgggggtgcgagcggcaaatacagcgccggctcttggtttccaagtggccccctacgtggaaccttctgagacggctatcctacgtgtacgctagcctccaaacttcaaagcgcgtctctgcagggctcgcacgtgctctttttccctcctcaccccgaattaacaatcgcgaaatcccaggtttgacctttcccccagccttgttgttccagtggggcccactacacccatgtccccttcttcctcgcacacgcgggacactgcacctgagcctctcaagccctcaacacgccaatttgaccacgtgaccgtaatcttgatccacggcctccttgcacttgcaccgcaccggtgcctatttaacccgcgctcgaacaactctctgccggcaacgcaaccaaaccgctctcgctctcggctctcggctctccaccagtctccgctctctggacgccggaaatgcagatggactcctacaactacaactacgccagtttcttccacgacgaggctccgtccttctacccgcacgttgcggtgccgccctccccggagctgcccatcggcctcattgcctcgccaggggagccggagccgcccttcgcgccgccgatgccggcctcgttccaggactacacgggcgccgtgggcgtgggcgtaggggtgagagcgccgttcgggggtgccagcgtgcacgggcaggcgatcgacgcgctgggcgggggcgacgggcagcgcgagcagagcatggcaatggcggaggacggggaagagccggcgccccggcggcggcagccggcgggaggccccgccgccgccgccgtcgagagcagccgcgggttccggcacatgatgcgggagcggcagcggcgcgagaagctgagccagagctacgccgacctgcacgcgctggtggcggcccggtccaggggcgacaagaactccatcgtgcaggccgccgccgtgtacatccacgagctcaggggcgcgcgggaccagctgcagcgccggaacgaggagctcaaggcccgcatcctgggccacgacgccgggcagcagtgcgtcaaggtgcagttcgaggtggacgagccggcgtccgccatcgactccatgatcggggcgctcaggcgcctcaagggcatggacgtcagggccaggggcatccgctccagcctgtccgggcgcaggctgtggacggagatgaatgtggagaccacggtgagcagcactctcgccatcctcgttgaatcgtccttgtgctttgctgacaatgactgatccacttcaaaattaaccgcaacatgtcagcgccctcgaaagaatcattgtcaatggacaatggggtgtgccacttgttagttgttagttactcgatcgacgcaacactggagctaaaccacgcggttcctcttgtcgtcctgggtttgcagatggcggccgacgaggtggaaaggggcgtggaggaggctctgctgcaggaagtggagaggaagcagcagcagcagcttggagctgggagcgccgcccctggttttccaggcccgtcatcgcacgtgcaaaacgtgttttgacacgcgatcctcccccacaacaagaagcgaaaaagaaacatgaaccccgagcctcatttcttgattcttttttctttaagaaccggatgcgcaaaacgagcatccgcgtccctggctctattgatttatttttaagtagaaatcggtgctgtttgtgtacaagtgttgtcgcagcctccaagtgggattttgagcacgtgtataaagttatagggctcgtgttcttacaacacacacacacaaaaaaaaaaagagacgtgcggacagtgaggactgaggacatgtgggcagggatcaagtgggccggaggaagcgggcgagaaatggggtcgagggacaggcacgttccggtcgtgccgtgtggagattcctagccgcggcggcaaccggtcaccagtgtgctctcgttgtccttggtctctactactcctgctacaaatggtgacgcctttattttatcgtgtggagtggatgtaaatggacgccaccacaataaattagagtactaaattaattttagtttaaaaataaataaataaaaatagagtatgattctaatcctattcactcttaaatctctactactacttatgttagtatggtaggcgtgcacagttgtggttctgccgcgcctccacgtccctccgcgccgcccgaaatcttggatcgcatcaacagccgcaatgcctcgcctgcccctgtctccgcgaatctcgcctcccccgcccccacaaatctcgccgtcgccattatctcaagttctcaacccgtccacagcctcctctccaacagcaagcgccgccgccgcctcgcctcggcaaacccggctccagggcgacagctcccgccggcgggacaacatacttcagcgccgtgaagccgtccgtgatccagctgcgggggcccaccaaggtcagcgtcttcatcgccagcaacgacgccgagcaggcctgccgcctgcgacttcaggatcaccggaagctaccacgacagcgcctgtgccgtctccctcggtgactccgacaccgtcatcaccaaggacatggacatcggccaccatgtgaatggcctgcgtaagcacccatccaacgaggtctggcaactggtgaagctgctcgttaggaaatggaaggaaatagtggatgattgggtgaggctgcacaactcaggtggtgatggtagtggctccatcatatgcgatggtgactcacctgacaaagtccaatccaagtaccatcaaaatactcatgatcattgcgtctctgcgagctaatcagctctgtgagcgtctccctagccccaatggcgagtcaactattgattgccatcagatctcaaagatgccaaatcttgcattcaccatagcaaataagactttcaccttaacaccagagcagtacatagtgaagctagagcaagcaggacaaactatctgcatcagtgggtttatggcatttgacgtaccgcctcctcgtggtcctctctggatacttggtgatgtttttatgggtgtctaccacactgtttttgacttcggcgagaacatgattgggtttgccaaatctgcatgaggactggagttctgcgctttagtagcatgtccagtttgttatcccggtattgtacatatatatgttgccaactggtgtaatccgcagtgtttaatagtatatattcatgcagaaatctagaagattgtggcatgatatgtgtttgcaaatggagctatgttatgtatggagctccaggacctagagttttatgtaaagggagacgatgaggattagggcttttaacctattctcatcacgttattgtcctgattactatgtgtaagtatggttgctgagcttgtttgggagcaagacaattggaggggatgagtggactaaaattcccttcctatcaaaattgaatataaagagtattttagctctctcaatcttcttcaattctcttgctcccaaacatatccttatagtttgggggtgtgtcgct

SEQ ID NO: 5216 - DNA, 3093 bp, Zea Mays
cctgctccccccctccccccaccccccagccttcgcggcaccggcagacggggaggaagcaccgccgcccgcctccgcgggagagcaagcgggagaagacgaaccggatctggaagcgaacctaagctgcgcggtttgtcattgaaaacagtgcgaagagtgagatgggtgaagctctgctaagagattcttcaggtttcttcttggggatggaatcattgccgtgtccatcttggtcagttgagttggagatgggtgcaaccctgaacaaggaattgagaactcgagattgttcgtggggctggaatgttgggcccatctgttccagatggcggccgacgaggtggaaaggggcgtggaggaggctctgctgcaggaagtggagaggaagcagcagcagcagcttggagctgggagcgccgcccctggttttccaggcccgtcatcgcacgtgcaaaacgtgttttgacacgcgatcctcccccacaacaagaagcgaaaaagaaacatgaaccccgagcctcatttcttgattcttttttctttaagaaccggatgcgcaaaacgagcatccgcgtccctggctctattgatttatttttaagtagaaatcggtgctgtttgtgtacaagtgttgtcgcagcctccaagtgggattttgagcacgtgtataaagttatagggctcgtgttcttacaacacacacacacaaaaaaaaaaagagacgtgcggacagtgaggactgaggacatgtgggcagggatcaagtgggccggaggaagcgggcgagaaatggggtcgagggacaggcacgttccggtcgtgccgtgtggagattcctagccgcggcggcaaccggtcaccagtgtgctctcgttgtccttggtctctactactcctgctacaaatggtgacgcctttattttatcgtgtggagtggatgtaaatggacgccaccacaataaattagagtactaaattaattttagtttaaaaataaataaataaaaatagagtatgattctaatcctattcactcttaaatctctactactacttatgttagtatggtaggcgtgcacagttgtggttctgccgcgcctccacgtccctccgcgccgcccgaaatcttggatcgcatcaacagccgcaatgcctcgcctgcccctgtctccgcgaatctcgcctcccccgcccccacaaatctcgccgtcgccattatctcaagttctcaacccgtccacagcctcctctccaacagcaagcgccgccgccgcctcgcctcggcaaacccggctccagggcgacagctcccgccggcgggacaacatacttcagcgccgtgaagccgtccgtgatccagctgcgggggcccaccaaggtcagcgtcttcatcgccagcaacgacgccgagcaggcctgccgcctgcgacttcaggatcaccggaagctaccacgacagcgcctgtgccgtctccctcggtgactccgacaccgtcatcaccaaggacatggacatcggccaccatgtgaatggcctgcgtaagcacccatccaacgaggtctggcaactggtgaagctgctcgttaggaaatggaaggaaatagtggatgattgggtgaggctgcacaactcaggtggtgatggtagtggctccatcatatgcgatggtgactcacctgacaaagtccaatccaagtaccatcaaaatactcatggagtcaaattcagaacctgaggagtgctactcagatcacctaaccaactcagttaaatctttttttatgaaagatttgacaggtgtgtagctcaatttcccttaatgttgtcattctacataaaagcaccgccctcccgtggttgctgattccctgtaccaggcacttggtattcctcccacgttctttgcgatagggacttggtattcctctgagcacgacttcaacggcggcaactgcgaccaggcacgcaggcaccgggtggtggtcgaatcgagggaggccatgcccctgtccttcgacaactccaccaccgaggattcagcggctgccgtgaagcctaagcccaaggtcagggtcaggaagaaccccatgaagcagtcatgcttcgacttcaccaaggtggacgccgtgcttctccccatcgtcttcctcctcgtccgccccaatgttggcaagtcagccctcttcaacagattctagatgatggtacgacaaattattttaggagtgctttgccataatttaaagcttggaagggagctttctatgatttatttttctgactgtttcgtcacatgttctttccctagatgaaagtcttgatttatttttggttctgcaggatcattgcgtctctgcgagctaatcagctctgtgagcgtctccctagccccaatggcgagtcaactattgattgccatcagatctcaaagatgccaaatcttgcattcaccatagcaaataagactttcaccttaacaccagagcagtacatagtgaagctagagcaagcaggacaaactatctgcatcagtgggtttatggcatttgacgtaccgcctcctcgtggtcctctctggatacttggtgatgtttttatgggtgtctaccacactgtttttgacttcggcgagaacatgattgggtttgccaaatctgcatgaggactggagttctgcgctttagtagcatgtccagtttgttatcccggtattgtacatatatatgttgccaactggtgtaatccgcagtgtttaatagtatatattcatgcagaaatctagaagattgtggcatgatatgtgtttgcaaatggagctatgttatgtatggagctccaggacctagagttttatgtaaagggagacgatgaggattagggcttttaacctattctcatcacgttattgtcctgattactatgtgtaagtatggttgctgagcttgtttgggagcaagacaattggaggggatgagtggactaaaattcccttcctatcaaaattgaatataaagagtattttagctctctcaatcttcttcaattctcttgctcccaaacatatccttatagtttgggggtgtgtcgct

SEQ ID NO: 5217 - DNA, 2193 bp, Zea Mays
ctcgcctgcccctgtctccgcgaatctcgcctcccccgcccccacaaatctcgccgtcgccattatctcaagttctcaacccgtccacagcctcctctccaacagcaagcgccgccgccgcctcgcctcggcaaacccggctccagggcgacagctcccgccggcgggacaacatacttcagcgccgtgaagccgtccgtgatccagctgcgggggcccaccaaggtcagcgtcttcatcgccagcaacgacgccgagcaggcctgccgcctgcgacttcaggatcaccggaagctaccacgacagcgcctgtgccgtctccctcggtgactccgacaccgtcatcaccaaggacatggacatcggccaccatgtgaatggcctgcgtaagcacccatccaacgaggtctggcaactggtgaagctgctcgttaggaaatggaaggaaatagtggatgattgggtgaggctgcacaactcaggtggtgatggtagtggctccatcatatgcgatggtgactcacctgacaaagtccaatccaagtaccatcaaaatactcatgtaactattcttccacgctccaatttaggctgatcttctgtttcttgtatatagtaatttagtaattgcaaataaaataattgtgccacaccagataaaaaaactcgacctaccagtggtaagacaaccatatggtgtcggatagacaaggggaatttttttaacccacgaccggtgccaggaccttagaccagtgcttcggcaataggacagacgaagggattttttaacccccgcataaaatttgctctcacagggagtcaaattcagaacctgaggagtgctactcagatcacctaaccaactcagttaaatctttttttatgaaagatttgacaggtgtgtagctcaatttcccttaatgttgtcattctacataaaagcaccgccctcccgtggttgctgattccctgtaccaggcacttggtattcctcccacgttctttgcgatagggacttggtattcctctgagcacgacttcaacggcggcaactgcgaccaggcacgcaggcaccgggtggtggtcgaatcgagggaggccatgcccctgtccttcgacaactccaccaccgaggattcagcggctgccgtgaagcctaagcccaaggtcagggtcaggaagaaccccatgaagcagtcatgcttcgacttcaccaaggtggacgccgtgcttctccccatcgtcttcctcctcgtccgccccaatgttggcaagtcagccctcttcaacagattctagatgatggtacgacaaattattttaggagtgctttgccataatttaaagcttggaagggagctttctatgatttatttttctgactgtttcgtcacatgttctttccctagatgaaagtcttgatttatttttggttctgcaggatcattgcgtctctgcgagctaatcagctctgtgagcgtctccctagccccaatggcgagtcaactattgattgccatcagatctcaaagatgccaaatcttgcattcaccatagcaaataagactttcaccttaacaccagagcagtacatagtgaagctagagcaagcaggacaaactatctgcatcagtgggtttatggcatttgacgtaccgcctcctcgtggtcctctctggatacttggtgatgtttttatgggtgtctaccacactgtttttgacttcggcgagaacatgattgggtttgccaaatctgcatgaggactggagttctgcgctttagtagcatgtccagtttgttatcccggtattgtacatatatatgttgccaactggtgtaatccgcagtgtttaatagtatatattcatgcagaaatctagaagattgtggcatgatatgtgtttgcaaatggagctatgttatgtatggagctccaggacctagagttttatgtaaagggagacgatgaggattagggcttttaacctattctcatcacgttattgtcctgattactatgtgtaagtatggttgctgagcttgtttgggagcaagacaattggaggggatgagtggactaaaattcccttcctatcaaaattgaatataaagagtattttagctctctcaatcttcttcaattctcttgctcccaaacatatccttatagtttgggggtgtgtcgct

SEQ ID NO: 5218 - DNA, 1896 bp, Zea Mays
attagagccaccggcgcgtatcagcctgtgcaggcccgtccatggaggggatggaggaggccaacaggacggcagtggagagctgccaccgggtgctggcgctcctctccaacccgcacggccagctcgtccccagcaaggagctcgtggccgccaccggggaggccgtcgccaagttcggctcactgacggccaagctctccaactccaacggcgatggcctactgcagggccacgctagggtcaggaaggtcaagaagcccctgcacatcttcgacagcaacctcttcctcgagagctctgcggtggccgccgccgctgctccggccaagacgcccagcccgagcccgatccttggcctccagctgttcccgaggtaccaccagtttgagggctcgtcgtctaaggatcctgtcaggatccctacccagttccccaagaggttgctgctagagaagccgactgccggtatggaggggtcgacgtcgcagtcccctccgatcgtccagatggtccagccggtgtccgttgcgccccccgcagggacgcccaccccggcattgccccccgctcaccttcatttcatccagcagcagcaaagctaccagaggtttcagctcatgcagcagatgaagatccagagcgagatgatgaagaggagcaatcttggtgatcagggtggtagcttaagtggcggcggcggcggcggtcgtaagggtgtgaatctcaagtttgacagctctaattgcacggcgtcatcgtctcgctcgttcctttcgtctctgagcatggaagggagtcttgcgagtttggatggaagccggaccagcaggccgttccagctacttagtggctctcagacagctagcacgccggagctgggcctggtgcaaaggagaaggtgcgctggcagggaggatgggactggtcggtgtgcaaccgggagccggtgccattgttcaaagaaaaggaagctaaggataaggaggtccatcaaagtccctgcaataagcaacaaggttgcagacatcccagctgatgaattctcatggaggaagtatgggcagaagccaattaagggatccccacatcctaggggttattacaagtgtagcagtgtgagaggctgccccgcgaggaagcatgtcgagaggtgcgtggacgacccctcgatgctgattgttacctatgaaggtgaccacaaccacaaccgagttctagcccagccagcctgatctttcaggctatcaattcaagatcgcttctacagtcaccctccctccctccctagagaagggatgacaacgacgacagtagcaataacaagagcctagtgcctgtacatatgttctgcttctaacagttggaggagagagtcagttagctagctctttcagaaaaatcaatggtgacaggggggaaacttgtcatgtcgatggagaaagggggaggagggttcctcatcaaatactctagttttgtagttttggtttctcttttgtgttcgtcctgtgctagggcccatcttgtggttgcagtgtgacattgagccgcagttgtatgtctggtaatggtgttaggggattggatcgagaagaagagcacaaggcaggaaaagtgcctgtaaaagtggctacacctaggaacagaatgtacaatcgtcttcagtccagtggtacaatcttgttgacgcagtggtttgggtctgtggcgtgttgtttgttagcgccagtgatgctgcgaggcatgggggttgccggctccggctctcagcgtgccgcatccgtgcagtggcatttgtactggggcgtctgccgtttgagaggccggtttgctgcggtctgcgtgtcgccactgtctgaactctgacgctgcttttgacagtttggcatcttc

SEQ ID NO: 5219 - DNA, 1387 bp, Zea Mays
cggaatcggagtcgtgtgtgtgagcacatggagcccttcacggctttgccgaaacgagccggggctcggccggtatagattgcgtagaggcggcaggcagccatgagcctgtctacgtgcaacgtttcttgtcccggcagagccatagccaccatctgccggccacttaaaacgcctgtgctgctgccgtctcccgcccggcctactaactgccacggtgccaccgcatcgcacttgattgggccggggcgttgcgctctctggtctggtcaaggcgtcgagcgtccgtcctccaatggctggcgcggcggcggagcgcaaggtgatcagggtcctcctcgtcgaggacgaggagatccacagggttctggcgagggcgctgctgaggtcggcctgcggcggcgtggagctgcacgaggcggggacgggcgccgaggcggtgcggcgcgtgcgggatggcggcgccgccgccgcctacgacctcatcatcaccgactggaagatgcccgtcatggacggccacgaggcgacgcggcagattagggcgatgggcgtgacaacgccgatcgtcgggctgtccagcgacaccctcccgccagacgtcgacgcgttcatcaaggccggggccgacgacttcacccccaagcctctgtccaaggagaagctcgtccgtatccttaccaagttccatctcgcttagctctctatttgctgtccaaggagaagttcatccgggtttttttttttggttgccaaattggcaaatacaatctccactttgctctctgtttgggtgcaaatctcaatgagtggataaataaagggtctcgaagaatcgggtgggctttcttccactatggaccttgggccttatatcagctcgtgttatccttctcgcatataattcacacccgctctgtaatctgtacgttggttggtattggcatcacatgacaacaaggccctctttgttaggaccgtctcctctgaaaacagctatagatctgatttctctaaagtagttagagccatattgcaatttatttggcaaatcagcttcgcttgtgttttctgaatagtgtatgaggaaaatgtgcatagtgcttatgtctcatttatttagttgtatatatataagaggcatatttatatatagactccaggaacccctcctcttttgttgaaaacaaacatacagaaaatagaaatagagccgcttcattcttttccgctcatcaaccaaacacacctttgatgaattttagtaggagtcggtagaagctagtttttggtgctctaacttccaacaagaaaatggctccatctctttaaagactctcaacgagaaaccgcttttcatgactgtttggcaaggcttcacaatgag

SEQ ID NO: 5220 - DNA, 1257 bp, Zea Mays
ccaccatctgccggccacttaaaacgcctgtgctgctgccgtctcccgcccggcctactaactgccacggtgccaccgcatcgcacttgattgggccggggcgttgcgctctctggtctggtcaaggcgtcgagcgtccgtcctccaatggctggcgcggcggcggagcgcaaggtgatcagggtcctcctcgtcgaggacgaggagatccacagggttctggcgagggcgctgctgaggtcggcctgcggcggcgtggagctgcacgaggcggggacgggcgccgaggcggtgcggcgcgtgcgggatggcggcgccgccgccgcctacgacctcatcatcaccgactggaagatgcccgtcatggacggccacgaggtgcggcatgccgtatgcgcgacgcggcagattagggcgatgggcgtgacaacgccgatcgtcgggctgtccagcgacaccctcccgccagacgtcgacgcgttcatcaaggccggggccgacgacttcacccccaagcctctgtccaaggagaagctcgtccgtatccttaccaagttccatctcgcttagctctctatttgctgtccaaggagaagttcatccgggtttttttttttggttgccaaattggcaaatacaatctccactttgctctctgtttgggtgcaaatctcaatgagtggataaataaagggtctcgaagaatcgggtgggctttcttccactatggaccttgggccttatatcagctcgtgttatccttctcgcatataattcacacccgctctgtaatctgtacgttggttggtattggcatcacatgacaacaaggccctctttgttaggaccgtctcctctgaaaacagctatagatctgatttctctaaagtagttagagccatattgcaatttatttggcaaatcagcttcgcttgtgttttctgaatagtgtatgaggaaaatgtgcatagtgcttatgtctcatttatttagttgtatatatataagaggcatatttatatatagactccaggaacccctcctcttttgttgaaaacaaacatacagaaaatagaaatagagccgcttcattcttttccgctcatcaaccaaacacacctttgatgaattttagtaggagtcggtagaagctagtttttggtgctctaacttccaacaagaaaatggctccatctctttaaagactctcaacgagaaaccgcttttcatgactgtttggcaaggcttcacaatgag

SEQ ID NO: 5221 - DNA, 2699 bp, Zea Mays
aggaagaaaggaacccaccaaagcttcaaaaaaagaaaaagagctgcacactggtcactggaaaacgaaggcaaaccctaatcgctactccaccgcagcgcccactacaccgatcgggctccgatggacttcgcggagctggaggccgtggagggcctccggtggccatggcactcgtggccgccgactacccccgccgccgcgtccctcgtcgtgcccacctccgtcctctgctcgccgctgcagcaccccacggcgccggacctcctcccgctgctaccctacgcgccgctccgctgcgcctccccgggttgtggcgccgcgctcaacccgttctcgcgcgtgcaccacggctccgcgcgctggtcctgcgccttctgtggcgccgccgccaacccgttcccccgcctactggcccccgacgcgctccccgccgaactcttccccacccactccagcgtcgagtacttgctgcccccggaccccgctgagcccgggggaccggggccacctgcgctcgtgttcgtgatcgatgcggccacggcggccgaggagctcaccgtgctcaaggacgaggtgcgcaggctcatgcaggggctgcctgaggggatcagggtggcgctcgtcactttcgctgcgtctgtgtgggtgcacgatcttggatttgagggttgcgctcgggtggttgtgcttaatggcgagcgtgagctcgagtctgacaagatacagaaacttttaggtattcaccgttcacagtacaagaacttggctatgccaaggtccactgaagtgcagcggtttttgctgcctgtttctgaatgtgaatttaacatcacatctgcaatagaggacctgagctccatgcctgcgtgtccacgtgggcatcgccctttaagagcaactggcgcagcgatttctactgctattgctcttctagagggttgctgctcacccagtaccggtggtcggattatgatctttacatctggtcctgcaacagttggtccagggtgtgtggtggaaactgatcttgggaaaacaattcgttctcatcgtgacatattcaatagcaacgcaccgctgactgacaaagcacgtgatttctataagaaagttgcaaagaggttgacagaccatgcattagttcttgatctattcgcctgctctcttgatcaggttggggctgcagagctgaggaatccaattgaagtgacagggggtttaatggtgcatacagagtcatttgagtatgagcagttcaaaagctgttttaggcatatgttccgtcgtgaaggcaccaattaccttaatatgaactttaatgcgacgattgaaatagtgacatcaaaggaggtgaagatttgtggtgcccttggtccctgcatttccctccgcaggaaaaataactcagttagtgataaggaaattggtgaagtttatgacaaggtaccgacatggtgatggtagttatcgcctgagggtgacgactgttgcaagaaggtgggctgctcctcgatctcctgaaattgctgcagggtttgatcaggaagctgctgcagctgtaatggccaggcttgctgtttacagggcagagacataccatgttagagatgttatacggtggcttgacaagatgcttattcgctttactgctaagttcggaaactatgttcctgaagatccatctacatttcggctgtcaacaaacttctccttgtatccgcagttcatgtactacttgcggagatcacagttcattgatgttttcaacagctctcctgatgaaactgctttcttcaggttgatgctgaatagggaaggggttgtggggtctctaatcatgatccagcctactctattccagtactcatttgatgggccacctattcctgtactgttagatgtcagctccatctctcctgatgtcattttactatttgattcatacttctatattgtgattcattatggctcaaagattgctcaatggaggaagcttggctatcataaggacccaaaccatgaaaatttacggaagctccttgaagcaccagaagtagatgcagaggcactattggtagaccgtttccctgtgccaaaactcataaagtgtgatcatcatggtagtcaggccaggttcctgctcgctcgattgaatccatctgtgacacagaaaacacagttttcaaagggatctgaagtcattttcaccgacgatgttagtctgcaagtgtttattgaacacttgcaggagttggctgttcagggctagaaagtcatgaagcttgaccttgtctgctattccactttggtccattagatactgaagatatggctttgagagggaccagacttcatattcacagatgaagcttgcaagttttttattgaacacttgcagtaattggtgtgcaggattaactagttcatgtggaattatttaaatgcaattttctgctcacttgcaaatactggggagctctactgcctggagtgagatctccctgagttgtacattgctcaagctccagtttgatggacaacaatcaacaaggcagcatataagaagctgaagcctgaacatttgcctgatcaaatcctagatgatggcacactagaatgcagaacatactcccacgggacgtcgccaacgagcatccagtcgccatccttgtcttcgtaagtagtgaccacatcag

SEQ ID NO: 5222 - DNA, 2985 bp, Zea Mays
cccatgacaggttgggtgctgcagcctgctacacgatgccgtcgtcgtcggagccgacgccgcctcagactcggccgccgcggcagcgccggctctcccggtgccggtactggtaccgggccgaaatttgacccccctctctctgctgagcacacggccacacgccccaactctcgcgatggcggcctctgccgccgcggggcgctcgtgggacccagccgtctcgctgcggctgggccaccctgcgctggtgctcctcgagcggtgccgcggggcgcggccgttccgggccatccttgcccacctgctccgccttggcctcgccatggagacgttccctatgagccggctcctccattacgccatcgtcgtgtcctccccgcgcctcacgcgcgaggctgagctcctcttccagcatttcacgccccgccccaatctctacatctataatctcatgctctccgcggcggcggcgcgcgactcctcctcgtcgacccaggcggcggctctctaccggtccatgctcgcgtcgtccgtcctccccgaccagcagaccttcctcgctctgcttaggtcggtggaacgcctgtccgccgggaggcaggtgcacgcccatgtcgttgtgagtggtttgcactcgcgcgtgtacctgcggaactctctgatcaagatgtacatcgacgccggggatgtggagaccgccgagctgatgttccgttctgcactggtgttggataccgtgtcttgcaacatcatgctatctgggtatgtgaatgaagggtgcaccctgaaggcgctgtggtttttccgtgatatggcaagccgggggattgttgttgatcagtatacggctgttgctctgctcacttgctgtgggcgcctgaagaacgagcttattgggaggtctgtccatggtgtcatcgtgcggagaatggatgcaggagatcatgggttgattctggtaaatgctcttttggacatgtatgcaaaatgtgggagaatgaacgcagcaaagacaatctttggtgaaactggtgagaaggatgccatttcatggaacaccatggtttcaggttttgtaaatgctggcatgttggaccttgctagcagatttttttctgaggcaccttccagggatctaatatcctggaacgcgcttctagctggatatgctagatacaaaagtttcaatgaagtgatgaagctattccatgatatggttgccagttgtgtaaatctggacaaggtgactgctgttaccttgatttctgcggccacaggtaagggatcactgaatcatgcaaagagtgtccacggttgggtagtgaaagaatttgaccatcaggatgcttttttggcgtcggctcttgtagacatgtattgcaaatgtggaaatgttaaaacagcttactatgtgttcgagaaagccttggacaaagatgttaccttgtggacagctatgatctctggccttgcattcaatggccatggaactgaagcattggaactattttgcaagatgcaaactgaggtcgtagcacctaatggtgtcacattgcttgctgttctcagtgcatgcagtcattctggtctgctggatgaaggatgtaagatttttgatgctatgaagcaaagatacagtattgaaccagggatagaacattttgggtgtatggttgatctccttgcacggtcagaagaaggtggatacgtcttgctttccaacttgcatgcggctggaggtcactggaaccacagtgacaaagtgaggcagatcatggaaagaaaaggattgagaaaattagcaggtgctagtaattttggatcttgatgttgttgcttcacaagttcagatgccaggcaagactaccattttttttgaaatgcaagcttgtttcttctaatgaacggattaaatcttgtacatttcatggaaatttgctacgccctcaacatctgtcgtgcgggcgttcaccctcttgtgaagtttgttcagccgggcgtttcccacaggagtttgcctgtccaggtggcgcctcaatgatggagctagagagcagcaaggattgaggaagctaccgggaccaggagcaaagaatgaaagccaagtgaagaggcaggatgggaatgtaggggaggagtcgaaggcgatttgagaggaagcctctgaggaggcagctttaggtcaatgacacagactgatcgatcacagttgcacgttgtggactgggatctcactcgtttgccttggaatgggagatagtaatcatcagttgcttatgttaaagtacttgggatcagcggggaagtcatgctccactcacagctacaacaaagttggaacctgttacattaaattctacagatttaacagaacaagaaacaagcaaggaatagtttgatttattgaaaacatgaagggaaactttgcttatgtcaaaggaactcggaggtgcgagcaaagccttgggtacacctatcgcaattcatctactccctttcaaagtgaagaaaccaattacatatacattgagtgcttcaaatattgaaaacatgaaggaaaaaatattgcaaagctattgctcggttatgatacttcaggaggagcttagggcgtttgtgcggctctggccttgtctaatggcataatcaatctctctggtacacttctagaagtagtttattttgtgtatactcgagtgtccctgtgctccttgaccatgatagtacaaggctgacttaatgttaaagctactgtttttggagaactctggaagctggaaccattgtgtgaagataaaaggttgtggtggagaaaagaaatggactggttgatgtctcctacaacttatatggtggagctggttccaatgaagcaaagaggattatgattcgaaaggcctgctcagatgctcatgtgaaccttcctgcacattgaagggaaaacgattctatgaagaaccacaacatcaactaaaactgaac

SEQ ID NO: 5223 - DNA, 1334 bp, Zea Mays
agccgcacaagcacagcgactcgagcactgagcaaagcactctaaacctagcagtagcgacggcggtggcggctgctgctcatctccggccgacggtggtggcggctgctgctcatctccggccattcgtcggcctggtcgtcggcctgaagcccgcctggagcttgtctgcctacccgaccagagtacccggtgctgctgccgatccagcgcccttactgaggtcaacggcatctataaatgaaaaagaactaggtgaagatgacaacaccaatgtgaatgcaagtgagaacgtagaggctaataaagaagcaagtggtgcagctaatgatgtgactggatctcataccccaataggagaaacttcatccaccaaactcgggcgtacaaagaagagaacttcaggagtttaggatcactacaatgatatagttgttgaagaaaaggtgggtgacatggttgtcaagaagccaatggcagcatgcaagtactgtacagatgttctttgcgctgcaagcaagcaaggtaccacacgcctttggaaccactattattcatatcatgatgaaaacaaggtgaaacctagcataaggagactgagttcagatgatttgatttataatgaggaggctagtgttagaaaatattatcttgcaattattatgcatgagtatccaatcaacttttgtgagcatgagtatacaaatgacttcattagatctttgcgtccaaattatccattaatgggtcgcaagggcagtaggaccaagatcatggatatcttttacaatgagaagaaaagtatttttgactacttttgcactcttgactgtcgatttagctgtaccatgtgatttgcacaaaggattggataagggccgaaagaaaagatccatataatgtaacttcacttcttgatgatttatctaatattattgacaccgtgagtgatgataatgttgatcatgatggagatgcttccgatgttgttgaccacaacgtcgatgataatgacattgttcaagtggaggaagattaggattatcttttttttatagacaagctgagctgcttcagtcaatcattattggtgcttgttattcagcaatatgcactttatgttgttctgcacttttgtcaatttatgttgaatgtatcatgtatgggtgtgctagtgaacttaacggtgaactgaatgtatggcctgggtgtgctggtgaaatcaatggaccaatttatgtcatattttttttgttgttatagattatatatactactaaatatgctcataagatatatatattaacactgtatttacactatgctcataattt

SEQ ID NO: 5224 - DNA, 1174 bp, Zea Mays
agccgcacaagcacagcgactcgagcactgagcaaagcactctaaacctagcagtagcgacggcggtggcggctgctgctcatctccggccgacggtggtggcggctgctgctcatctccggccattcgtcggcctggtcgtcggcctgaagcccgcctggagcttgtctgcctacccgaccagagtacccggtgctgctgccgatccagcgcccttactgcaataaaggaaaaaggtgaagtagattaataacaccatggttccaagaaacataaggtcatcaagaaacaagcagaggtcaacggcatctataaatgaaaaagaactaggtgaagatgacaacaccaatgtgaatgcaagtgagaacgtagaggctaataaagaagcaagtggtgcagctaatgatgtgactggatctcataccccaataggagaaacttcatccaccaaactcgggcgtacaaagaagagaacttcaggagtttaggatcactacaatgatatagttgttgaagaaaaggtgggtgacatggttgtcaagaagccaatggcagcatgcaagtactgtacagatgttctttgcgctgcaagcaagcaagtaggaccaagatcatggatatcttttacaatgagaagaaaagtatttttgactacttttgcactcttgactgtcgatttagctgtaccatgtgatttgcacaaaggattggataagggccgaaagaaaagatccatataatgtaacttcacttcttgatgatttatctaatattattgacaccgtgagtgatgataatgttgatcatgatggagatgcttccgatgttgttgaccacaacgtcgatgataatgacattgttcaagtggaggaagattaggattatcttttttttatagacaagctgagctgcttcagtcaatcattattggtgcttgttattcagcaatatgcactttatgttgttctgcacttttgtcaatttatgttgaatgtatcatgtatgggtgtgctagtgaacttaacggtgaactgaatgtatggcctgggtgtgctggtgaaatcaatggaccaatttatgtcatattttttttgttgttatagattatatatactactaaatatgctcataagatatatatattaacactgtatttacactatgctcataattt

SEQ ID NO: 5225 - DNA, 1346 bp, Zea Mays
agccgcacaagcacagcgactcgagcactgagcaaagcactctaaacctagcagtagcgacggcggtggcggctgctgctcatctccggccgacggtggtggcggctgctgctcatctccggccattcgtcggcctggtcgtcggcctgaagcccgcctggagcttgtctgcctacccgaccagagtacccggtgctgctgccgatccagcgcccttactgcaataaaggaaaaaggtgaagtagattaataacaccatggttccaagaaacataaggtcatcaagaaacaagcaggcattttcaatatggaatttatttcttacagaggtcaacggcatctataaatgaaaaagaactaggtgaagatgacaacaccaatgtgaatgcaagtgagaacgtagaggctaataaagaagcaagtggtgcagctaatgatgtgactggatctcataccccaataggagaaacttcatccaccaaactcgggcgtacaaagaagagaacttcaggagtttaggatcactacaatgatatagttgttgaagaaaaggtgggtgacatggttgtcaagaagccaatggcagcatgcaagtactgtacagatgttctttgcgctgcaagcaagcaagatctttgcgtccaaattatccattaatgggtcgcaagggcagtaggaccaagatcatggatatcttttacaatgagaagaaaagtatttttgactacttttgcactcttgactgtcgatttagctgtaccatgtgatttgcacaaaggattggataagggccgaaagaaaaggtaattgtcacttctcagtattgtaaattatatttctaattggtatattagattattagtcacttattttccccatgtgatttttaattactatttcagatccatataatgtaacttcacttcttgatgatttatctaatattattgacaccgtgagtgatgataatgttgatcatgatggagatgcttccgatgttgttgaccacaacgtcgatgataatgacattgttcaagtggaggaagattaggattatcttttttttatagacaagctgagctgcttcagtcaatcattattggtgcttgttattcagcaatatgcactttatgttgttctgcacttttgtcaatttatgttgaatgtatcatgtatgggtgtgctagtgaacttaacggtgaactgaatgtatggcctgggtgtgctggtgaaatcaatggaccaatttatgtcatattttttttgttgttatagattatatatactactaaatatgctcataagatatatatattaacactgtatttacactatgctcataattt

SEQ ID NO: 5226 - DNA, 1500 bp, Zea Mays
agccgcacaagcacagcgactcgagcactgagcaaagcactctaaacctagcagtagcgacggcggtggcggctgctgctcatctccggccgacggtggtggcggctgctgctcatctccggccattcgtcggcctggtcgtcggcctgaagcccgcctggagcttgtctgcctacccgaccagagtacccggtgctgctgccgatccagcgcccttactggaaaaaggtgaagtagattaataacaccatggttccaagaaacataaggtcatcaagaaacaagcagaggtcaacggcatctataaatgaaaaagaactaggtgaagatgacaacaccaatgtgaatgcaagtgagaacgtagaggctaataaagaagcaagtggtgcagctaatgatgtgactggatctcataccccaataggagaaacttcatccaccaaactcgggcgtacaaagaagagaacttcaggagtttaggatcactacaatgatatagttgttgaagaaaaggtgggtgacatggttgtcaagaagccaatggcagcatgcaagtactgtacagatgttctttgcgctgcaagcaagcaaggtaccacacgcctttggaaccactattattcatatcatgatgaaaacaaggtgaaacctagcataaggagactgagttcagatgatttgatttataatgaggaggctagtgttagaaaatattatcttgcaattattatgcatgagtatccaatcaacttttgtgagcatgagtatacaaatgacttcattagatctttgcgtccaaattatccattaatgggtcgcaagggcagtaggaccaagatcatggatatcttttacaatgagaagaaaagtatttttgactacttttgcactcttgactgtcgatttagctgtaccatgtgatttgcacaaaggattggataagggccgaaagaaaaggtaattgtcacttctcagtattgtaaattatatttctaattggtatattagattattagtcacttattttccccatgtgatttttaattactatttcagatccatataatgtaacttcacttcttgatgatttatctaatattattgacaccgtgagtgatgataatgttgatcatgatggagatgcttccgatgttgttgaccacaacgtcgatgataatgacattgttcaagtggaggaagattaggattatcttttttttatagacaagctgagctgcttcagtcaatcattattggtgcttgttattcagcaatatgcactttatgttgttctgcacttttgtcaatttatgttgaatgtatcatgtatgggtgtgctagtgaacttaacggtgaactgaatgtatggcctgggtgtgctggtgaaatcaatggaccaatttatgtcatattttttttgttgttatagattatatatactactaaatatgctcataagatatatatattaacactgtatttacactatgctcataattt

SEQ ID NO: 5227 - DNA, 671 bp, Zea Mays
gttagattcgcgtccgagttggatgagctgcgcctttgaaaagttccctgttgggcgtatccaccgtcagctgaagcaaaggactcaggcaaatggtcgcgttggtgccaccgcagccgtctactccgctgccatcctggagtacttgactgccgaggttctggagctggctgggaatgctagcaaggatctgaaggtgaagcgtatcacccctcgccatttgcagctagccattcgtggagacgaggagctggacaccctcatcaagggcaccatcgcaggcggaggtgtcatcccgcacattcacaagtccctgatcaacaagtcctccaaggagtgaagactaggggatgtgcatctttagtttaaactagacttctgtgcgctcctcggcgagtccttgtcatcctgtaggttttagttgagctgtcaggttggagctcctctgtgtaacgcttgcctggtactgcttcatcagttatttggttattgtgtttgtgttgagttgttaacttcaggggtgcaaacctggatgcttatttagttatgtgactactgctattcggtttatgttgtggtttgtttttatttttacaattttttctagctgcaattacacttataatatgatgttggtagccctgtggagtgctggggggctcagatttatc

SEQ ID NO: 5228 - DNA, 953 bp, Zea Mays
ctttattcactcgccctaggtttccaatcacaggatgcttccgccccgcttccctcccctactcccccacctctcccaccctttttatatcagctcgctcctcagcaccagcatacatacctactagtctactaccccttcacctaccttcacctggcaactggcattggtcccgtatagtgccttgctgtcagttgcatggacgggctgacggacgagcagaggctcgcgttccaggaggccttctcgctcttcgacaagaacggcgacggatgcatcaccatggaagagctggccgcagtcacccgttccctcggtctcgacccgagcgatcaggagctcaatgatatgatgagcgaggtcgatacggacggcaatgggatcatcgatttccaggagttcttaagcctcattgcccggaagatgaaggatggcgacggcgacgaagagctcaaggaagcctttgaggtcctggacaaagaccagaacggcttcatctccccggttgagtctcggggagaagatgaccgacgaggaggttgaacagatgatcagggaagcagacaccgacggtgacggtcaggtgaactacgatgagttcgttctcatgatgaagaacgctgagcggaaaatatctgggtgaagggcgcgatgtggtgtggaactagtagtcgtcttggttggattcttctgtcagaaatctactactgtaaattgcaattgtatgcttagtactatgatcgtgttattcgaagtgttggaggttggaaaagtgatctcacgctcattaacgggtggccaacggccttatgtatacgatgaatatttagataggtggcttttattttgttacgataaatagcaggaggaagatccattgacgacctctactaggtttaccgacagcgaactaccatgaaaattacagttagtctccagaccccagtccacta

SEQ ID NO: 5229 - DNA, 1293 bp, Zea Mays
gtcccgctgcagtcccactgccgtcccactcccaccttcttggagacaccgccaggcgccatcttccggccgctgcccgcctgccccctcccccccccccccccccgggaggtcgaactgccttctagagccctctcctgttttcaggcgaatgtgcaggtagcttgacgtctgatgaacgctcagccatgctgctgatgctacacgaaactcttcctttcgtgaggccgacgagttcttgccgggacccaaaactctccgagaagagtgcctctgctttccacggtaaattgggatgcagtgcggtctgcagttcagcggaaggctatcgtgtacagaagccgcacattgttcacagctacaaagttagcttcactaggaccagccatcatctgtgtaaaagcttaaacgagagaactacaagcatcggttccatgttaatgcttcgcccgatgacgacgacttccgctcatcgcgtaacatagcgatcagtttgttcaagcggtacaagaatgtcattgaccgaggaggtggagaaaacctaaatgagtttgtcagtgctggagtgaccgcttacgcactagggtgtacagatgaggggcttagaaaggaacttatggatattgaagattctggtctggagattgaaggcttagggtccttggggggcaccagcctcaagttcaaagtccactcctttgagatccgtgagtgcatcctgtggctcagtatagtgttcgtcacaatactgtgcacaccacaactaacagttatcaggtggtctccgaacccaccggtgtcagccgacgtcttgcatcagtggaaaggattctgtgctctaatcgcgaacgcttactatgtcaaaggaatggcatggttgccagtgaaaaccttgcagctggaacagatggctgtcacaggaagttcagagaaaccatcagtagttgctagtcgcatgcagttagttttcagcacattagaggtagtcagcccacagtggccaagagtgtgattagatgaaagcaataccatcaaacaaaggtctgcagttttattctgaccaaaagatatgcatgtccaagttggcaagttcaaacctctgtcatggcgcaaacagatgatactatgtccatttgaactcaaatgtcaaataaaaatgctaatgtacttgttgtgaattatttgatttgatgtacatatactgcttctatcttgcatcaggagttctggcaagtgaacaagtatcccctactgctccaatagagataaagtggaaattgtgggtcactaatt

SEQ ID NO: 5230 - DNA, 1010 bp, Zea Mays
ccactgccgtcccactcccaccttcttggagacaccgccaggcgccatcttccggccgctgcccgcctgccccctcccccccccccccccccgggaggtcgaactgccttctagagccctctcctgttttcaggcgaatgtgcaggtagcttgacgtctgatgaacgctcagccatgctgctgatgctacacgaaactcttcctttcgtgaggccgacgagttcttgccgggacccaaaactctccgagaagagtgcctctgctttccacggtaaattgggatgcagtgcggtctgcagttcagcggaaggctatcgtgtacagaagccgcacattgttcacagctacaaagttagcttcactaggaccagccatcatctgtgtaaaagcttaaacgagagaactacaaggcactgcctgcatcggttccatgttaatgcttcgcccgatgacgacgacttccgctcatcgcgtaacatagcgatcagtttgttcaagcggtacaagaatgtcattgaccgaggaggtggagaaaacctaaatgagtttgtcagtgctggagtgaccgcttacgcactagggtgtacagatgaggggcttagaaaggaacttatggatattgaagattctggtctggagattgaaggcttagggtccttggggggcaccagcctcaagttcaaagtccactcctttgaggtagtcagcccacagtggccaagagtgtgattagatgaaagcaataccatcaaacaaaggtctgcagttttattctgaccaaaagatatgcatgtccaagttggcaagttcaaacctctgtcatggcgcaaacagatgatactatgtccatttgaactcaaatgtcaaataaaaatgctaatgtacttgttgtgaattatttgatttgatgtacatatactgcttctatcttgcatcaggagttctggcaagtgaacaagtatcccctactgctccaatagagataaagtggaaattgtgggtcactaatt

SEQ ID NO: 5231 - DNA, 1256 bp, Zea Mays
cactgccgtcccactcccaccttcttggagacaccgccaggcgccatcttccggccgctgcccgcctgccccctcccccccccccccccccgggaggtcgaactgccttctagagccctctcctgttttcaggcgaatgtgcaggtagcttgacgtctgatgaacgctcagccatgctgctgatgctacacgaaactcttcctttcgtgaggccgacgagttcttgccgggacccaaaactctccgagaagagtgcctctgctttccacggtaaattgggatgcagtgcggtctgcagttcagcggaaggctatcgtgtacagaagccgcacattgttcacagctacaaagttagcttcactaggaccagccatcatctgtgtaaaagcttaaacgagagaactacaagcatcggttccatgttaatgcttcgcccgatgacgacgacttccgctcatcgcgtaacatagcgatcagtttgttcaagcggtacaagaatgtcattgaccgaggaggtggagaaaacctaaatgagtttgtcagtgctggagtgaccgcttacgcactagggtgtacagatgaggggcttagaaaggaacttatggatattgaagattctggtctggagattgaaggcttagggtccttggggggcaccagcctcaagttcaaagtccactcctttgagatccgtgagtgcatcctgtggctcagtatagtgttcgtcacaatactgtgcacaccacaactaacagttatcaggtggtctccgaacccaccggtgtcagccgacgtcttgcatcagtggaaaggattctgtgctctaatcgcgaacgcttactatgtcaaaggaatggcatggttgccagtgaaaaccttgcagctggaacagatggctgtcacaggaagttcagagaaaccatcagtagttgctagtcgcatgcagtagtcagcccacagtggccaagagtgtgattagatgaaagcaataccatcaaacaaaggtctgcagttttattctgaccaaaagatatgcatgtccaagttggcaagttcaaacctctgtcatggcgcaaacagatgatactatgtccatttgaactcaaatgtcaaataaaaatgctaatgtacttgttgtgaattatttgatttgatgtacatatactgcttctatcttgcatcaggagttctggcaagtgaacaagtatcccctactgctccaatagagataaagtggaaattgtgggtcactaatt

SEQ ID NO: 5232 - DNA, 4197 bp, Zea Mays
tgggctttaaagataccacgatatacaacttcgtcaagatggacaggctctgtcgccactgctacaccactacaccagtacaccctgcacgcgctgcgggcgtttccgccggctttgtgcctcctctgccctccccggccgctcgccctccgtccacgctcaagctcgccccgtcccggcgcctcgaactcgtcgtcctcgcttccgctgtcgccaccgcgaagcatgaggaggcgtcctgggatcactggcttgcagaatgtggcggctactctcaaccagttgggactggtcggggagaatatggccaaggtcgggaccgatgtcatgaagaagcagcgacttgggatggtccgatcacagctcgagaaatttgcttgcaagcataagaaaacatccttctctaccgtggggttcgacctgcccgactggttcaggaacccaaaggatggttatccttgttccaggttggatggcaatggcgatgatgactttgtgctcccggccaaatcagacttctcagaacaacaaggttgctctgccaccggtggaggatccagtccactgtcgatccttgccagctgccctgcatcccatgaagatgccgaatttgaggccgacatggatgaggtcagcaggattttgagatcccggtttgcttctccagaggctattgtgatcaccatggactgctgccctgtcagggtgtcagcacgccttgtcagcaaggtcctgagcaggttcagcaatgattgggtggccgcatttgggttcttcatgtgggccggaactcaggaaggctactgtcattgtgctgattcatatgacatgatggtagacatattgggcaagttcaagcagtttgatttgatgtgcggtctgatcggccagatgcatgagattggggggttggtgtcgctagcgaccatgacgaaggtgatgaggaggctatgtggagccaaccgatggagtgacgccattgatgctttccataaaatggaccgctttggggtggcgaaggacacaaaggccatgaatgtgctcttggacacattgtgcaaggagaggagtgtgaagcgtgcaagaggtgccttccaagctttgaaggggacaattcctcctgatgaaagtagcttcaacacattggttcatggctggtgcaaagcaaggatgctgaaggaggctcgcgaaacaatgaaggagatggagcggcatggtttcagtccttcagtaacgacttacacctgcctgatagaagcgtactgcatggagaaagattttcagacggttgatggtatcttggatgagatgcacacaaaaggatgcactccaaatattatcacatacacaattgtgatgcatgcgctagggaaggctgggaggacacaagaagctttggatacttttgacaaggtgaagcaagatggctgtgccctagatgcttctttctacaactgtcttatatacatactatgcagagctgggaggttgcaagatgcaaattttgtggtcgaagaaatgcaccgaactggaatatccccaaacttgactacctttaacaccctgatttctgctgcctgtgatcactctctggctgagaacgcacttaaattgttggttcagatggaggaacagtcatgcaacccagatatcaagacgtacacccccttgctgaagctctgctgcagaaggaaatgggtgaagacgcttctgttcctgatatgtcatatgttccggaaggacatcacccctgatttcagcacatacacattgctggtgtgctggctatgccggaacgggaggctcacccagtcctgcttattcttggaggagatggtgctgaagggctttactccacagcaggcgacctttgatcttgtgctggagaagcttaagaacatgcacatgctttcagcagtgagaaagattcagcttctcaggatgcacacagaaggtactaggtgtaggagcggtgttccatcttatttgagagaggatggtcacgatagacactgttatgctgtattgtcaaacactagtgaagctgaatcttcaatagatggaaaagaggtacctagagctgtgcatatactgtaaaaactactgttgatctctagccttttacacttgaatattgtacttctcattgtatgctgctcgtatttttctctttttaataagaatttatgtatatgcacatatcaaccaaggatggttagtttttttttcctcgcaccttaatcttgcctcgatctgtagtaatatctatctttttacccttaccaattgacaagggcagtatatgcttgtttttccttggattttttcaccaccatattgcatagccagactgtttgtttcgttgtaatgacatttacaggttcgttattagcatatacaaatttcggtgcagtaattctcactgtgtatatgcttttcaggatattcagggacatcatttactccccacataataaaactgaagcctaacaatttacttgaaaccatcatgtgatgtgcctaagttatattcagggggtatttttgtattcatgattaagtgaactgctgttcaagaacatacttatttgttgaaatgttgtggcgtatccatgtggcttacaaagtccagccattctccagaccttatagtcaactttcaacaactgaatttccatggagttatagccacatttgtctattaaaacggagcaccaagagagagttatatgccgttttttacttatagaacaggcttgaaacatttacgcattgtctttccacttctccagcattttaaccttttatcatccttttcttagctgctctgaaacatccatttttctctgtgccatcaatggatgcttagcacagatcgcttccacatatcacatgatcaatcagtactgggcgtatagcatattgttcagaaggtttttataccattggacagtcatatgaacttatagattggaaccggatcaattgacaaagttagtttactaatataaagatggatacagaatggttttactggtttgatacctttgctccttcctatctaccatttcattttcatatgaagtagtacatgcatatgttcacattttttccttagactgatctagaggcagggcttgatcactaatgatttcatttttatatttaaaaccatctgtatagattcctgtaacaggctaagagcatctcctcaagagattagccaaatttactgatttagctactttgtaaaatagatttcacaaaaaaagagttgggtactcacagactctaaaattcagagtctccatattcaaaagcgccacctaaataggattttttcagattagagaggctttcagcagcatggacgacttttactccttcaggtctggctttttggcgccgccaggccagacattttgttgcaggtcgatgctgttgctggtcgccgaacaaagcatgcaggggtagccatgtccaccggcccgaaagcacgcaggcccagccgtggatacatccaatgaggcaacgcgcttgagaggctttccagtttggtcgtgcatgtaattggcagtgtctgatgcctcaaccaccgtgagcagacgtctggataattggaggctagcacccggtctcctgctgctcagtggggtacatggtgcctaggggctgagctgcaagacgtgaagacgacggtgggaaaacgcgaggaaaagaaaaatcttgggcctcctgccggcgtgggcttgtggtggcggagaggaaggcacatgtcaagatgcactagcatgactgtcttcgatgaactttaactgctttgagcctttgacaagcaacgaggcaatttcccgttctctatttaagacacttgtgtgttcgacacccttgtgcctcgccaagctaatattctggtttggttggttagatgatttggctacaacggcatctgcaactatctcttgtcagggtttttagggacgtaagtgctagcgctcgagtgtgaatcattattgttgccatttatgttatagttcgtaaaccaaacagttctctaattgtaaacgtggataccgcttcttttggctggtagcccacgacttattgtttgccccttctggacaaataccttagcaatacaatgctgaaacgaatcaatgcagggtaacggttgttttgggagagagagaaccatta

SEQ ID NO: 5233 - DNA, 1765 bp, Zea Mays
tgggctttaaagataccacgatatacaacttcgtcaagatggacaggctctgtcgccactgctacaccactacaccagtacaccctgcacgcgctgcgggcgtttccgccggctttgtgcctcctctgccctccccggccgctcgccctccgtccacgctcaagctcgccccgtcccggcgcctcgaactcgtcgtcctcgcttccgctgtcgccaccgcgaagcatgaggaggcgtcctgggatcactggcttgcagaatgtggcggctactctcaaccagttgggactggtcggggagaatatggccaaggtcgggaccgatgtcatgaagaagcagcgacttgggatggtccgatcacagctcgagaaatttgcttgcaagcataagctgctctgaaacatccatttttctctgtgccatcaatggatgcttagcacagatcgcttccacatatcacatgatcaatcagtactgggcgtatagcatattgttcagaaggtttttataccattggacagtcatatgaacttatagattggaaccggatcaattgacaaagttagtttactaatataaagatggatacagaatggttttactggtttgatacctttgctccttcctatctaccatttcattttcatatgaagtagtacatgcatatgttcacattttttccttagactgatctagaggcagggcttgatcactaatgatttcatttttatatttaaaaccatctgtatagattcctgtaacaggctaagagcatctcctcaagagattagccaaatttactgatttagctactttgtaaaatagatttcacaaaaaaagagttgggtactcacagactctaaaattcagagtctccatattcaaaagcgccacctaaataggattttttcagattagagaggctttcagcagcatggacgacttttactccttcaggtctggctttttggcgccgccaggccagacattttgttgcaggtcgatgctgttgctggtcgccgaacaaagcatgcaggggtagccatgtccaccggcccgaaagcacgcaggcccagccgtggatacatccaatgaggcaacgcgcttgagaggctttccagtttggtcgtgcatgtaattggcagtgtctgatgcctcaaccaccgtgagcagacgtctggataattggaggctagcacccggtctcctgctgctcagtggggtacatggtgcctaggggctgagctgcaagacgtgaagacgacggtgggaaaacgcgaggaaaagaaaaatcttgggcctcctgccggcgtgggcttgtggtggcggagaggaaggcacatgtcaagatgcactagcatgactgtcttcgatgaactttaactgctttgagcctttgacaagcaacgaggcaatttcccgttctctatttaagacacttgtgtgttcgacacccttgtgcctcgccaagctaatattctggtttggttggttagatgatttggctacaacggcatctgcaactatctcttgtcagggtttttagggacgtaagtgctagcgctcgagtgtgaatcattattgttgccatttatgttatagttcgtaaaccaaacagttctctaattgtaaacgtggataccgcttcttttggctggtagcccacgacttattgtttgccccttctggacaaataccttagcaatacaatgctgaaacgaatcaatgcagggtaacggttgttttgggagagagagaaccatta

SEQ ID NO: 5234 - DNA, 3390 bp, Zea Mays
ccactgctacaccactacaccagtacaccctgcacgcgctgcgggcgtttccgccggctttgtgcctcctctgccctccccggccgctcgccctccgtccacgctcaagctcgccccgtcccggcgcctcgaactcgtcgtcctcgcttccgctgtcgccaccgcgaagcatgaggaggcgtcctgggatcactggcttgcagaatgtggcggctactctcaaccagttgggactggtcggggagaatatggccaaggtcgggaccgatgtcatgaagaagcagcgacttgggatggtccgatcacagctcgagaaatttgcttgcaagcataagaaaacatccttctctaccgtggggttcgacctgcccgactggttcaggaacccaaaggatggttatccttgttccaggttggatggcaatggcgatgatgactttgtgctcccggccaaatcagacttctcagaacaacaaggttgctctgccaccggtggaggatccagtccactgtcgatccttgccagctgccctgcatcccatgaagatgccgaatttgaggccgacatggatgaggtcagcaggattttgagatcccggtttgcttctccagaggctattgtgatcaccatggactgctgccctgtcagggtgtcagcacgccttgtcagcaaggtcctgagcaggttcagcaatgattgggtggccgcatttgggttcttcatgtgggccggaactcaggaaggctactgtcattgtgctgattcatatgacatgatggtagacatattgggcaagttcaagcagtttgatttgatgtgcggtctgatcggccagatgcatgagattggggggttggtgtcgctagcgaccatgacgaaggtgatgaggaggctatgtggagccaaccgatggagtgacgccattgatgctttccataaaatggaccgctttggggtggcgaaggacacaaaggccatgaatgtgctcttggacacattgtgcaaggagaggagtgtgaagcgtgcaagaggtgccttccaagctttgaaggggacaattcctcctgatgaaagtagcttcaacacattggttcatggctggtgcaaagcaaggatgctgaaggaggctcgcgaaacaatgaaggagatggagcggcatggtttcagtccttcagtaacgacttacacctgcctgatagaagcgtactgcatggagaaagattttcagacggttgatggtatcttggatgagatgcacacaaaaggatgcactccaaatattatcacatacacaattgtgatgcatgcgctagggaaggctgggaggacacaagaagctttggatacttttgacaaggtgaagcaagatggctgtgccctagatgcttctttctacaactgtcttatatacatactatgcagagctgggaggttgcaagatgcaaattttgtggtcgaagaaatgcaccgaactggaatatccccaaacttgactacctttaacaccctgatttctgctgcctgtgatcactctctggctgagaacgcacttaaattgttggttcagatggaggaacagtcatgcaacccagatatcaagacgtacacccccttgctgaagctctgctgcagaaggaaatgggtgaagacgcttctgttcctgatatgtcatatgttccggaaggacatcacccctgatttcagcacatacacattgctggtgtgctggctatgccggaacgggaggctcacccagtcctgcttattcttggaggagatggtgctgaagggctttactccacagcaggcgacctttgatcttgtgctggagaagcttaagaacatgcacatgctttcagcagtgagaaagattcagcttctcaggatgcacacagaaggtactaggtgtaggagcggtgttccatcttatttgagagaggatggtcacgatagacactgttatgctgtattgtcaaacactagtgaagctgaatcttcaatagatggaaaagagctgctctgaaacatccatttttctctgtgccatcaatggatgcttagcacagatcgcttccacatatcacatgatcaatcagtactgggcgtatagcatattgttcagaaggtttttataccattggacagtcatatgaacttatagattggaaccggatcaattgacaaagttagtttactaatataaagatggatacagaatggttttactggtttgatacctttgctccttcctatctaccatttcattttcatatgaagtagtacatgcatatgttcacattttttccttagactgatctagaggcagggcttgatcactaatgatttcatttttatatttaaaaccatctgtatagattcctgtaacaggctaagagcatctcctcaagagattagccaaatttactgatttagctactttgtaaaatagatttcacaaaaaaagagttgggtactcacagactctaaaattcagagtctccatattcaaaagcgccacctaaataggattttttcagattagagaggctttcagcagcatggacgacttttactccttcaggtctggctttttggcgccgccaggccagacattttgttgcaggtcgatgctgttgctggtcgccgaacaaagcatgcaggggtagccatgtccaccggcccgaaagcacgcaggcccagccgtggatacatccaatgaggcaacgcgcttgagaggctttccagtttggtcgtgcatgtaattggcagtgtctgatgcctcaaccaccgtgagcagacgtctggataattggaggctagcacccggtctcctgctgctcagtggggtacatggtgcctaggggctgagctgcaagacgtgaagacgacggtgggaaaacgcgaggaaaagaaaaatcttgggcctcctgccggcgtgggcttgtggtggcggagaggaaggcacatgtcaagatgcactagcatgactgtcttcgatgaactttaactgctttgagcctttgacaagcaacgaggcaatttcccgttctctatttaagacacttgtgtgttcgacacccttgtgcctcgccaagctaatattctggtttggttggttagatgatttggctacaacggcatctgcaactatctcttgtcagggtttttagggacgtaagtgctagcgctcgagtgtgaatcattattgttgccatttatgttatagttcgtaaaccaaacagttctctaattgtaaacgtggataccgcttcttttggctggtagcccacgacttattgtttgccccttctggacaaataccttagcaatacaatgctgaaacgaatcaatgcagggtaacggttgttttgggagagagagaaccatta

SEQ ID NO: 5235 - DNA, 2051 bp, Zea Mays
ctacaccactacaccagtacaccctgcacgcgctgcgggcgtttccgccggctttgtgcctcctctgccctccccggccgctcgccctccgtccacgctcaagctcgccccgtcccggcgcctcgaactcgtcgtcctcgcttccgctgtcgccaccgcgaagcatgaggaggcgtcctgggatcactggcttgcagaatgtggcggctactctcaaccagttgggactggtcggggagaatatggccaaggtcgggaccgatgtcatgaagaagcagcgacttgggatggtccgatcacagctcgagaaatttgcttgcaagcataagaaaacatccttctctaccgtggggttcgacctgcccgactggttcaggaacccaaaggatggttatccttgttccaggttggatggcaatggcgatgatgactttgtgctcccggccaaatcagacttctcagaacaacaaggttgctctgccaccggtggaggatccagtccactgtcgatccttgccagctgccctgcatcccatgaagatgccgaatttgaggccgacatggatgaggtcagcaggattttgagatcccggtttgcttctccagaggctattgtgatcaccatggactgctgccctgtcagggtgtcagcacgccttgtcagcaaggtcctgagcaggttcagcaatgattgggtggccgcatttgggttcttcatgtgggccggaactcaggaaggctactgtcattgtgctgattcatatgacatgatggtagacatattgggcaagttcaagcagtttgatttgatgtgcggtctgatcggccagatgcatgagattggggggttggtgtcgctagcgaccatgacgaaggtgatgaggaggctatgtggagccaaccgatggagtgacgccattgatgctttccataaaatggaccgctttggggtggcgaaggacacaaaggccatgaatgtgctcttggacacattgtgcaaggagaggagtgtgaagcgtgcaagaggtgccttccaagctttgaaggggacaattcctcctgatgaaagtagcttcaacacattggttcatggctggtgcaaagcaaggatgctgaaggaggctcgcgaaacaatgaaggagatggagcggcatggtttcagtccttcagtaacgacttacacctgcctgatagaagcgtactgcatggagaaagattttcagacggttgatggtatcttggatgagatgcacacaaaaggatgcactccaaatattatcacatacacaattgtgatgcatgcgctagggaaggctgggaggacacaagaagctttggatacttttgacaaggtgaagcaagatggctgtgccctagatgcttctttctacaactgtcttatatacatactatgcagagctgggaggttgcaagatgcaaattttgtggtcgaagaaatgcaccgaactggaatatccccaaacttgactacctttaacaccctgatttctgctgcctgtgatcactctctggctgagaacgcacttaaattgttggttcagatggaggaacagtcatgcaacccagatatcaagacgtacacccccttgctgaagctctgctgcagaaggaaatgggtgaagacgcttctgttcctgatatgtcatatgttccggaaggacatcacccctgatttcagcacatacacattgctggtgtgctggctatgccggaacgggaggctcacccagtcctgcttattcttggaggagatggtgctgaagggctttactccacagcaggcgacctttgatcttgtgctggagaagcttaagaacatgcacatgctttcagcagtgagaaagattcagcttctcaggatgcacacagaaggtactaggtgtaggagcggtgttccatcttatttgagagaggatggtcacgatagacactgttatgctgtattgtcaaacactagtgaagctgaatcttcaatagatggaaaagaggtagatattcagggacatcatttactccccacataataaaac

SEQ ID NO: 5236 - DNA, 1820 bp, Zea Mays
tacaccactacaccagtacaccctgcacgcgctgcgggcgtttccgccggctttgtgcctcctctgccctccccggccgctcgccctccgtccacgctcaagctcgccccgtcccggcgcctcgaactcgtcgtcctcgcttccgctgtcgccaccgcgaagcatgaggaggcgtcctgggatcactggcttgcagaatgtggcggctactctcaaccagttgggactggtcggggagaatatggccaaggtcgggaccgatgtcatgaagaagcagcgacttgggatggtccgatcacagctcgagaaatttgcttgcaagcataaggttttgagcaggtttggtgcaatctgattttgaacctgctatggacatcttccactcaagttcttgtcaatggagtgcctggacagcctataaatctcaagcgtgggttgcaacaagctgctctgaaacatccatttttctctgtgccatcaatggatgcttagcacagatcgcttccacatatcacatgatcaatcagtactgggcgtatagcatattgttcagaaggtttttataccattggacagtcatatgaacttatagattggaaccggatcaattgacaaagttagtttactaatataaagatggatacagaatggttttactggtttgatacctttgctccttcctatctaccatttcattttcatatgaagtagtacatgcatatgttcacattttttccttagactgatctagaggcagggcttgatcactaatgatttcatttttatatttaaaaccatctgtatagattcctgtaacaggctaagagcatctcctcaagagattagccaaatttactgatttagctactttgtaaaatagatttcacaaaaaaagagttgggtactcacagactctaaaattcagagtctccatattcaaaagcgccacctaaataggattttttcagattagagaggctttcagcagcatggacgacttttactccttcaggtctggctttttggcgccgccaggccagacattttgttgcaggtcgatgctgttgctggtcgccgaacaaagcatgcaggggtagccatgtccaccggcccgaaagcacgcaggcccagccgtggatacatccaatgaggcaacgcgcttgagaggctttccagtttggtcgtgcatgtaattggcagtgtctgatgcctcaaccaccgtgagcagacgtctggataattggaggctagcacccggtctcctgctgctcagtggggtacatggtgcctaggggctgagctgcaagacgtgaagacgacggtgggaaaacgcgaggaaaagaaaaatcttgggcctcctgccggcgtgggcttgtggtggcggagaggaaggcacatgtcaagatgcactagcatgactgtcttcgatgaactttaactgctttgagcctttgacaagcaacgaggcaatttcccgttctctatttaagacacttgtgtgttcgacacccttgtgcctcgccaagctaatattctggtttggttggttagatgatttggctacaacggcatctgcaactatctcttgtcagggtttttagggacgtaagtgctagcgctcgagtgtgaatcattattgttgccatttatgttatagttcgtaaaccaaacagttctctaattgtaaacgtggataccgcttcttttggctggtagcccacgacttattgtttgccccttctggacaaataccttagcaatacaatgctgaaacgaatcaatgcagggtaacggttgttttgggagagagagaaccatta

SEQ ID NO: 5237 - DNA, 3877 bp, Zea Mays
ccactacaccagtacaccctgcacgcgctgcgggcgtttccgccggctttgtgcctcctctgccctccccggccgctcgccctccgtccacgctcaagctcgccccgtcccggcgcctcgaactcgtcgtcctcgcttccgctgtcgccaccgcgaagcatgaggaggcgtcctgggatcactggcttgcagaatgtggcggctactctcaaccagttgggactggtcggggagaatatggccaaggtcgggaccgatgtcatgaagaagcagcgacttgggatggtccgatcacagctcgagaaatttgcttgcaagcataaggttttgagcaggtttggtgcaatctgattttgaacctgctatggacatcttccactcaagttcttgtcaatggagtgcctggacagcctataaatctcaagcgtgggttgcaacaagaaaacatccttctctaccgtggggttcgacctgcccgactggttcaggaacccaaaggatggttatccttgttccaggttggatggcaatggcgatgatgactttgtgctcccggccaaatcagacttctcagaacaacaaggttgctctgccaccggtggaggatccagtccactgtcgatccttgccagctgccctgcatcccatgaagatgccgaatttgaggccgacatggatgaggtcagcaggattttgagatcccggtttgcttctccagaggctattgtgatcaccatggactgctgccctgtcagggtgtcagcacgccttgtcagcaaggtcctgagcaggttcagcaatgattgggtggccgcatttgggttcttcatgtgggccggaactcaggaaggctactgtcattgtgctgattcatatgacatgatggtagacatattgggcaagttcaagcagtttgatttgatgtgcggtctgatcggccagatgcatgagattggggggttggtgtcgctagcgaccatgacgaaggtgatgaggaggctatgtggagccaaccgatggagtgacgccattgatgctttccataaaatggaccgctttggggtggcgaaggacacaaaggccatgaatgtgctcttggacacattgtgcaaggagaggagtgtgaagcgtgcaagaggtgccttccaagctttgaaggggacaattcctcctgatgaaagtagcttcaacacattggttcatggctggtgcaaagcaaggatgctgaaggaggctcgcgaaacaatgaaggagatggagcggcatggtttcagtccttcagtaacgacttacacctgcctgatagaagcgtactgcatggagaaagattttcagacggttgatggtatcttggatgagatgcacacaaaaggatgcactccaaatattatcacatacacaattgtgatgcatgcgctagggaaggctgggaggacacaagaagctttggatacttttgacaaggtgaagcaagatggctgtgccctagatgcttctttctacaactgtcttatatacatactatgcagagctgggaggttgcaagatgcaaattttgtggtcgaagaaatgcaccgaactggaatatccccaaacttgactacctttaacaccctgatttctgctgcctgtgatcactctctggctgagaacgcacttaaattgttggttcagatggaggaacagtcatgcaacccagatatcaagacgtacacccccttgctgaagctctgctgcagaaggaaatgggtgaagacgcttctgttcctgatatgtcatatgttccggaaggacatcacccctgatttcagcacatacacattgctggtgtgctggctatgccggaacgggaggctcacccagtcctgcttattcttggaggagatggtgctgaagggctttactccacagcaggcgacctttgatcttgtgctggagaagcttaagaacatgcacatgctttcagcagtgagaaagattcagcttctcaggatgcacacagaaggtactaggtgtaggagcggtgttccatcttatttgagagaggatggtcacgatagacactgttatgctgtattgtcaaacactagtgaagctgaatcttcaatagatggaaaagaggatattcagggacatcatttactccccacataataaaactgaagcctaacaatttacttgaaaccatcatgtgatgtgcctaagttatattcagggggtatttttgtattcatgattaagtgaactgctgttcaagaacatacttatttgttgaaatgttgtggcgtatccatgtggcttacaaagtccagccattctccagaccttatagtcaactttcaacaactgaatttccatggagttatagccacatttgtctattaaaacggagcaccaagagagagttatatgccgttttttacttatagaacaggcttgaaacatttacgcattgtctttccacttctccagcattttaaccttttatcatccttttcttagctgctctgaaacatccatttttctctgtgccatcaatggatgcttagcacagatcgcttccacatatcacatgatcaatcagtactgggcgtatagcatattgttcagaaggtttttataccattggacagtcatatgaacttatagattggaaccggatcaattgacaaagttagtttactaatataaagatggatacagaatggttttactggtttgatacctttgctccttcctatctaccatttcattttcatatgaagtagtacatgcatatgttcacattttttccttagactgatctagaggcagggcttgatcactaatgatttcatttttatatttaaaaccatctgtatagattcctgtaacaggctaagagcatctcctcaagagattagccaaatttactgatttagctactttgtaaaatagatttcacaaaaaaagagttgggtactcacagactctaaaattcagagtctccatattcaaaagcgccacctaaataggattttttcagattagagaggctttcagcagcatggacgacttttactccttcaggtctggctttttggcgccgccaggccagacattttgttgcaggtcgatgctgttgctggtcgccgaacaaagcatgcaggggtagccatgtccaccggcccgaaagcacgcaggcccagccgtggatacatccaatgaggcaacgcgcttgagaggctttccagtttggtcgtgcatgtaattggcagtgtctgatgcctcaaccaccgtgagcagacgtctggataattggaggctagcacccggtctcctgctgctcagtggggtacatggtgcctaggggctgagctgcaagacgtgaagacgacggtgggaaaacgcgaggaaaagaaaaatcttgggcctcctgccggcgtgggcttgtggtggcggagaggaaggcacatgtcaagatgcactagcatgactgtcttcgatgaactttaactgctttgagcctttgacaagcaacgaggcaatttcccgttctctatttaagacacttgtgtgttcgacacccttgtgcctcgccaagctaatattctggtttggttggttagatgatttggctacaacggcatctgcaactatctcttgtcagggtttttagggacgtaagtgctagcgctcgagtgtgaatcattattgttgccatttatgttatagttcgtaaaccaaacagttctctaattgtaaacgtggataccgcttcttttggctggtagcccacgacttattgtttgccccttctggacaaataccttagcaatacaatgctgaaacgaatcaatgcagggtaacggttgttttgggagagagagaaccatta

SEQ ID NO: 5238 - DNA, 3496 bp, Zea Mays
ccactacaccagtacaccctgcacgcgctgcgggcgtttccgccggctttgtgcctcctctgccctccccggccgctcgccctccgtccacgctcaagctcgccccgtcccggcgcctcgaactcgtcgtcctcgcttccgctgtcgccaccgcgaagcatgaggaggcgtcctgggatcactggcttgcagaatgtggcggctactctcaaccagttgggactggtcggggagaatatggccaaggtcgggaccgatgtcatgaagaagcagcgacttgggatggtccgatcacagctcgagaaatttgcttgcaagcataaggttttgagcaggtttggtgcaatctgattttgaacctgctatggacatcttccactcaagttcttgtcaatggagtgcctggacagcctataaatctcaagcgtgggttgcaacaagaaaacatccttctctaccgtggggttcgacctgcccgactggttcaggaacccaaaggatggttatccttgttccaggttggatggcaatggcgatgatgactttgtgctcccggccaaatcagacttctcagaacaacaaggttgctctgccaccggtggaggatccagtccactgtcgatccttgccagctgccctgcatcccatgaagatgccgaatttgaggccgacatggatgaggtcagcaggattttgagatcccggtttgcttctccagaggctattgtgatcaccatggactgctgccctgtcagggtgtcagcacgccttgtcagcaaggtcctgagcaggttcagcaatgattgggtggccgcatttgggttcttcatgtgggccggaactcaggaaggctactgtcattgtgctgattcatatgacatgatggtagacatattgggcaagttcaagcagtttgatttgatgtgcggtctgatcggccagatgcatgagattggggggttggtgtcgctagcgaccatgacgaaggtgatgaggaggctatgtggagccaaccgatggagtgacgccattgatgctttccataaaatggaccgctttggggtggcgaaggacacaaaggccatgaatgtgctcttggacacattgtgcaaggagaggagtgtgaagcgtgcaagaggtgccttccaagctttgaaggggacaattcctcctgatgaaagtagcttcaacacattggttcatggctggtgcaaagcaaggatgctgaaggaggctcgcgaaacaatgaaggagatggagcggcatggtttcagtccttcagtaacgacttacacctgcctgatagaagcgtactgcatggagaaagattttcagacggttgatggtatcttggatgagatgcacacaaaaggatgcactccaaatattatcacatacacaattgtgatgcatgcgctagggaaggctgggaggacacaagaagctttggatacttttgacaaggtgaagcaagatggctgtgccctagatgcttctttctacaactgtcttatatacatactatgcagagctgggaggttgcaagatgcaaattttgtggtcgaagaaatgcaccgaactggaatatccccaaacttgactacctttaacaccctgatttctgctgcctgtgatcactctctggctgagaacgcacttaaattgttggttcagatggaggaacagtcatgcaacccagatatcaagacgtacacccccttgctgaagctctgctgcagaaggaaatgggtgaagacgcttctgttcctgatatgtcatatgttccggaaggacatcacccctgatttcagcacatacacattgctggtgtgctggctatgccggaacgggaggctcacccagtcctgcttattcttggaggagatggtgctgaagggctttactccacagcaggcgacctttgatcttgtgctggagaagcttaagaacatgcacatgctttcagcagtgagaaagattcagcttctcaggatgcacacagaaggtactaggtgtaggagcggtgttccatcttatttgagagaggatggtcacgatagacactgttatgctgtattgtcaaacactagtgaagctgaatcttcaatagatggaaaagagctgctctgaaacatccatttttctctgtgccatcaatggatgcttagcacagatcgcttccacatatcacatgatcaatcagtactgggcgtatagcatattgttcagaaggtttttataccattggacagtcatatgaacttatagattggaaccggatcaattgacaaagttagtttactaatataaagatggatacagaatggttttactggtttgatacctttgctccttcctatctaccatttcattttcatatgaagtagtacatgcatatgttcacattttttccttagactgatctagaggcagggcttgatcactaatgatttcatttttatatttaaaaccatctgtatagattcctgtaacaggctaagagcatctcctcaagagattagccaaatttactgatttagctactttgtaaaatagatttcacaaaaaaagagttgggtactcacagactctaaaattcagagtctccatattcaaaagcgccacctaaataggattttttcagattagagaggctttcagcagcatggacgacttttactccttcaggtctggctttttggcgccgccaggccagacattttgttgcaggtcgatgctgttgctggtcgccgaacaaagcatgcaggggtagccatgtccaccggcccgaaagcacgcaggcccagccgtggatacatccaatgaggcaacgcgcttgagaggctttccagtttggtcgtgcatgtaattggcagtgtctgatgcctcaaccaccgtgagcagacgtctggataattggaggctagcacccggtctcctgctgctcagtggggtacatggtgcctaggggctgagctgcaagacgtgaagacgacggtgggaaaacgcgaggaaaagaaaaatcttgggcctcctgccggcgtgggcttgtggtggcggagaggaaggcacatgtcaagatgcactagcatgactgtcttcgatgaactttaactgctttgagcctttgacaagcaacgaggcaatttcccgttctctatttaagacacttgtgtgttcgacacccttgtgcctcgccaagctaatattctggtttggttggttagatgatttggctacaacggcatctgcaactatctcttgtcagggtttttagggacgtaagtgctagcgctcgagtgtgaatcattattgttgccatttatgttatagttcgtaaaccaaacagttctctaattgtaaacgtggataccgcttcttttggctggtagcccacgacttattgtttgccccttctggacaaataccttagcaatacaatgctgaaacgaatcaatgcagggtaacggttgttttgggagagagagaaccatta

SEQ ID NO: 5239 - DNA, 4141 bp, Zea Mays
ccactacaccagtacaccctgcacgcgctgcgggcgtttccgccggctttgtgcctcctctgccctccccggccgctcgccctccgtccacgctcaagctcgccccgtcccggcgcctcgaactcgtcgtcctcgcttccgctgtcgccaccgcgaagcatgaggaggcgtcctgggatcactggcttgcagaatgtggcggctactctcgaactttcagaaccagttgggactggtcggggagaatatggccaaggtcgggaccgatgtcatgaagaagcagcgacttgggatggtccgatcacagctcgagaaatttgcttgcaagcataagaaaacatccttctctaccgtggggttcgacctgcccgactggttcaggaacccaaaggatggttatccttgttccaggttggatggcaatggcgatgatgactttgtgctcccggccaaatcagacttctcagaacaacaaggttgctctgccaccggtggaggatccagtccactgtcgatccttgccagctgccctgcatcccatgaagatgccgaatttgaggccgacatggatgaggtcagcaggattttgagatcccggtttgcttctccagaggctattgtgatcaccatggactgctgccctgtcagggtgtcagcacgccttgtcagcaaggtcctgagcaggttcagcaatgattgggtggccgcatttgggttcttcatgtgggccggaactcaggaaggctactgtcattgtgctgattcatatgacatgatggtagacatattgggcaagttcaagcagtttgatttgatgtgcggtctgatcggccagatgcatgagattggggggttggtgtcgctagcgaccatgacgaaggtgatgaggaggctatgtggagccaaccgatggagtgacgccattgatgctttccataaaatggaccgctttggggtggcgaaggacacaaaggccatgaatgtgctcttggacacattgtgcaaggagaggagtgtgaagcgtgcaagaggtgccttccaagctttgaaggggacaattcctcctgatgaaagtagcttcaacacattggttcatggctggtgcaaagcaaggatgctgaaggaggctcgcgaaacaatgaaggagatggagcggcatggtttcagtccttcagtaacgacttacacctgcctgatagaagcgtactgcatggagaaagattttcagacggttgatggtatcttggatgagatgcacacaaaaggatgcactccaaatattatcacatacacaattgtgatgcatgcgctagggaaggctgggaggacacaagaagctttggatacttttgacaaggtgaagcaagatggctgtgccctagatgcttctttctacaactgtcttatatacatactatgcagagctgggaggttgcaagatgcaaattttgtggtcgaagaaatgcaccgaactggaatatccccaaacttgactacctttaacaccctgatttctgctgcctgtgatcactctctggctgagaacgcacttaaattgttggttcagatggaggaacagtcatgcaacccagatatcaagacgtacacccccttgctgaagctctgctgcagaaggaaatgggtgaagacgcttctgttcctgatatgtcatatgttccggaaggacatcacccctgatttcagcacatacacattgctggtgtgctggctatgccggaacgggaggctcacccagtcctgcttattcttggaggagatggtgctgaagggctttactccacagcaggcgacctttgatcttgtgctggagaagcttaagaacatgcacatgctttcagcagtgagaaagattcagcttctcaggatgcacacagaaggtactaggtgtaggagcggtgttccatcttatttgagagaggatggtcacgatagacactgttatgctgtattgtcaaacactagtgaagctgaatcttcaatagatggaaaagaggtacctagagctgtgcatatactgtaaaaactactgttgatctctagccttttacacttgaatattgtacttctcattgtatgctgctcgtatttttctctttttaataagaatttatgtatatgcacatatcaaccaaggatggttagtttttttttcctcgcaccttaatcttgcctcgatctgtagtaatatctatctttttacccttaccaattgacaagggcagtatatgcttgtttttccttggattttttcaccaccatattgcatagccagactgtttgtttcgttgtaatgacatttacaggttcgttattagcatatacaaatttcggtgcagtaattctcactgtgtatatgcttttcaggatattcagggacatcatttactccccacataataaaactgaagcctaacaatttacttgaaaccatcatgtgatgtgcctaagttatattcagggggtatttttgtattcatgattaagtgaactgctgttcaagaacatacttatttgttgaaatgttgtggcgtatccatgtggcttacaaagtccagccattctccagaccttatagtcaactttcaacaactgaatttccatggagttatagccacatttgtctattaaaacggagcaccaagagagagttatatgccgttttttacttatagaacaggcttgaaacatttacgcattgtctttccacttctccagcattttaaccttttatcatccttttcttagctgctctgaaacatccatttttctctgtgccatcaatggatgcttagcacagatcgcttccacatatcacatgatcaatcagtactgggcgtatagcatattgttcagaaggtttttataccattggacagtcatatgaacttatagattggaaccggatcaattgacaaagttagtttactaatataaagatggatacagaatggttttactggtttgatacctttgctccttcctatctaccatttcattttcatatgaagtagtacatgcatatgttcacattttttccttagactgatctagaggcagggcttgatcactaatgatttcatttttatatttaaaaccatctgtatagattcctgtaacaggctaagagcatctcctcaagagattagccaaatttactgatttagctactttgtaaaatagatttcacaaaaaaagagttgggtactcacagactctaaaattcagagtctccatattcaaaagcgccacctaaataggattttttcagattagagaggctttcagcagcatggacgacttttactccttcaggtctggctttttggcgccgccaggccagacattttgttgcaggtcgatgctgttgctggtcgccgaacaaagcatgcaggggtagccatgtccaccggcccgaaagcacgcaggcccagccgtggatacatccaatgaggcaacgcgcttgagaggctttccagtttggtcgtgcatgtaattggcagtgtctgatgcctcaaccaccgtgagcagacgtctggataattggaggctagcacccggtctcctgctgctcagtggggtacatggtgcctaggggctgagctgcaagacgtgaagacgacggtgggaaaacgcgaggaaaagaaaaatcttgggcctcctgccggcgtgggcttgtggtggcggagaggaaggcacatgtcaagatgcactagcatgactgtcttcgatgaactttaactgctttgagcctttgacaagcaacgaggcaatttcccgttctctatttaagacacttgtgtgttcgacacccttgtgcctcgccaagctaatattctggtttggttggttagatgatttggctacaacggcatctgcaactatctcttgtcagggtttttagggacgtaagtgctagcgctcgagtgtgaatcattattgttgccatttatgttatagttcgtaaaccaaacagttctctaattgtaaacgtggataccgcttcttttggctggtagcccacgacttattgtttgccccttctggacaaataccttagcaatacaatgctgaaacgaatcaatgcagggtaacggttgttttgggagagagagaaccatta

SEQ ID NO: 5240 - DNA, 3750 bp, Zea Mays
acaccagtacaccctgcacgcgctgcgggcgtttccgccggctttgtgcctcctctgccctccccggccgctcgccctccgtccacgctcaagctcgccccgtcccggcgcctcgaactcgtcgtcctcgcttccgctgtcgccaccgcgaagcatgaggaggcgtcctgggatcactggcttgcagaatgtggcggctactctcaaccagttgggactggtcggggagaatatggccaaggtcgggaccgatgtcatgaagaagcagcgacttgggatggtccgatcacagctcgagaaatttgcttgcaagcataagaaaacatccttctctaccgtggggttcgacctgcccgactggttcaggaacccaaaggatggttatccttgttccaggttggatggcaatggcgatgatgactttgtgctcccggccaaatcagacttctcagaacaacaaggttgctctgccaccggtggaggatccagtccactgtcgatccttgccagctgccctgcatcccatgaagatgccgaatttgaggccgacatggatgaggtcagcaggattttgagatcccggtttgcttctccagaggctattgtgatcaccatggactgctgccctgtcagggtgtcagcacgccttgtcagcaaggtcctgagcaggttcagcaatgattgggtggccgcatttgggttcttcatgtgggccggaactcaggaaggctactgtcattgtgctgattcatatgacatgatggtagacatattgggcaagttcaagcagtttgatttgatgtgcggtctgatcggccagatgcatgagattggggggttggtgtcgctagcgaccatgacgaaggtgatgaggaggctatgtggagccaaccgatggagtgacgccattgatgctttccataaaatggaccgctttggggtggcgaaggacacaaaggccatgaatgtgctcttggacacattgtgcaaggagaggagtgtgaagcgtgcaagaggtgccttccaagctttgaaggggacaattcctcctgatgaaagtagcttcaacacattggttcatggctggtgcaaagcaaggatgctgaaggaggctcgcgaaacaatgaaggagatggagcggcatggtttcagtccttcagtaacgacttacacctgcctgatagaagcgtactgcatggagaaagattttcagacggttgatggtatcttggatgagatgcacacaaaaggatgcactccaaatattatcacatacacaattgtgatgcatgcgctagggaaggctgggaggacacaagaagctttggatacttttgacaaggtgaagcaagatggctgtgccctagatgcttctttctacaactgtcttatatacatactatgcagagctgggaggttgcaagatgcaaattttgtggtcgaagaaatgcaccgaactggaatatccccaaacttgactacctttaacaccctgatttctgctgcctgtgatcactctctggctgagaacgcacttaaattgttggttcagatggaggaacagtcatgcaacccagatatcaagacgtacacccccttgctgaagctctgctgcagaaggaaatgggtgaagacgcttctgttcctgatatgtcatatgttccggaaggacatcacccctgatttcagcacatacacattgctggtgtgctggctatgccggaacgggaggctcacccagtcctgcttattcttggaggagatggtgctgaagggctttactccacagcaggcgacctttgatcttgtgctggagaagcttaagaacatgcacatgctttcagcagtgagaaagattcagcttctcaggatgcacacagaaggtactaggtgtaggagcggtgttccatcttatttgagagaggatggtcacgatagacactgttatgctgtattgtcaaacactagtgaagctgaatcttcaatagatggaaaagaggtacctagagctgtgcatatactgtaaaaactactgttgatctctagccttttacacttgaatattgtacttctcattgtatgctgctcgtatttttctctttttaataagaatttatgtatatgcacatatcaaccaaggatggttagtttttttttcctcgcaccttaatcttgcctcgatctgtagtaatatctatctttttacccttaccaattgacaagggcagtatatgcttgtttttccttggattttttcaccaccatattgcatagccagactgtttgtttcgttgtaatgacatttacaggttcgttattagcatatacaaatttcggtgcagtaattctcactgtgtatatgcttttcaggatattcagggacatcatttactccccacataataaaactgaagcctaacaatttacttgaaaccatcatgtgatgtgcctaagttatattcagggggtatttttgtattcatgattaagtgaactgctgttcaagaacatacttatttgttgaaatgttgtggcgtatccatgtggcttacaaagtccagccattctccagaccttatagtcaactttcaacaactgaatttccatggagttatagccacatttgtctattaaaacggagcaccaagagagagttatatgccgttttttacttatagaacaggcttgaaacatttacgcattgtctttccacttctccagcattttaaccttttatcatccttttcttagctgctctgaaacatccatttttctctgtgccatcaatggatgcttagcacagatcgcttccacatatcacatgatcaatcagtactgggcgtatagcatattgttcagaaggtttttataccattggacagtcatatgaacttatagattggaaccggatcaattgacaaagttagtttactaatataaagatggatacagaatggttttactggccagacattttgttgcaggtcgatgctgttgctggtcgccgaacaaagcatgcaggggtagccatgtccaccggcccgaaagcacgcaggcccagccgtggatacatccaatgaggcaacgcgcttgagaggctttccagtttggtcgtgcatgtaattggcagtgtctgatgcctcaaccaccgtgagcagacgtctggataattggaggctagcacccggtctcctgctgctcagtggggtacatggtgcctaggggctgagctgcaagacgtgaagacgacggtgggaaaacgcgaggaaaagaaaaatcttgggcctcctgccggcgtgggcttgtggtggcggagaggaaggcacatgtcaagatgcactagcatgactgtcttcgatgaactttaactgctttgagcctttgacaagcaacgaggcaatttcccgttctctatttaagacacttgtgtgttcgacacccttgtgcctcgccaagctaatattctggtttggttggttagatgatttggctacaacggcatctgcaactatctcttgtcagggtttttagggacgtaagtgctagcgctcgagtgtgaatcattattgttgccatttatgttatagttcgtaaaccaaacagttctctaattgtaaacgtggataccgcttcttttggctggtagcccacgacttattgtttgccccttctggacaaataccttagcaatacaatgctgaaacgaatcaatgcagggtaacggttgttttgggagagagagaaccatta

SEQ ID NO: 5241 - DNA, 1592 bp, Zea Mays
caccagtacaccctgcacgcgctgcgggcgtttccgccggctttgtgcctcctctgccctccccggccgctcgccctccgtccacgctcaagctcgccccgtcccggcgcctcgaactcgtcgtcctcgcttccgctgtcgccaccgcgaagcatgaggaggcgtcctgggatcactggcttgcagaatgtggcggctactctcgaactttcagaaccagttgggactggtcggggagaatatggccaaggtcgggaccgatgtcatgaagaagcagcgacttgggatggtccgatcacagctcgagaaatttgcttgcaagcataaggtttttataccattggacagtcatatgaacttatagattggaaccggatcaattgacaaagttagtttactaatataaagatggatacagaatggttttactggtttgatacctttgctccttcctatctaccatttcattttcatatgaagtagtacatgcatatgttcacattttttccttagactgatctagaggcagggcttgatcactaatgatttcatttttatatttaaaaccatctgtatagattcctgtaacaggctaagagcatctcctcaagagattagccaaatttactgatttagctactttgtaaaatagatttcacaaaaaaagagttgggtactcacagactctaaaattcagagtctccatattcaaaagcgccacctaaataggattttttcagattagagaggctttcagcagcatggacgacttttactccttcaggtctggctttttggcgccgccaggccagacattttgttgcaggtcgatgctgttgctggtcgccgaacaaagcatgcaggggtagccatgtccaccggcccgaaagcacgcaggcccagccgtggatacatccaatgaggcaacgcgcttgagaggctttccagtttggtcgtgcatgtaattggcagtgtctgatgcctcaaccaccgtgagcagacgtctggataattggaggctagcacccggtctcctgctgctcagtggggtacatggtgcctaggggctgagctgcaagacgtgaagacgacggtgggaaaacgcgaggaaaagaaaaatcttgggcctcctgccggcgtgggcttgtggtggcggagaggaaggcacatgtcaagatgcactagcatgactgtcttcgatgaactttaactgctttgagcctttgacaagcaacgaggcaatttcccgttctctatttaagacacttgtgtgttcgacacccttgtgcctcgccaagctaatattctggtttggttggttagatgatttggctacaacggcatctgcaactatctcttgtcagggtttttagggacgtaagtgctagcgctcgagtgtgaatcattattgttgccatttatgttatagttcgtaaaccaaacagttctctaattgtaaacgtggataccgcttcttttggctggtagcccacgacttattgtttgccccttctggacaaataccttagcaatacaatgctgaaacgaatcaatgcagggtaacggttgttttgggagagagagaaccatta

SEQ ID NO: 5242 - DNA, 3680 bp, Zea Mays
caccagtacaccctgcacgcgctgcgggcgtttccgccggctttgtgcctcctctgccctccccggccgctcgccctccgtccacgctcaagctcgccccgtcccggcgcctcgaactcgtcgtcctcgcttccgctgtcgccaccgcgaagcatgaggaggcgtcctgggatcactggcttgcagaatgtggcggctactctcaaccagttgggactggtcggggagaatatggccaaggtcgggaccgatgtcatgaagaagcagcgacttgggatggtccgatcacagctcgagaaatttgcttgcaagcataagaaaacatccttctctaccgtggggttcgacctgcccgactggttcaggaacccaaaggatggttatccttgttccaggttggatggcaatggcgatgatgactttgtgctcccggccaaatcagacttctcagaacaacaaggttgctctgccaccggtggaggatccagtccactgtcgatccttgccagctgccctgcatcccatgaagatgccgaatttgaggccgacatggatgagggtgtcagcacgccttgtcagcaaggtcctgagcaggttcagcaatgattgggtggccgcatttgggttcttcatgtgggccggaactcaggaaggctactgtcattgtgctgattcatatgacatgatggtagacatattgggcaagttcaagcagtttgatttgatgtgcggtctgatcggccagatgcatgagattggggggttggtgtcgctagcgaccatgacgaaggtgatgaggaggctatgtggagccaaccgatggagtgacgccattgatgctttccataaaatggaccgctttggggtggcgaaggacacaaaggccatgaatgtgctcttggacacattgtgcaaggagaggagtgtgaagcgtgcaagaggtgccttccaagctttgaaggggacaattcctcctgatgaaagtagcttcaacacattggttcatggctggtgcaaagcaaggatgctgaaggaggctcgcgaaacaatgaaggagatggagcggcatggtttcagtccttcagtaacgacttacacctgcctgatagaagcgtactgcatggagaaagattttcagacggttgatggtatcttggatgagatgcacacaaaaggatgcactccaaatattatcacatacacaattgtgatgcatgcgctagggaaggctgggaggacacaagaagctttggatacttttgacaaggtgaagcaagatggctgtgccctagatgcttctttctacaactgtcttatatacatactatgcagagctgggaggttgcaagatgcaaattttgtggtcgaagaaatgcaccgaactggaatatccccaaacttgactacctttaacaccctgatttctgctgcctgtgatcactctctggctgagaacgcacttaaattgttggttcagatggaggaacagtcatgcaacccagatatcaagacgtacacccccttgctgaagctctgctgcagaaggaaatgggtgaagacgcttctgttcctgatatgtcatatgttccggaaggacatcacccctgatttcagcacatacacattgctggtgtgctggctatgccggaacgggaggctcacccagtcctgcttattcttggaggagatggtgctgaagggctttactccacagcaggcgacctttgatcttgtgctggagaagcttaagaacatgcacatgctttcagcagtgagaaagattcagcttctcaggatgcacacagaaggtactaggtgtaggagcggtgttccatcttatttgagagaggatggtcacgatagacactgttatgctgtattgtcaaacactagtgaagctgaatcttcaatagatggaaaagaggatattcagggacatcatttactccccacataataaaactgaagcctaacaatttacttgaaaccatcatgtgatgtgcctaagttatattcagggggtatttttgtattcatgattaagtgaactgctgttcaagaacatacttatttgttgaaatgttgtggcgtatccatgtggcttacaaagtccagccattctccagaccttatagtcaactttcaacaactgaatttccatggagttatagccacatttgtctattaaaacggagcaccaagagagagttatatgccgttttttacttatagaacaggcttgaaacatttacgcattgtctttccacttctccagcattttaaccttttatcatccttttcttagctgctctgaaacatccatttttctctgtgccatcaatggatgcttagcacagatcgcttccacatatcacatgatcaatcagtactgggcgtatagcatattgttcagaaggtttttataccattggacagtcatatgaacttatagattggaaccggatcaattgacaaagttagtttactaatataaagatggatacagaatggttttactggtttgatacctttgctccttcctatctaccatttcattttcatatgaagtagtacatgcatatgttcacattttttccttagactgatctagaggcagggcttgatcactaatgatttcatttttatatttaaaaccatctgtatagattcctgtaacaggctaagagcatctcctcaagagattagccaaatttactgatttagctactttgtaaaatagatttcacaaaaaaagagttgggtactcacagactctaaaattcagagtctccatattcaaaagcgccacctaaataggattttttcagattagagaggctttcagcagcatggacgacttttactccttcaggtctggctttttggcgccgccaggccagacattttgttgcaggtcgatgctgttgctggtcgccgaacaaagcatgcaggggtagccatgtccaccggcccgaaagcacgcaggcccagccgtggatacatccaatgaggcaacgcgcttgagaggctttccagtttggtcgtgcatgtaattggcagtgtctgatgcctcaaccaccgtgagcagacgtctggataattggaggctagcacccggtctcctgctgctcagtggggtacatggtgcctaggggctgagctgcaagacgtgaagacgacggtgggaaaacgcgaggaaaagaaaaatcttgggcctcctgccggcgtgggcttgtggtggcggagaggaaggcacatgtcaagatgcactagcatgactgtcttcgatgaactttaactgctttgagcctttgacaagcaacgaggcaatttcccgttctctatttaagacacttgtgtgttcgacacccttgtgcctcgccaagctaatattctggtttggttggttagatgatttggctacaacggcatctgcaactatctcttgtcagggtttttagggacgtaagtgctagcgctcgagtgtgaatcattattgttgccatttatgttatagttcgtaaaccaaacagttctctaattgtaaacgtggataccgcttcttttggctggtagcccacgacttattgtttgccccttctggacaaataccttagcaatacaatgctgaaacgaatcaatgcagggtaacggttgttttgggagagagagaaccatta

SEQ ID NO: 5243 - DNA, 1582 bp, Zea Mays
caccagtacaccctgcacgcgctgcgggcgtttccgccggctttgtgcctcctctgccctccccggccgctcgccctccgtccacgctcaagctcgccccgtcccggcgcctcgaactcgtcgtcctcgcttccgctgtcgccaccgcgaagcatgaggaggcgtcctgggatcactggcttgcagaatgtggcggctactctcaaccagttgggactggtcggggagaatatggccaaggtcgggaccgatgtcatgaagaagcagcgacttgggatggtccgatcacagctcgagaaatttgcttgcaagcataaggtttttataccattggacagtcatatgaacttatagattggaaccggatcaattgacaaagttagtttactaatataaagatggatacagaatggttttactggtttgatacctttgctccttcctatctaccatttcattttcatatgaagtagtacatgcatatgttcacattttttccttagactgatctagaggcagggcttgatcactaatgatttcatttttatatttaaaaccatctgtatagattcctgtaacaggctaagagcatctcctcaagagattagccaaatttactgatttagctactttgtaaaatagatttcacaaaaaaagagttgggtactcacagactctaaaattcagagtctccatattcaaaagcgccacctaaataggattttttcagattagagaggctttcagcagcatggacgacttttactccttcaggtctggctttttggcgccgccaggccagacattttgttgcaggtcgatgctgttgctggtcgccgaacaaagcatgcaggggtagccatgtccaccggcccgaaagcacgcaggcccagccgtggatacatccaatgaggcaacgcgcttgagaggctttccagtttggtcgtgcatgtaattggcagtgtctgatgcctcaaccaccgtgagcagacgtctggataattggaggctagcacccggtctcctgctgctcagtggggtacatggtgcctaggggctgagctgcaagacgtgaagacgacggtgggaaaacgcgaggaaaagaaaaatcttgggcctcctgccggcgtgggcttgtggtggcggagaggaaggcacatgtcaagatgcactagcatgactgtcttcgatgaactttaactgctttgagcctttgacaagcaacgaggcaatttcccgttctctatttaagacacttgtgtgttcgacacccttgtgcctcgccaagctaatattctggtttggttggttagatgatttggctacaacggcatctgcaactatctcttgtcagggtttttagggacgtaagtgctagcgctcgagtgtgaatcattattgttgccatttatgttatagttcgtaaaccaaacagttctctaattgtaaacgtggataccgcttcttttggctggtagcccacgacttattgtttgccccttctggacaaataccttagcaatacaatgctgaaacgaatcaatgcagggtaacggttgttttgggagagagagaaccatta

SEQ ID NO: 5244 - DNA, 2886 bp, Zea Mays
caccagtacaccctgcacgcgctgcgggcgtttccgccggctttgtgcctcctctgccctccccggccgctcgccctccgtccacgctcaagctcgccccgtcccggcgcctcgaactcgtcgtcctcgcttccgctgtcgccaccgcgaagcatgaggaggcgtcctgggatcactggcttgcagaatgtggcggctactctcaaccagttgggactggtcggggagaatatggccaaggtcgggaccgatgtcatgaagaagcagcgacttgggatggtccgatcacagctcgagaaatttgcttgcaagcataagaaaacatccttctctaccgtggggttcgacctgcccgactggttcaggaacccaaaggatggttatccttgttccaggttggatggcaatggcgatgatgactttgtgctcccggccaaatcagacttctcagaacaacaaggttgctctgccaccggtggaggatccagtccactgtcgatccttgccagctgccctgcatcccatgaagatgccgaatttgaggccgacatggatgaggtcagcaggattttgagatcccggtttgcttctccagaggctattgtgatcaccatggactgctgccctgtcagggtgtcagcacgccttgtcagcaaggtcctgagcaggttcagcaatgattgggtggccgcatttgggttcttcatgtgggccggaactcaggaaggctactgtcattgtgctgattcatatgacatgatggtagacatattgggcaagttcaagcagtttgatttgatgtgcggtctgatcggccagatgcatgagattggggggttggtgtcgctagcgaccatgacgaaggtgatgaggaggctatgtggagccaaccgatggagtgacgccattgatgctttccataaaatggaccgctttggggtggcgaaggacacaaaggccatgaatgtgctcttggacacattgtgcaaggagaggagtgtgaagcgtgcaagaggtgccttccaagctttgaaggggacaattcctcctgatgaaagtagcttcaacacattggttcatggctggtgcaaagcaaggatgctgaaggaggctcgcgaaacaatgaaggagatggagcggcatggtttcagtccttcagtaacgacttacacctgcctgatagaagcgtactgcatggagaaagattttcagacggttgatggtatcttggatgagatgcacacaaaaggatgcactccaaatattatcacatacacaattgtgatgcatgcgctagggaaggctgggaggacacaagaagctttggatacttttgacaaggtgaagcaagatggctgtgccctagatgcttctttctacaactgtcttatatacatactatgcagagctgggaggttgcaagatgcaaattttgtggtcgaagaaatgcaccgaactggaatatccccaaacttgactacctttaacaccctgatttctgctgcctgtgatcactctctggctgagaacgcacttaaattgttggttcagatggaggaacagtcatgcaacccagatatcaagacgtacacccccttgctgaagctctgctgcagaaggaaatgggtgaagacgcttctgttcctgatatgtcatatgttccggaaggacatcacccctgatttcagcacatacacattgctggtgtgctggctatgccggaacgggaggctcacccagtcctgcttattcttggaggagatggtgctgaagggctttactccacagcaggcgacctttgatcttgtgctggagaagcttaagaacatgcacatgctttcagcagtgagaaagattcagcttctcaggatgcacacagaaggtactaggtgtaggagcggtgttccatcttatttgagagaggatggtcacgatagacactgttatgctgtattgtcaaacactagtgaagctgaatcttcaatagatggaaaagaggtttttataccattggacagtcatatgaacttatagattggaaccggatcaattgacaaagttagtttactaatataaagatggatacagaatggttttactggccagacattttgttgcaggtcgatgctgttgctggtcgccgaacaaagcatgcaggggtagccatgtccaccggcccgaaagcacgcaggcccagccgtggatacatccaatgaggcaacgcgcttgagaggctttccagtttggtcgtgcatgtaattggcagtgtctgatgcctcaaccaccgtgagcagacgtctggataattggaggctagcacccggtctcctgctgctcagtggggtacatggtgcctaggggctgagctgcaagacgtgaagacgacggtgggaaaacgcgaggaaaagaaaaatcttgggcctcctgccggcgtgggcttgtggtggcggagaggaaggcacatgtcaagatgcactagcatgactgtcttcgatgaactttaactgctttgagcctttgacaagcaacgaggcaatttcccgttctctatttaagacacttgtgtgttcgacacccttgtgcctcgccaagctaatattctggtttggttggttagatgatttggctacaacggcatctgcaactatctcttgtcagggtttttagggacgtaagtgctagcgctcgagtgtgaatcattattgttgccatttatgttatagttcgtaaaccaaacagttctctaattgtaaacgtggataccgcttcttttggctggtagcccacgacttattgtttgccccttctggacaaataccttagcaatacaatgctgaaacgaatcaatgcagggtaacggttgttttgggagagagagaaccatta

SEQ ID NO: 5245 - DNA, 3148 bp, Zea Mays
caccagtacaccctgcacgcgctgcgggcgtttccgccggctttgtgcctcctctgccctccccggccgctcgccctccgtccacgctcaagctcgccccgtcccggcgcctcgaactcgtcgtcctcgcttccgctgtcgccaccgcgaagcatgaggaggcgtcctgggatcactggcttgcagaatgtggcggctactctcaaaacatccttctctaccgtggggttcgacctgcccgactggttcaggaacccaaaggatggttatccttgttccaggttggatggcaatggcgatgatgactttgtgctcccggccaaatcagacttctcagaacaacaaggttgctctgccaccggtggaggatccagtccactgtcgatccttgccagctgccctgcatcccatgaagatgccgaatttgaggccgacatggatgaggtcagcaggattttgagatcccggtttgcttctccagaggctattgtgatcaccatggactgctgccctgtcagggtgtcagcacgccttgtcagcaaggtcctgagcaggttcagcaatgattgggtggccgcatttgggttcttcatgtgggccggaactcaggaaggctactgtcattgtgctgattcatatgacatgatggtagacatattgggcaagttcaagcagtttgatttgatgtgcggtctgatcggccagatgcatgagattggggggttggtgtcgctagcgaccatgacgaaggtgatgaggaggctatgtggagccaaccgatggagtgacgccattgatgctttccataaaatggaccgctttggggtggcgaaggacacaaaggccatgaatgtgctcttggacacattgtgcaaggagaggagtgtgaagcgtgcaagaggtgccttccaagctttgaaggggacaattcctcctgatgaaagtagcttcaacacattggttcatggctggtgcaaagcaaggatgctgaaggaggctcgcgaaacaatgaaggagatggagcggcatggtttcagtccttcagtaacgacttacacctgcctgatagaagcgtactgcatggagaaagattttcagacggttgatggtatcttggatgagatgcacacaaaaggatgcactccaaatattatcacatacacaattgtgatgcatgcgctagggaaggctgggaggacacaagaagctttggatacttttgacaaggtgaagcaagatggctgtgccctagatgcttctttctacaactgtcttatatacatactatgcagagctgggaggttgcaagatgcaaattttgtggtcgaagaaatgcaccgaactggaatatccccaaacttgactacctttaacaccctgatttctgctgcctgtgatcactctctggctgagaacgcacttaaattgttggttcagatggaggaacagtcatgcaacccagatatcaagacgtacacccccttgctgaagctctgctgcagaaggaaatgggtgaagacgcttctgttcctgatatgtcatatgttccggaaggacatcacccctgatttcagcacatacacattgctggtgtgctggctatgccggaacgggaggctcacccagtcctgcttattcttggaggagatggtgctgaagggctttactccacagcaggcgacctttgatcttgtgctggagaagcttaagaacatgcacatgctttcagcagtgagaaagattcagcttctcaggatgcacacagaaggtactaggtgtaggagcggtgttccatcttatttgagagaggatggtcacgatagacactgttatgctgtattgtcaaacactagtgaagctgaatcttcaatagatggaaaagaggtttttataccattggacagtcatatgaacttatagattggaaccggatcaattgacaaagttagtttactaatataaagatggatacagaatggttttactggtttgatacctttgctccttcctatctaccatttcattttcatatgaagtagtacatgcatatgttcacattttttccttagactgatctagaggcagggcttgatcactaatgatttcatttttatatttaaaaccatctgtatagattcctgtaacaggctaagagcatctcctcaagagattagccaaatttactgatttagctactttgtaaaatagatttcacaaaaaaagagttgggtactcacagactctaaaattcagagtctccatattcaaaagcgccacctaaataggattttttcagattagagaggctttcagcagcatggacgacttttactccttcaggtctggctttttggcgccgccaggccagacattttgttgcaggtcgatgctgttgctggtcgccgaacaaagcatgcaggggtagccatgtccaccggcccgaaagcacgcaggcccagccgtggatacatccaatgaggcaacgcgcttgagaggctttccagtttggtcgtgcatgtaattggcagtgtctgatgcctcaaccaccgtgagcagacgtctggataattggaggctagcacccggtctcctgctgctcagtggggtacatggtgcctaggggctgagctgcaagacgtgaagacgacggtgggaaaacgcgaggaaaagaaaaatcttgggcctcctgccggcgtgggcttgtggtggcggagaggaaggcacatgtcaagatgcactagcatgactgtcttcgatgaactttaactgctttgagcctttgacaagcaacgaggcaatttcccgttctctatttaagacacttgtgtgttcgacacccttgtgcctcgccaagctaatattctggtttggttggttagatgatttggctacaacggcatctgcaactatctcttgtcagggtttttagggacgtaagtgctagcgctcgagtgtgaatcattattgttgccatttatgttatagttcgtaaaccaaacagttctctaattgtaaacgtggataccgcttcttttggctggtagcccacgacttattgtttgccccttctggacaaataccttagcaatacaatgctgaaacgaatcaatgcagggtaacggttgttttgggagagagagaaccatta

SEQ ID NO: 5246 - DNA, 1646 bp, Zea Mays
caccagtacaccctgcacgcgctgcgggcgtttccgccggctttgtgcctcctctgccctccccggccgctcgccctccgtccacgctcaagctcgccccgtcccggcgcctcgaactcgtcgtcctcgcttccgctgtcgccaccgcgaagcatgaggaggcgtcctgggatcactggcttgcagaatgtggcggctactctcaaccagttgggactggtcggggagaatatggccaaggtcgggaccgatgtcatgaagaagcagcgacttgggatggtccgatcacagctcgagaaatttgcttgcaagcataagcacagatcgcttccacatatcacatgatcaatcagtactgggcgtatagcatattgttcagaaggtttttataccattggacagtcatatgaacttatagattggaaccggatcaattgacaaagttagtttactaatataaagatggatacagaatggttttactggtttgatacctttgctccttcctatctaccatttcattttcatatgaagtagtacatgcatatgttcacattttttccttagactgatctagaggcagggcttgatcactaatgatttcatttttatatttaaaaccatctgtatagattcctgtaacaggctaagagcatctcctcaagagattagccaaatttactgatttagctactttgtaaaatagatttcacaaaaaaagagttgggtactcacagactctaaaattcagagtctccatattcaaaagcgccacctaaataggattttttcagattagagaggctttcagcagcatggacgacttttactccttcaggtctggctttttggcgccgccaggccagacattttgttgcaggtcgatgctgttgctggtcgccgaacaaagcatgcaggggtagccatgtccaccggcccgaaagcacgcaggcccagccgtggatacatccaatgaggcaacgcgcttgagaggctttccagtttggtcgtgcatgtaattggcagtgtctgatgcctcaaccaccgtgagcagacgtctggataattggaggctagcacccggtctcctgctgctcagtggggtacatggtgcctaggggctgagctgcaagacgtgaagacgacggtgggaaaacgcgaggaaaagaaaaatcttgggcctcctgccggcgtgggcttgtggtggcggagaggaaggcacatgtcaagatgcactagcatgactgtcttcgatgaactttaactgctttgagcctttgacaagcaacgaggcaatttcccgttctctatttaagacacttgtgtgttcgacacccttgtgcctcgccaagctaatattctggtttggttggttagatgatttggctacaacggcatctgcaactatctcttgtcagggtttttagggacgtaagtgctagcgctcgagtgtgaatcattattgttgccatttatgttatagttcgtaaaccaaacagttctctaattgtaaacgtggataccgcttcttttggctggtagcccacgacttattgtttgccccttctggacaaataccttagcaatacaatgctgaaacgaatcaatgcagggtaacggttgttttgggagagagagaaccatta

SEQ ID NO: 5247 - DNA, 4011 bp, Zea Mays
caccagtacaccctgcacgcgctgcgggcgtttccgccggctttgtgcctcctctgccctccccggccgctcgccctccgtccacgctcaagctcgccccgtcccggcgcctcgaactcgtcgtcctcgcttccgctgtcgccaccgcgaagcatgaggaggcgtcctgggatcactggcttgcagaatgtggcggctactctcaaaacatccttctctaccgtggggttcgacctgcccgactggttcaggaacccaaaggatggttatccttgttccaggttggatggcaatggcgatgatgactttgtgctcccggccaaatcagacttctcagaacaacaaggttgctctgccaccggtggaggatccagtccactgtcgatccttgccagctgccctgcatcccatgaagatgccgaatttgaggccgacatggatgaggtcagcaggattttgagatcccggtttgcttctccagaggctattgtgatcaccatggactgctgccctgtcagggtgtcagcacgccttgtcagcaaggtcctgagcaggttcagcaatgattgggtggccgcatttgggttcttcatgtgggccggaactcaggaaggctactgtcattgtgctgattcatatgacatgatggtagacatattgggcaagttcaagcagtttgatttgatgtgcggtctgatcggccagatgcatgagattggggggttggtgtcgctagcgaccatgacgaaggtgatgaggaggctatgtggagccaaccgatggagtgacgccattgatgctttccataaaatggaccgctttggggtggcgaaggacacaaaggccatgaatgtgctcttggacacattgtgcaaggagaggagtgtgaagcgtgcaagaggtgccttccaagctttgaaggggacaattcctcctgatgaaagtagcttcaacacattggttcatggctggtgcaaagcaaggatgctgaaggaggctcgcgaaacaatgaaggagatggagcggcatggtttcagtccttcagtaacgacttacacctgcctgatagaagcgtactgcatggagaaagattttcagacggttgatggtatcttggatgagatgcacacaaaaggatgcactccaaatattatcacatacacaattgtgatgcatgcgctagggaaggctgggaggacacaagaagctttggatacttttgacaaggtgaagcaagatggctgtgccctagatgcttctttctacaactgtcttatatacatactatgcagagctgggaggttgcaagatgcaaattttgtggtcgaagaaatgcaccgaactggaatatccccaaacttgactacctttaacaccctgatttctgctgcctgtgatcactctctggctgagaacgcacttaaattgttggttcagatggaggaacagtcatgcaacccagatatcaagacgtacacccccttgctgaagctctgctgcagaaggaaatgggtgaagacgcttctgttcctgatatgtcatatgttccggaaggacatcacccctgatttcagcacatacacattgctggtgtgctggctatgccggaacgggaggctcacccagtcctgcttattcttggaggagatggtgctgaagggctttactccacagcaggcgacctttgatcttgtgctggagaagcttaagaacatgcacatgctttcagcagtgagaaagattcagcttctcaggatgcacacagaaggtactaggtgtaggagcggtgttccatcttatttgagagaggatggtcacgatagacactgttatgctgtattgtcaaacactagtgaagctgaatcttcaatagatggaaaagaggtacctagagctgtgcatatactgtaaaaactactgttgatctctagccttttacacttgaatattgtacttctcattgtatgctgctcgtatttttctctttttaataagaatttatgtatatgcacatatcaaccaaggatggttagtttttttttcctcgcaccttaatcttgcctcgatctgtagtaatatctatctttttacccttaccaattgacaagggcagtatatgcttgtttttccttggattttttcaccaccatattgcatagccagactgtttgtttcgttgtaatgacatttacaggttcgttattagcatatacaaatttcggtgcagtaattctcactgtgtatatgcttttcaggatattcagggacatcatttactccccacataataaaactgaagcctaacaatttacttgaaaccatcatgtgatgtgcctaagttatattcagggggtatttttgtattcatgattaagtgaactgctgttcaagaacatacttatttgttgaaatgttgtggcgtatccatgtggcttacaaagtccagccattctccagaccttatagtcaactttcaacaactgaatttccatggagttatagccacatttgtctattaaaacggagcaccaagagagagttatatgccgttttttacttatagaacaggcttgaaacatttacgcattgtctttccacttctccagcattttaaccttttatcatccttttcttagctgctctgaaacatccatttttctctgtgccatcaatggatgcttagcacagatcgcttccacatatcacatgatcaatcagtactgggcgtatagcatattgttcagaaggtttttataccattggacagtcatatgaacttatagattggaaccggatcaattgacaaagttagtttactaatataaagatggatacagaatggttttactggtttgatacctttgctccttcctatctaccatttcattttcatatgaagtagtacatgcatatgttcacattttttccttagactgatctagaggcagggcttgatcactaatgatttcatttttatatttaaaaccatctgtatagattcctgtaacaggctaagagcatctcctcaagagattagccaaatttactgatttagctactttgtaaaatagatttcacaaaaaaagagttgggtactcacagactctaaaattcagagtctccatattcaaaagcgccacctaaataggattttttcagattagagaggctttcagcagcatggacgacttttactccttcaggtctggctttttggcgccgccaggccagacattttgttgcaggtcgatgctgttgctggtcgccgaacaaagcatgcaggggtagccatgtccaccggcccgaaagcacgcaggcccagccgtggatacatccaatgaggcaacgcgcttgagaggctttccagtttggtcgtgcatgtaattggcagtgtctgatgcctcaaccaccgtgagcagacgtctggataattggaggctagcacccggtctcctgctgctcagtggggtacatggtgcctaggggctgagctgcaagacgtgaagacgacggtgggaaaacgcgaggaaaagaaaaatcttgggcctcctgccggcgtgggcttgtggtggcggagaggaaggcacatgtcaagatgcactagcatgactgtcttcgatgaactttaactgctttgagcctttgacaagcaacgaggcaatttcccgttctctatttaagacacttgtgtgttcgacacccttgtgcctcgccaagctaatattctggtttggttggttagatgatttggctacaacggcatctgcaactatctcttgtcagggtttttagggacgtaagtgctagcgctcgagtgtgaatcattattgttgccatttatgttatagttcgtaaaccaaacagttctctaattgtaaacgtggataccgcttcttttggctggtagcccacgacttattgtttgccccttctggacaaataccttagcaatacaatgctgaaacgaatcaatgcagggtaacggttgttttgggagagagagaaccatta

SEQ ID NO: 5248 - DNA, 1703 bp, Zea Mays
caccagtacaccctgcacgcgctgcgggcgtttccgccggctttgtgcctcctctgccctccccggccgctcgccctccgtccacgctcaagctcgccccgtcccggcgcctcgaactcgtcgtcctcgcttccgctgtcgccaccgcgaagcatgaggaggcgtcctgggatcactggcttgcagaatgtggcggctactctcgaactttcagaaccagttgggactggtcggggagaatatggccaaggtcgggaccgatgtcatgaagaagcagcgacttgggatggtccgatcacagctcgagaaatttgcttgcaagcataagctgctctgaaacatccatttttctctgtgccatcaatggatgcttagcacagatcgcttccacatatcacatgatcaatcagtactgggcgtatagcatattgttcagaaggtttttataccattggacagtcatatgaacttatagattggaaccggatcaattgacaaagttagtttactaatataaagatggatacagaatggttttactggtttgatacctttgctccttcctatctaccatttcattttcatatgaagtagtacatgcatatgttcacattttttccttagactgatctagaggcagggcttgatcactaatgatttcatttttatatttaaaaccatctgtatagattcctgtaacaggctaagagcatctcctcaagagattagccaaatttactgatttagctactttgtaaaatagatttcacaaaaaaagagttgggtactcacagactctaaaattcagagtctccatattcaaaagcgccacctaaataggattttttcagattagagaggctttcagcagcatggacgacttttactccttcaggtctggctttttggcgccgccaggccagacattttgttgcaggtcgatgctgttgctggtcgccgaacaaagcatgcaggggtagccatgtccaccggcccgaaagcacgcaggcccagccgtggatacatccaatgaggcaacgcgcttgagaggctttccagtttggtcgtgcatgtaattggcagtgtctgatgcctcaaccaccgtgagcagacgtctggataattggaggctagcacccggtctcctgctgctcagtggggtacatggtgcctaggggctgagctgcaagacgtgaagacgacggtgggaaaacgcgaggaaaagaaaaatcttgggcctcctgccggcgtgggcttgtggtggcggagaggaaggcacatgtcaagatgcactagcatgactgtcttcgatgaactttaactgctttgagcctttgacaagcaacgaggcaatttcccgttctctatttaagacacttgtgtgttcgacacccttgtgcctcgccaagctaatattctggtttggttggttagatgatttggctacaacggcatctgcaactatctcttgtcagggtttttagggacgtaagtgctagcgctcgagtgtgaatcattattgttgccatttatgttatagttcgtaaaccaaacagttctctaattgtaaacgtggataccgcttcttttggctggtagcccacgacttattgtttgccccttctggacaaataccttagcaatacaatgctgaaacgaatcaatgcagggtaacggttgttttgggagagagagaaccatta

SEQ ID NO: 5249 - DNA, 4051 bp, Zea Mays
ctcgaactttcagaaccagttgggactggtcggggagaatatggccaaggtcgggaccgatgtcatgaagaagcagcgacttgggatggtccgatcacagctcgagaaatttgcttgcaagcataaggttttgagcaggtttggtgcaatctgattttgaacctgctatggacatcttccactcaagttcttgtcaatggagtgcctggacagcctataaatctcaagcgtgggttgcaacaagaaaacatccttctctaccgtggggttcgacctgcccgactggttcaggaacccaaaggatggttatccttgttccaggttggatggcaatggcgatgatgactttgtgctcccggccaaatcagacttctcagaacaacaaggttgctctgccaccggtggaggatccagtccactgtcgatccttgccagctgccctgcatcccatgaagatgccgaatttgaggccgacatggatgaggtcagcaggattttgagatcccggtttgcttctccagaggctattgtgatcaccatggactgctgccctgtcagggtgtcagcacgccttgtcagcaaggtcctgagcaggttcagcaatgattgggtggccgcatttgggttcttcatgtgggccggaactcaggaaggctactgtcattgtgctgattcatatgacatgatggtagacatattgggcaagttcaagcagtttgatttgatgtgcggtctgatcggccagatgcatgagattggggggttggtgtcgctagcgaccatgacgaaggtgatgaggaggctatgtggagccaaccgatggagtgacgccattgatgctttccataaaatggaccgctttggggtggcgaaggacacaaaggccatgaatgtgctcttggacacattgtgcaaggagaggagtgtgaagcgtgcaagaggtgccttccaagctttgaaggggacaattcctcctgatgaaagtagcttcaacacattggttcatggctggtgcaaagcaaggatgctgaaggaggctcgcgaaacaatgaaggagatggagcggcatggtttcagtccttcagtaacgacttacacctgcctgatagaagcgtactgcatggagaaagattttcagacggttgatggtatcttggatgagatgcacacaaaaggatgcactccaaatattatcacatacacaattgtgatgcatgcgctagggaaggctgggaggacacaagaagctttggatacttttgacaaggtgaagcaagatggctgtgccctagatgcttctttctacaactgtcttatatacatactatgcagagctgggaggttgcaagatgcaaattttgtggtcgaagaaatgcaccgaactggaatatccccaaacttgactacctttaacaccctgatttctgctgcctgtgatcactctctggctgagaacgcacttaaattgttggttcagatggaggaacagtcatgcaacccagatatcaagacgtacacccccttgctgaagctctgctgcagaaggaaatgggtgaagacgcttctgttcctgatatgtcatatgttccggaaggacatcacccctgatttcagcacatacacattgctggtgtgctggctatgccggaacgggaggctcacccagtcctgcttattcttggaggagatggtgctgaagggctttactccacagcaggcgacctttgatcttgtgctggagaagcttaagaacatgcacatgctttcagcagtgagaaagattcagcttctcaggatgcacacagaaggtactaggtgtaggagcggtgttccatcttatttgagagaggatggtcacgatagacactgttatgctgtattgtcaaacactagtgaagctgaatcttcaatagatggaaaagaggtacctagagctgtgcatatactgtaaaaactactgttgatctctagccttttacacttgaatattgtacttctcattgtatgctgctcgtatttttctctttttaataagaatttatgtatatgcacatatcaaccaaggatggttagtttttttttcctcgcaccttaatcttgcctcgatctgtagtaatatctatctttttacccttaccaattgacaagggcagtatatgcttgtttttccttggattttttcaccaccatattgcatagccagactgtttgtttcgttgtaatgacatttacaggttcgttattagcatatacaaatttcggtgcagtaattctcactgtgtatatgcttttcaggatattcagggacatcatttactccccacataataaaactgaagcctaacaatttacttgaaaccatcatgtgatgtgcctaagttatattcagggggtatttttgtattcatgattaagtgaactgctgttcaagaacatacttatttgttgaaatgttgtggcgtatccatgtggcttacaaagtccagccattctccagaccttatagtcaactttcaacaactgaatttccatggagttatagccacatttgtctattaaaacggagcaccaagagagagttatatgccgttttttacttatagaacaggcttgaaacatttacgcattgtctttccacttctccagcattttaaccttttatcatccttttcttagctgctctgaaacatccatttttctctgtgccatcaatggatgcttagcacagatcgcttccacatatcacatgatcaatcagtactgggcgtatagcatattgttcagaaggtttttataccattggacagtcatatgaacttatagattggaaccggatcaattgacaaagttagtttactaatataaagatggatacagaatggttttactggtttgatacctttgctccttcctatctaccatttcattttcatatgaagtagtacatgcatatgttcacattttttccttagactgatctagaggcagggcttgatcactaatgatttcatttttatatttaaaaccatctgtatagattcctgtaacaggctaagagcatctcctcaagagattagccaaatttactgatttagctactttgtaaaatagatttcacaaaaaaagagttgggtactcacagactctaaaattcagagtctccatattcaaaagcgccacctaaataggattttttcagattagagaggctttcagcagcatggacgacttttactccttcaggtctggctttttggcgccgccaggccagacattttgttgcaggtcgatgctgttgctggtcgccgaacaaagcatgcaggggtagccatgtccaccggcccgaaagcacgcaggcccagccgtggatacatccaatgaggcaacgcgcttgagaggctttccagtttggtcgtgcatgtaattggcagtgtctgatgcctcaaccaccgtgagcagacgtctggataattggaggctagcacccggtctcctgctgctcagtggggtacatggtgcctaggggctgagctgcaagacgtgaagacgacggtgggaaaacgcgaggaaaagaaaaatcttgggcctcctgccggcgtgggcttgtggtggcggagaggaaggcacatgtcaagatgcactagcatgactgtcttcgatgaactttaactgctttgagcctttgacaagcaacgaggcaatttcccgttctctatttaagacacttgtgtgttcgacacccttgtgcctcgccaagctaatattctggtttggttggttagatgatttggctacaacggcatctgcaactatctcttgtcagggtttttagggacgtaagtgctagcgctcgagtgtgaatcattattgttgccatttatgttatagttcgtaaaccaaacagttctctaattgtaaacgtggataccgcttcttttggctggtagcccacgacttattgtttgccccttctggacaaataccttagcaatacaatgctgaaacgaatcaatgcagggtaacggttgttttgggagagagagaaccatta

SEQ ID NO: 5250 - DNA, 1777 bp, Zea Mays
ctgcaacccaacaaaatgaaaactaacacacattttctgaccataagaagtattagctgcaaagagccagaaagcactgatataaatttagtggggggaaactaaatatgataacaagctattcaaagatgtaagttagagtatattgggatatctccctatatggtagattatgatcttataatcctggcttgcctttgttagagtggatgcactaaccaattcaacctaaaagttaagttgttgggagaaggtaggcaatgcactatacacgtcaacacccccactcacgtgtagccagaggaaggctgataggattgtggatcctactggggatgtctcatagagaataggggtgagatgatggagtgggctggagatcccgcaacgagacaccgtggctaggtgttgctggcgcagaacagagagaagggcgggggctgcagggcgcaggtactgctggtgctgcgcagaacagaggaggcgagaggggctgctgggcgcagggagcaacaatggttgcttctgcttgatctccattagatgaccacttacaagtatttatatccctgctaatgcctatcttgatctaaggataagagatatgagatcacttctaatccatatccaactaacctgagaaaatctctcatttatatctaactaacctgagataatctcttttattagataagccttatctaatctctctggccacctgtgacctgtggtcggcacctatagtggtggccgaccataacaaaggcacaaacgagaaaataaaggggtggaggcacaaataaagcctctatcatgattcgaactcgagacctctagctctgataccatgttaaagtgggcgtactaatcaaaaccaattcaacctaaaaacttaagatgttaggagaagatagacaatgcacttatacacgtcaacaaccttaactctaagggagccttcttgtcttctatgcaatgtacaccaatctgcccatgagactaaaaaatacaatcacctattccaccaattctattcctcctatacattgtagatagatgaaaggtaactctactttaatattctgaacaagtcaactcaaggtgagcagcagaagtttgaataaatacccatatacctcaaaagaaatgaaaaacatcgtaaaggaaatccaattaatgccaatgcaaaagattgttacatatttgcttgaaccaacaacaacctaaataattatgaagcagctataatgttagaaacacatggcaactgggatctgggcggttttctcggtcctgctgatgagttgtttcgttttagtgcaaagcccacgggagttcttccctcaggattgagtttttatggtgctagaaacttctggatattgaaaaatagcacaggaacttatagtatccgagctaaactgttatcatagtatcaccgctaagttgtttgtcaattaaaacatgtaactatgcagttgataaccagttatagaatccaaagtatgtgtttgtattgaggtattttacacatagcatgagggatggtttgtttagcttaccagtatagggtgaaaaaagtcagttccatgtaatcgtgaatacaaagataataaatcaaatgtgggaaaaagtccagcacgctgcagagaaacaaagtcagcagttgtggttgtttgtgctaattatgaattatacaaagcttcttgctgcattcatattgctggaaagtaatgtgcagaaaagagacctctataatggaggaagctgatttcag

SEQ ID NO: 5251 - DNA, 2039 bp, Zea Mays
gctctcgtcttcctctttcttctagtttcgtctagtcttcaaggaagaccggaaccgaggcgccctggccgagaactggagccaccggacgcacggctgctgccgaaatccacgggagaatgacgatggtcgaggccgaggctggtagggcggcgatccggcgcgccctgcggtcgctgaaacggaggcatctcgccgaggaaggggcgcacagcccggccatcgaggcgctaacccgtcccttcgccgcccacgctttggagtggaaggagaaggctgagaagcatgagttagagctgcagcaatgctacaaggcgcaatcccggctctctgagcagcttgtgactgagatagaagaagttgtggacaacatggtacttagcacttgtgcaaaacttcttcagcgaagagaatgtacaactaaagcagtcgcttgacgaaaaaataaaagccttagatcttctcattcaagagcatcagacagtgaaatccgagcttgaacaagcattgacgaaactaaaagctgcagaggatgagaaccaaaatctggttgatcgatggatgctagagaagatgaaggatgccgagaggctcaatgaggccaatgcgatgtatgaggagatggttctaaagctaaagacagctggagttggtggtatacaacttaatgcacagcaagaaactgatggcatcatacggcgttctgaagctggttacatagaaacgccaatcccatcaacatgcacaataactatccgtgctcatgatggtgggtgtggagctttgatgtttgagcataactcagacaagctaattagtgggggtcaggatcaaactgttaagatatggggtgcatctactggcgctttgaccgccaccctacatggttgcttggggtctgttaatgatcttgccgtgaccaacgataacaagtttgtgatcgctgcctgtagctccaacaagctgtttgtgtgggaagtcagtgggggacgtcctcgccacacgctgactggtcacacgaaaaatgtttcttctgttgatgcaagctgggtgaagagctttgttgttgctagttcatccagtgaccgtactatcaaggtttgggatctacagacaggtttctgcaagagcaccataatgtccgcgagcaaccccaactcgctagctttcatcgatggtgacaccatctgttcgggtcacagggatgggaatcttcggctgtgggatatccgcagtgggaaatgcaccacacagatagctgctcatctggatgtcacctcggtctgcgtgtcacggagcaggaatttcgttcttacaagtgggagagataacgtgcacaacctttttgatgttagaacgctggagatttgtggaacattcagggccatgggcaacagagtggtgagcagctggggcaaaccttctattagccccgacgaaaactgcatcgctgctggttcttctgatggatctgtttacatatggtcgaggctgaagaatggaacgccgaccatcctagagggtcattcttcacccgtcctggcaagtgcatggtgcggactaggagctcttgctacctccgacaggaaccatatctatatctggtcttgagagatgtacaatttcatcaaggcgtggaaactggagagtttcgcatcatcagtatgctaatatgtgttctcttcatttcttgatgacactagttttcatgtgattatgtgaacggattaactggttctgatttctgaacgttgtaaatatcagaagtgattgttcatcgtagtgatgactacttcagttcgccatatgtgtgatggtttgcaaggttttgatggctgaaatttcttggtattgacggctcaggtttgctgttattttaagggtaaacttttgggacaccagtcaaacaacattgacttgggaatagttttgaatgttaattttgcttcaattattaatttattaagtactacatgatccttgtgttctgctgagttgggatgttctggccttaccttacctatatttgtatagttaag

SEQ ID NO: 5252 - DNA, 1059 bp, Zea Mays
tttttttttgcattatgtaccattatgtttacatttcatatttaaaattatagagacaataatagtgacgaatataacgtgcagaatgaataaaaagtgagaaaagattacccacaaatctgacatcaaaacgcaacagtctgtgcttggacacgtcgtggcaagttactaacaccaatggcgtgccgccacgttgacaggtagcccgcgtggacaagccacggtagcaccaccgtatcacctttcggctttggcgcaccacaccaggcaccaccatcgtacatcaacggcttggataagccaacgtggcaacacaataaaacaacaaaagagttctcgtgattagagaagctcagagaacaaaagaacagctcgccgcggctccgaatggcaacttccccgaaccccgcgacgattcaccgagccggcgcccagtgacccttccagaagcttccagaaggtcaccgccatggccgcgcccttcttttccactcctttccagccctacgtctaccagagccagcaaggatctgtgacggcgtttcagatatccggtggagatgtgcaggtcctgcaggtgcaatgtgctacatgtctgggaatatgcagatggacaacaattacttgcctgaaaatgatggaggcgtgtggcagtggatttttgggaaacgtgtaagcagcaccattttctttaattctggatctgatgatggatatgtcgggattgctgcaccatttcctgggaggatactgccggttagtattttgcttctcttctacgttttaatttttctcttagcatcgtcttttcttgtgcaatgtggaataaatcactgttgtcgctactcctcttatgctaacaaattcaagatttgttagctacttagctgtttatttttggattgctctacatctttgaaattgtgatctgctatatgtcaggtgagggtttgttaatccttttgttgaactttaaccatccacttgaatacattttttttcattagattagacaccaacctaacctaactgtatgatcgtatacatatcattacaaag

SEQ ID NO: 5253 - DNA, 1639 bp, Zea Mays
tttttttttgcattatgtaccattatgtttacatttcatatttaaaattatagagacaataatagtgacgaatataacgtgcagaatgaataaaaagtgagaaaagattacccacaaatctgacatcaaaacgcaacagtctgtgcttggacacgtcgtggcaagttactaacaccaatggcgtgccgccacgttgacaggtagcccgcgtggacaagccacggtagcaccaccgtatcacctttcggctttggcgcaccacaccaggcaccaccatcgtacatcaacggcttggataagccaacgtggcaacacaataaaacaacaaaagagttctcgtgattagagaagctcagagaacaaaagaacagctcgccgcggctccgaatggcaacttccccgaaccccgcgacgattcaccgagccggcgcccagtgacccttccagaagcttccagaaggtcaccgccatggccgcgcccttcttttccactcctttccagccctacgtctaccagagccagcaaggatctgtgacggcgtttcagatatccggtggagatgtgcaggtcctgcaggtgatgctgaagtctcaggagaagctgactgcaaaaccaggtgcaatgtgctacatgtctgggaatatgcagatggacaacaattacttgcctgaaaatgatggaggcgtgtggcagtggatttttgggaaacgtgtaagcagcaccattttctttaattctggatctgatgatggatatgtcgggattgctgcaccatttcctgggaggatactgccggtagatctaacaaactttagtggagaacttctttgccaggcagatgcttttctatgttcggtcaatgatgtctccgtctctagtacagttgagccaaggccacggaatattgagattggtgcagagatgatccttaaacaaaaacttaggggccaggggatggcttttcttgttggtggtggatcagtcatgcagaaaatccttgctcctagagaggtgataactgttgatgctgcttgtattgtggctatgtcggccaccattaacttccagttgaagagccctaaccagcttagaagagcagtttttgggggtgataaccagctaacagcatctctcacgggaccaggtgttgttttcattcaaagtctgccattccatcgactctcacagagaatcgccagtagatcagtggcaggcccaagcttgagggacaacccaaagttcttcatccagattgtcatgttcttcttcctggcctatgttatgattgtatcatccataattctgacagatgtttaggcgattcagtgagcttttggtgtattcctagacaagttatcgaagagttaaagctacctccccaatgttaatgtagattttggagggggcggggcgggtttcttggttagcgtgtaaagaggaagacagcaaaatcaagttgcacagcgtatggtgaatatacagtaattttcctcctaaactggtgcgatgcattttgaataattgaatcagtgatttggcttgagcagttgtgtgctcttttcatcagtcatgtactcatgttgtgtgacgtatcatctcgagatttgccattcgccaatgcaggctatatgcttgcct

SEQ ID NO: 5254 - DNA, 6201 bp, Zea Mays
ctttgtttgtctccccgtatctttttcctccaagctacacgcagcgcgggccgcggcgactcaacgagcagagctgaaaattggaggggaaatgtcagtccacacgagcaaaccccaaacattcaaaaaaaaaccagtcgtgactgtctctgaccactccgtaccccgcaaccctcgccagggtaaccagatcaaaccacactcgacccaaacccgccccacgcagcgcaggccgcgtatccacggccgaggctgcggcgcagaccccgcgcgtcagttaccgcaggcgcgcggacgcagcgccggatgatccaaaaaaacaaaaacaaataaaaaaacccgcaggaaaacgcgagagagcacagcacaaggccgccggtcccttctccccaagttcttcccactactcgccgcttcctgctcggaccgccgcggcgactggccggagatccagccgccgggagcgcggaggtcggccggtagctgccgtttcctgctggtggttgctgctggagatcggcggacggaagcagttggtgccacagggcttcgtgctgccgaatttcccagatattttgggggttcggttgaacccccatgcccgacgccactgggcttgaaatgggccttaaaggctctaagggagctccagtaccaggaatggaagggggtgtggcaaaggctcctgcttccttggaggaaaacaagtcctctgctgatgaggatcttggcagagggcctgccttgactgggaagaaaaggagggactgcaggggttctgcggatgaggacagaaacgtgacaaaaagggtgttgagatccgacgcaatgaagctgcgggctgaggctgaggcagcttgtgtggtagctgtggaggttagtaaaactgacagtttggagaggaaacgctgtgaggctattgtggaggctgagccttgtaatagcaggctgctgatggaagttacttgcaatggtgaggaagccaacgaattggttaacttggactccagtgacgtctcggaagagtcagctaggtgttctgagaataatatgggaatgcctagtgttcctgcaacagattcttctcaagataacggtttaggcacgcaaagtagccttgcagaatcagatattaagacaatgaagtcagatgagaagatgtctactgcaactctttcagagtgcaatgactccagagctggaatgaacagtttgagtgttgatgaggctcaagatgacaaagtgagacatgggccttgtcagggtgaggtcatagactcagcaatggctaatgatgctggcacaagtacaaatttaatcaaaatcagccctaccagcggatcagaatctgttaagcaggagaataatgtggttggtaccgaggaagtgatactccacagtagcgatacgaaagttgagaagcattctcacattgacgatgtttgtacagaaactgagatttctttgactgataatggaatatgcgcagtagataaccacaccgatctaactgggtgcactaagcaggaggagaggggcagccccatgaatgaagccaatgatgtttcatcacatgacattgtatttacaaggagaggtagaaaatcatgtgaggcaaagcagaggacatgtgaagaggaggcacggtttgagaagcgaatcacaaggtcagctacagttaggcagagagaagtttctgcgagctcacacaaaacttccacaaatgaggctgcactagaaggcagagggaggaagggagatattgttgctcactatacaaggaaagtaagcagtgcagtatctccaaaaggtcaccatgctgagctgggagactgtaataccagtatgccgaaacaaacagtgaaagaaacggtggttgatcgaagagactcaggtgtccctgagaatgataatcatgcgaatgtcacagagaataaggagtcagaaaatggaaaggagatcaatttgaagacccaaccacctgtgggaattgttaagaaaacatccggaggaggtgtttctgcggtggatcagaatgtctctggttcagccatcactgagagaaatgatacggagcatactgattctgatggagttaaatcggaaaataaaactcctgtgcagaaaccactactgtctgttggtgcgaagattgttgccagcaagaagaggatattggaagcagagcttgataaatccactgggagatcaccaattgctttgccatccatgaaaaagacaagaaatatgtcttctggtcctgagataaaccaacctgataagtctactggagataaacttattgagaataattgtgattcgggcaataagcgtgttctgagggaacggcagcatcgcaatcaaacaaatttgtcaaccagatattctaatcactctaatcaaaatgatatggagcagacacaggatcaatctgatgatgatgagatcagcagcgatacttcctacaggagaactcgtagcagacgtcgttgtggtgctgcccgtcttgctgtgccaaaacaagaggactctagtgattctgaagattttattgctgtgaaaaagaatcggcggaaacggaagaaatctgtgcataaacaaagggctggatctaagttgaagcatacttctggtccttccaaagcaggtcgtttgggtagacctcctctgatcaaatctgaatctagttccttatctctgcagccaggaaaaggggaaaggaaggtgcctgaaggtacaggaactcttcgcgaagaaaagcaaaaaataagtgatcagataaaggccatgcttctagatgctggttggacgattgatttaagacccaggaatggtagaaactacatggattctgtgtatatacctcctagtggcaaagggtcttactggtcagtcacaaaagcatattatgcgtttcgtgctggtatggaatctgagcagcaggaaagtcctaaagaccagtctttgtcaacaaaatctgttggtagccccgacaaaaggcaggtctctagttcttcaggttatactttaacagaggatatccttagcaaattaaaaagagttgttgtaaacaaacgaacaaccaaattagagattcaaaggttgagacagaaaaggttcaaaaaggaaaagaagaagaagaacgtttcaaattcaagaagcctgcatctaggcaatgaaaggaaaaagagaggtggctgtgctctactcgctcgtggatcgaacaaggagtctggcagcagcactgatggttttgttccatatgaatggaaacgtacgatcttttcctggctgattgatctggatgttctatcagtcaacactaagctgaaatgtatggatggaagccactcaaaggttttactagagggttttgccactagggatgggattaactgcagctgctgtaacgaggtctattcagtgcttgaatttgtgactcatgctggttctgaagtaaataagccatacagaaacatacttgtggatgggctagacattgaccttttgcactgtctcattaatgcatggaatatgcagtctgatgttgaaaggcaagatttctttccagttagcattgagggcgatgaccccaatgatgacacatgtggtatttgcggcgatggaggcaatttgatctgctgtgatggatgcccctcgacatttcacatgagttgtctaggactggaggtacttccctctgattattggtgttgtgcaaactgctcatgtaaattttgccacgaacattctagtgatggtgctgaagacactgctgatgttgattattcattgcatacttgttcccagtgcgaagagcagtatcatgaagcctgctctcctgagactgattccataactaacctttccagtcagacaggcaatttattctgccaacaaagctgcagactgctgttcgaggaattgcagaatcttcttgcagtcaagaaggatcttgaaccagaatattcatgcagagttgttcaacgcatccatgaagatgtaccagaagaagtccttgctttggacaaaagagttgagtgtaactccaggattgccgttgcactttcattaatggatgagtgcttccttccgattattgaccagagaactggcatcaacttgatacgaaatgttgtgtatagctgtggatcaaattttgcccggttggatttccgtggattctatatatttattttagaacgtggagatgaaataatagctgcagcatctgtccgaatacatggaaccaagttagctgagatgccgttcattggtacccggaatatgtataggcgacaagggatgtgccgccgacttgtagatggaatcgaaatgatcctcagctctctcaatgttgagaagttgatcattcctgctatcacagaacttgtggacacctggacatcgaaatttggatttagtccacttgaagattctgagaagcaagaagtgaaatctatcagcatgttagtttttcctggtacaggtctcctccaaaagccattgctaaaggccttgcctaatgaagaacaatgttcccaaggagacaaaactgagaaagcatctgatgtagtcaatgaagattctccttgctctgatgcaagtgctgatcccctaggtttgggggtcaaagagcatgaggacagcagcaaagacgctgatggcacttgtaacggtgacgtttcacaggaatgtccccattcttgatgggaagatttggttgcagttttctaggccccaagctttacatggactaagcctccatttgtttttgcacctcgagtttttgatccagcagttagcatgacatccatccgttgttttactcagaaattgatgattgacgcgtcggcctgggaaaagaatcaacccgtgcagttctgaaaagcgtttactccatccagccagctaacttaatgtgcagctgaaaaatcggcatgtagaagaatgtggaggataacgtcccttcttttgtttctcgtcgttaacttgagactccgagggcgaatgcagccattgaatcgtcgtaaatgttacagcagttgttgttttgttaataggtttttttatgtcttcgctagcgcattcctggaatctaatctcattcctgtaagataattcacatgtctgtaagatcagctaatgtatgcgcaaagctagaaatcatccgcctcatccctgtgttcgttcctgtggaaaggattcgctttgctggaatgtgtttgtttgttcttcctgtgaaggaaagcttttgcaggtcaaatcatcagttcatcaccattaagatgtgcatgcaatacaatgcccctggagaagcaaaatctacaggcaggcaggcgtctgcgatgctggtgctgctaaggttatcgaggatcttgttcttgacatcctgtggaagcggggcggacggccctgccagcctgccttggagcagaactccgccagcgatctgatccccttctccagcgcgacgtgactcctgcagtgcagtgaatagcgtcggcacggcgttcctgtaactgtgtcgactatattttgtcaattcgctacccaagacatttggaacctgcttggaacagctttttatgaatagcttttctgagaatctagcgcatgttcgtttctgagtattttgtctctgtagattagtagctacggctacaaaacagctaagattctcgatattctacctgtcaaagagaatcctagatgaataggtatgcaggtttagggctaggaaatgatgaatttctctcgtcatgacgacaaaaaaattctgcatttccgttgatttggcgatgtgtttagcggtcagaagctgattccaacagtcaaaatctgggcagaacccgaaaccaacatgccactggtatcgccactagccactgtttatgggaagcagagcactctagtttacttatcctaaaagaactgagaatgtggaaattcattatcatatcagatgtctaaactttgcattcctctcgacgtagaggacgtgtgtagaaaggaagaacaaaaaaaaaaaaaaaaacggcaagcatgaacagaaaaccaatccacaaaccacttcaatacttcatcccctattcgtttccgtcgattgggtcgtgggctgggcctggcccccgatccggcgctttttaaaggcctcgtggtcgtggccggatatttgcgcgttatttcggcgaagaaaac

SEQ ID NO: 5255 - DNA, 5644 bp, Zea Mays
gctggagatcggcggacggaagcagttggtgccacagggcttcgtgctgccgaatttcccagatattttgggggttcggttgaacccccatgcccgacgccactgggcttgaaatgggccttaaaggctctaagggagctccagtaccaggaatggaagggggtgtggcaaaggctcctgcttccttggaggaaaacaagtcctctgctgatgaggatcttggcagagggcctgccttgactgggaagaaaaggagggactgcaggggttctgcggatgaggacagaaacgtgacaaaaagggtgttgagatccgacgcaatgaagctgcgggctgaggctgaggcagcttgtgtggtagctgtggaggttagtaaaactgacagtttggagaggaaacgctgtgaggctattgtggaggctgagccttgtaatagcaggctgctgatggaagttacttgcaatggtgaggaagccaacgaattggttaacttggactccagtgacgtctcggaagagtcagctaggtgttctgagaataatatgggaatgcctagtgttcctgcaacagattcttctcaagataacggtttaggcacgcaaagtagccttgcagaatcagatattaagacaatgaagtcagatgagaagatgtctactgcaactctttcagagtgcaatgactccagagctggaatgaacagtttgagtgttgatgaggctcaagatgacaaagtgagacatgggccttgtcagggtgaggtcatagactcagcaatggctaatgatgctggcacaagtacaaatttaatcaaaatcagccctaccagcggatcagaatctgttaagcaggagaataatgtggttggtaccgaggaagtgatactccacagtagcgatacgaaagttgagaagcattctcacattgacgatgtttgtacagaaactgagatttctttgactgataatggaatatgcgcagtagataaccacaccgatctaactgggtgcactaagcaggaggagaggggcagccccatgaatgaagccaatgatgtttcatcacatgacattgtatttacaaggagaggtagaaaatcatgtgaggcaaagcagaggacatgtgaagaggaggcacggtttgagaagcgaatcacaaggtcagctacagttaggcagagagaagtttctgcgagctcacacaaaacttccacaaatgaggctgcactagaaggcagagggaggaagggagatattgttgctcactatacaaggaaagtaagcagtgcagtatctccaaaaggtcaccatgctgagctgggagactgtaataccagtatgccgaaacaaacagtgaaagaaacggtggttgatcgaagagactcaggtgtccctgagaatgataatcatgcgaatgtcacagagaataaggagtcagaaaatggaaaggagatcaatttgaagacccaaccacctgtgggaattgttaagaaaacatccggaggaggtgtttctgcggtggatcagaatgtctctggttcagccatcactgagagaaatgatacggagcatactgattctgatggagttaaatcggaaaataaaactcctgtgcagaaaccactactgtctgttggtgcgaagattgttgccagcaagaagaggatattggaagcagagcttgataaatccactgggagatcaccaattgctttgccatccatgaaaaagacaagaaatatgtcttctggtcctgagataaaccaacctgataagtctactggagataaacttattgagaataattgtgattcgggcaataagcgtgttctgagggaacggcagcatcgcaatcaaacaaatttgtcaaccagatattctaatcactctaatcaaaatgatatggagcagacacaggatcaatctgatgatgatgagatcagcagcgatacttcctacaggagaactcgtagcagacgtcgttgtggtgctgcccgtcttgctgtgccaaaacaagaggactctagtgattctgaagattttattgctgtgaaaaagaatcggcggaaacggaagaaatctgtgcataaacaaagggctggatctaagttgaagcatacttctggtccttccaaagcaggtcgtttgggtagacctcctctgatcaaatctgaatctagttccttatctctgcagccaggaaaaggggaaaggaaggtgcctgaaggtacaggaactcttcgcgaagaaaagcaaaaaataagtgatcagataaaggccatgcttctagatgctggttggacgattgatttaagacccaggaatggtagaaactacatggattctgtgtatatacctcctagtggcaaagggtcttactggtcagtcacaaaagcatattatgcgtttcgtgctggtatggaatctgagcagcaggaaagtcctaaagaccagtctttgtcaacaaaatctgttggtagccccgacaaaaggcaggtctctagttcttcaggttatactttaacagaggatatccttagcaaattaaaaagagttgttgtaaacaaacgaacaaccaaattagagattcaaaggttgagacagaaaaggttcaaaaaggaaaagaagaagaagaacgtttcaaattcaagaagcctgcatctaggcaatgaaaggaaaaagagaggtggctgtgctctactcgctcgtggatcgaacaaggagtctggcagcagcactgatggttttgttccatatgaatggaaacgtacgatcttttcctggctgattgatctggatgttctatcagtcaacactaagctgaaatgtatggatggaagccactcaaaggttttactagagggttttgccactagggatgggattaactgcagctgctgtaacgaggtctattcagtgcttgaatttgtgactcatgctggttctgaagtaaataagccatacagaaacatacttgtggatgggctagacattgaccttttgcactgtctcattaatgcatggaatatgcagtctgatgttgaaaggcaagatttctttccagttagcattgagggcgatgaccccaatgatgacacatgtggtatttgcggcgatggaggcaatttgatctgctgtgatggatgcccctcgacatttcacatgagttgtctaggactggaggtacttccctctgattattggtgttgtgcaaactgctcatgtaaattttgccacgaacattctagtgatggtgctgaagacactgctgatgttgattattcattgcatacttgttcccagtgcgaagagcagtatcatgaagcctgctctcctgagactgattccataactaacctttccagtcagacaggcaatttattctgccaacaaagctgcagactgctgttcgaggaattgcagaatcttcttgcagtcaagaaggatcttgaaccagaatattcatgcagagttgttcaacgcatccatgaagatgtaccagaagaagtccttgctttggacaaaagagttgagtgtaactccaggattgccgttgcactttcattaatggatgagtgcttccttccgattattgaccagagaactggcatcaacttgatacgaaatgttgtgtatagctgtggatcaaattttgcccggttggatttccgtggattctatatatttattttagaacgtggagatgaaataatagctgcagcatctgtccgaatacatggaaccaagttagctgagatgccgttcattggtacccggaatatgtataggcgacaagggatgtgccgccgacttgtagatggaatcgaaatgaacttgtggacacctggacatcgaaatttggatttagtccacttgaagattctgagaagcaagaagtgaaatctatcagcatgttagtttttcctggtacaggtctcctccaaaagccattgctaaaggccttgcctaatgaagaacaatgttcccaaggagacaaaactgagaaagcatctgatgtagtcaatgaagattctccttgctctgatgcaagtgctgatcccctaggtttgggggtcaaagagcatgaggacagcagcaaagacgctgatggcacttgtaacggtgacgtttcacaggaatgtccccattcttgatgggaagatttggttgcagttttctaggccccaagctttacatggactaagcctccatttgtttttgcacctcgagtttttgatccagcagttagcatgacatccatccgttgttttactcagaaattgatgattgacgcgtcggcctgggaaaagaatcaacccgtgcagttctgaaaagcgtttactccatccagccagctaacttaatgtgcagctgaaaaatcggcatgtagaagaatgtggaggataacgtcccttcttttgtttctcgtcgttaacttgagactccgagggcgaatgcagccattgaatcgtcgtaaatgttacagcagttgttgttttgttaataggtttttttatgtcttcgctagcgcattcctggaatctaatctcattcctgtaagataattcacatgtctgtaagatcagctaatgtatgcgcaaagctagaaatcatccgcctcatccctgtgttcgttcctgtggaaaggattcgctttgctggaatgtgtttgtttgttcttcctgtgaaggaaagcttttgcaggtcaaatcatcagttcatcaccattaagatgtgcatgcaatacaatgcccctggagaagcaaaatctacaggcaggcaggcgtctgcgatgctggtgctgctaaggttatcgaggatcttgttcttgacatcctgtggaagcggggcggacggccctgccagcctgccttggagcagaactccgccagcgatctgatccccttctccagcgcgacgtgactcctgcagtgcagtgaatagcgtcggcacggcgttcctgtaactgtgtcgactatattttgtcaattcgctacccaagacatttggaacctgcttggaacagctttttatgaatagcttttctgagaatctagcgcatgttcgtttctgagtattttgtctctgtagattagtagctacggctacaaaacagctaagattctcgatattctacctgtcaaagagaatcctagatgaataggtatgcaggtttagggctaggaaatgatgaatttctctcgtcatgacgacaaaaaaattctgcatttccgttgatttggcgatgtgtttagcggtcagaagctgattccaacagtcaaaatctgggcagaacccgaaaccaacatgccactggtatcgccactagccactgtttatgggaagcagagcactctagtttacttatcctaaaagaactgagaatgtggaaattcattatcatatcagatgtctaaactttgcattcctctcgacgtagaggacgtgtgtagaaaggaagaacaaaaaaaaaaaaaaaaacggcaagcatgaacagaaaaccaatccacaaaccacttcaatacttcatcccctattcgtttccgtcgattgggtcgtgggctgggcctggcccccgatccggcgctttttaaaggcctcgtggtcgtggccggatatttgcgcgttatttcggcgaagaaaac

SEQ ID NO: 5256 - DNA, 2598 bp, Zea Mays
ggaagcagttggtgccacagggcttcgtgctgccgaatttcccagatattttgggggttcggttgaacccccatgcccgacgccactgtacttccctctgattattggtgttgtgcaaactgctcatgtaaattttgccacgaacattctagtgatggtgctgaagacactgctgatgttgattattcattgcatacttgttcccagtgcgaagagcagtatcatgaagcctgctctcctgagactgattccataactaacctttccagtcagacaggcaatttattctgccaacaaagctgcagactgctgttcgaggaattgcagaatcttcttgcagtcaagaaggatcttgaaccagaatattcatgcagagttgttcaacgcatccatgaagatgtaccagaagaagtccttgctttggacaaaagagttgagtgtaactccaggattgccgttgcactttcattaatggatgagtgcttccttccgattattgaccagagaactggcatcaacttgatacgaaatgttgtgtatagctgtggatcaaattttgcccggttggatttccgtggattctatatatttattttagaacgtggagatgaaataatagctgcagcatctgtccgaatacatggaaccaagttagctgagatgccgttcattggtacccggaatatgtataggcgacaagggatgtgccgccgacttgtagatggaatcgaaatgatcctcagctctctcaatgttgagaagttgatcattcctgctatcacagaacttgtggacacctggacatcgaaatttggatttagtccacttgaagattctgagaagcaagaagtgaaatctatcagcatgttagtttttcctggtacaggtctcctccaaaagccattgctaaaggccttgcctaatgaagaacaatgttcccaaggagacaaaactgagaaagcatctgatgtagtcaatgaagattctccttgctctgatgcaagtgctgatcccctaggtttgggggtcaaagagcatgaggacagcagcaaagacgctgatggcacttgtaacggtgacgtttcacaggaatgtccccattcttgatgggaagatttggttgcagttttctaggccccaagctttacatggactaagcctccatttgtttttgcacctcgagtttttgatccagcagttagcatgacatccatccgttgttttactcagaaattgatgattgacgcgtcggcctgggaaaagaatcaacccgtgcagttctgaaaagcgtttactccatccagccagctaacttaatgtgcagctgaaaaatcggcatgtagaagaatgtggaggataacgtcccttcttttgtttctcgtcgttaacttgagactccgagggcgaatgcagccattgaatcgtcgtaaatgttacagcagttgttgttttgttaataggtttttttatgtcttcgctagcgcattcctggaatctaatctcattcctgtaagataattcacatgtctgtaagatcagctaatgtatgcgcaaagctagaaatcatccgcctcatccctgtgttcgttcctgtggaaaggattcgctttgctggaatgtgtttgtttgttcttcctgtgaaggaaagcttttgcaggtcaaatcatcagttcatcaccattaagatgtgcatgcaatacaatgcccctggagaagcaaaatctacaggcaggcaggcgtctgcgatgctggtgctgctaaggttatcgaggatcttgttcttgacatcctgtggaagcggggcggacggccctgccagcctgccttggagcagaactccgccagcgatctgatccccttctccagcgcgacgtgactcctgcagtgcagtgaatagcgtcggcacggcgttcctgtaactgtgtcgactatattttgtcaattcgctacccaagacatttggaacctgcttggaacagctttttatgaatagcttttctgagaatctagcgcatgttcgtttctgagtattttgtctctgtagattagtagctacggctacaaaacagctaagattctcgatattctacctgtcaaagagaatcctagatgaataggtatgcaggtttagggctaggaaatgatgaatttctctcgtcatgacgacaaaaaaattctgcatttccgttgatttggcgatgtgtttagcggtcagaagctgattccaacagtcaaaatctgggcagaacccgaaaccaacatgccactggtatcgccactagccactgtttatgggaagcagagcactctagtttacttatcctaaaagaactgagaatgtggaaattcattatcatatcagatgtctaaactttgcattcctctcgacgtagaggacgtgtgtagaaaggaagaacaaaaaaaaaaaaaaaaacggcaagcatgaacagaaaaccaatccacaaaccacttcaatacttcatcccctattcgtttccgtcgattgggtcgtgggctgggcctggcccccgatccggcgctttttaaaggcctcgtggtcgtggccggatatttgcgcgttatttcggcgaagaaaac

SEQ ID NO: 5257 - DNA, 3099 bp, Zea Mays
gttctcctggagacttgacacttttttccaacatgttcacaagttctgtgtacctggagcagaagttgggaagataacgagcagcggggatgggcttgggtcggtatttgaatcaccgcccttcgaatcgctaaaacccctctacctcttcgctggggggctcctttccctcccctcgcgtggcgtctgtggcggctatcctcgcctcgtctcccctcccccctccctagggagcagtcgtttggtgttggtagctgcggcagacgtctgtcctagatcgaattgactcgcgagaagaagccatgtcgacagttgctcctgcccctagcgctgctgaccagaccaccaatcttctgcagaagctgtctctggagggcaaggatggctccgacactgccaagaagccttctgggatgccatatggaggatctacccacgctggagatgcacagagcgctgcttcacaggtggacaggtcgataacacctctactacaggaggccatggatcctaatttcttctaccagcccagtgcatatgcctctccagcctattacttccctagtggttatgatggctcagccaatgaatgggactcaaggtatgctggtcatgaaggaatggagatgccccctaccgtgtatggagacatgtaccttggatatggctatgctccatacggcccatatccttcgggttctccagtaccaactgttgggcatgatggccagtcatatggttctcagcaatatcaatacccgtctcaatattatcagcaaccaacaccaacaaacgcaaaacatggtctaaatggtgccagttctcaacctgaaccgccctctgttgccagtcagcaggcacgagttttggtagatgcaacaaaagcaactccaaacgtgagggctaatggtatgacaattgctcacaacagttcgctgccacgtaagcaaacccacctgaatgtatcggtagcaaacagtggtttatatggaagaggacctatgcaaggcagtggaccttctgcaagcaattatggtcacaatggtgttcgttctccagctcaatggtacgatggtccagtttactcgaatgggcatcagataccaactgctagttccacatcttaccgttccaattcgtcttctatgagaagtcagagccagcatccaacaacaaacctcatgggtatacatgcacagatgccttcgtctggaatgggtctgacctcacctagatatccttctaggatgtacccagacaacagattatatgggcagtatggtcagtatgggaacacactgaagggtggccttggttttggatcaaacatgtatagctcgagaaacaatgggaggtggggagttgtggataccaaatacaagcccagagggcgtgcaccttttggttttagtggtgagaaccaagatggctttaccgagctgaacagaggaccaaggtctggtggtttcaagcaccaaaaacaattcggtcctactgtaactattgctgtgaagggccaagccctcccttcagtggggaaacagaacagtactcttccagacaaaggccaatttaaccaggaagggtttcctttaacctacaaggatgcaaagttctttgttatcaaatcatatagtgaggatgatgtgcacaagagtataaaatacaatgtgtgggctagcactcctaatggaaataagaagctggatgctgggtaccgagaggctcaggagaaatccagtgactgcccggtgttcttgtttttctctgtgaacacaagtggtcagtttgttggtgttgctgaaatggttggtcctgtcgactttgataagactgtggagtattggcaacaagacaagtggaatggttgttttccactcaagtggcacatagtcaaggatgtgcccaacaacactttgaagcatattacactggataacaatgataataagcctgtgacaaacagccgtgacacacaagaggttaagctggaacaaggtcttgaaatgttgaagattttcaaagaacatgttactaaaacgtcaattttggatgattttggtttttacgagaatcgccaaaagttgatgcaggaaaagagggcgaatcagcaactgcttcaaggccagggggccgatgtttctcaagagaaagacaaggatgcgactaatggcaaaccagggtcacagaaacaggcaacgagcaaggaaggcactcctgctgaggtggcggcggatgcctccaaaccagtagctgaaagtggaatatcaaatgacaactaagcatcatgcatactggtcggcaccataccggtgcaaatgctgcaggttttgcggtatctgcaaatcaaaacctattgattctgcctgaattctggacttctttcggtactggagttcgtgagatggggctcatcatgggagtgaatcagattttacttattgtcgctttgctagttgtgtgactggtttttggtgtcttggaacccgtgttaggcttcttacatacccctgtgacgacaccgagtttgttgtaacccttgtttttttttgcctttttgttttagttctatcattgttaacgaagcagcctatttcctatactttgaacaacattaaggtagttttttttgcatgttgcggtactgtggagagtaataagacaaaaagactctaggtttaaaaacactaagaaaaatacaaaataagatggagttgggttgactgaaaaacatatgtatgtagcatttgcaataaaaaaaatacacatcaaaccgcttgctgcttgcctacttgctggacccaaattttcgttgaaatcccagtggcgtgtttgtagggacgccgccttcggctggcggcgcggcgtggatctcctgggacagtttccccattggcatccccgaccagcttggtcacgccgtccaggaactcgataagcactgggtcttgcaccggcgaggactacacgcagcaaacccgctcaatgccggtctcctccatgctcccagtgtgcggtccatccgaccactgcaccgtgaaacggcacgcgcaccgctccatgccatcagcgatctggtgagccgctgtaaacacctgc

SEQ ID NO: 5258 - DNA, 2965 bp, Zea Mays
ccctctacctcttcgctggggggctcctttccctcccctcgcgtggcgtctgtggcggctatcctcgcctcgtctcccctcccccctccctagggagcagtcgtttggtgttggtagctgcggcagacgtctgtcctagatcgaattgactcgcgagaagaagccatgtcgacagttgctcctgcccctagcgctgctgaccagaccaccaatcttctgcagaagctgtctctggagggcaaggatggctccgacactgccaagaagccttctgggatgccatatggaggatctacccacgctggagatgcacagagcgctgcttcacaggtggacaggtcgataacacctctactacaggaggccatggatcctaatttcttctaccagcccagtgcatatgcctctccagcctattacttccctagtggttatgatggctcagccaatgaatgggactcaaggtatgctggtcatgaaggaatggagatgccccctcagaccgtgtatggagacatgtaccttggatatggctatgctccatacggcccatatccttcgggttctccagtaccaactgttgggcatgatggccagtcatatggttctcagcaatatcaatacccgtctcaatattatcagcaaccaacaccaacaaacgcaaaacatggtctaaatggtgccagttctcaacctgaaccgccctctgttgccagtcagcaggcacgagttttggtagatgcaacaaaagcaactccaaacgtgagggctaatggtatgacaattgctcacaacagttcgctgccacgtaagcaaacccacctgaatgtatcggtagcaaacagtggtttatatggaagaggacctatgcaaggcagtggaccttctgcaagcaattatggtcacaatggtgttcgttctccagctcaatggtacgatggtccagtttactcgaatgggcatcagataccaactgctagttccacatcttaccgttccaattcgtcttctatgagaagtcagagccagcatccaacaacaaacctcatgggtatacatgcacagatgccttcgtctggaatgggtctgacctcacctagatatccttctaggatgtacccagacaacagattatatgggcagtatggtcagtatgggaacacactgaagggtggccttggttttggatcaaacatgtatagctcgagaaacaatgggaggtggggagttgtggataccaaatacaagcccagagggcgtgcaccttttggttttagtggtgagaaccaagatggctttaccgagctgaacagaggaccaaggtctggtggtttcaagcaccaaaaacaattcggtcctactgtaactattgctgtgaagggccaagccctcccttcagtggggaaacagaacagtactcttccagacaaaggccaatttaaccaggaagggtttcctttaacctacaaggatgcaaagttctttgttatcaaatcatatagtgaggatgatgtgcacaagagtataaaatacaatgtgtgggctagcactcctaatggaaataagaagctggatgctgggtaccgagaggctcaggagaaatccagtgactgcccggtgttcttgtttttctctgtgaacacaagtggtcagtttgttggtgttgctgaaatggttggtcctgtcgactttgataagactgtggagtattggcaacaagacaagtggaatggttgttttccactcaagtggcacatagtcaaggatgtgcccaacaacactttgaagcatattacactggataacaatgataataagcctgtgacaaacagccgtgacacacaagaggttaagctggaacaaggtcttgaaatgttgaagattttcaaagaacatgttactaaaacgtcaattttggatgattttggtttttacgagaatcgccaaaagttgatgcaggaaaagagggcgaatcagcaactgcttcaaggccagggggccgatgtttctcaagagaaagacaaggatgcgactaatggcaaaccagggtcacagaaacaggcaacgagcaaggaaggcactcctgctgaggtggcggcggatgcctccaaaccagtagctgaaagtggaatatcaaatgacaactaagcatcatgcatactggtcggcaccataccggtgcaaatgctgcaggttttgcggtatctgcaaatcaaaacctattgattctgcctgaattctggacttctttcggtactggagttcgtgagatggggctcatcatgggagtgaatcagattttacttattgtcgctttgctagttgtgtgactggtttttggtgtcttggaacccgtgttaggcttcttacatacccctgtgacgacaccgagtttgttgtaacccttgtttttttttgcctttttgttttagttctatcattgttaacgaagcagcctatttcctatactttgaacaacattaaggtagttttttttgcatgttgcggtactgtggagagtaataagacaaaaagactctaggtttaaaaacactaagaaaaatacaaaataagatggagttgggttgactgaaaaacatatgtatgtagcatttgcaataaaaaaaatacacatcaaaccgcttgctgcttgcctacttgctggacccaaattttcgttgaaatcccagtggcgtgtttgtagggacgccgccttcggctggcggcgcggcgtggatctcctgggacagtttccccattggcatccccgaccagcttggtcacgccgtccaggaactcgataagcactgggtcttgcaccggcgaggactacacgcagcaaacccgctcaatgccggtctcctccatgctcccagtgtgcggtccatccgaccactgcaccgtgaaacggcacgcgcaccgctccatgccatcagcgatctggtgagccgctgtaaacacctgc

SEQ ID NO: 5259 - DNA, 1325 bp, Zea Mays
agaatattatccttgcacataacattgtttatcgcgacctcggcgggtagattcgccgccgcccacagcccacccggtcgctggggcctccccgtcgtcgccggtcgctcgacattccccgtgccggtccgcgcttccgatccccagcgcttccccgagtcgctgcgtgctcgcgtttccccgagccaagggtcgaaggtcgattcagcgccgtcctcaccggagcttgtccacgcccccttgtcccttcgcgcccgctccttcgccggagaccaccacgctgtccttgagcccgtcttctcgggaaacggcgcttcacgccctgcaagcgggacgaccccgtcccgcatctacggtgaatattcgcctgtgggacgagcccatcccacttctcctcacatccaaccaaacgccagcgagaagaggaccgtcccgtcccgttacggttcgtctctccacccctagttccccaaaccggggcatcgattcatcgaaccctgcccggagacgcgagcaatcatagacaggcatggcgatcgctcggaccggcgtgtacgtcgacgactacctcgagtactcgagcaccctggccggcgacctgcaaaggattctctccaccatgcgcgagctcgatgacagggcacatggcattatgggtcagaccaaagaacagataaagtatattctaggagtatcatcccatgggtatgacaggtcaaacatggatgatgatgagtcggagaggatgaagaaggacattgaagctagccaggacaatgctctgaatctttgcaccgagaaagtcttactggcacgccaagcttatgacctgatagagagccatataaaacgccttgatgaagacttgggccagtttgcagaagatttaaagcatgaagggaagatacctccagatgaacctacagtccttcctccagttccggtggttagcagggatgagaaaaggaggtttggttttagtacacctcaagcatcaaaaaaatttagagagagggaatgggacagggaaaggggtatggactttgatttaatgccccctccaggtagcagcaagaaagcaggtacatctatggatgtggatcaaacaattgatccaaatgaaccgacatactgtatatgccaccagatttcatatggtgacatgattgcttgtgacaatgagaattgtggaggaggtgaatggtttcattacacgtgtgtgggtcttacaccagaaacgagattcaaggggaaatggttttgcccaacgtgcaggaatcttcagtgagaggttctccaaggaaaaaatccaaatgcatggggat

SEQ ID NO: 5260 - DNA, 1665 bp, Zea Mays
agaatattatccttgcacataacattgtttatcgcgacctcggcgggtagattcgccgccgcccacagcccacccggtcgctggggcctccccgtcgtcgccggtcgctcgacattccccgtgccggtccgcgcttccgatccccagcgcttccccgagtcgctgcgtgctcgcgtttccccgagccaagggtcgaaggtcgattcagcgccgtcctcaccggagcttgtccacgcccccttgtcccttcgcgcccgctccttcgccggagaccaccacgctgtccttgagcccgtcttctcgggaaacggcgcttcacgccctgcaagcgggacgaccccgtcccgcatctacggtgaatattcgcctgtgggacgagcccatcccacttctcctcacatccaaccaaacgccagcgagaagaggaccgtcccgtcccgttacggttcgtctctccacccctagttccccaaaccggggcatcgattcatcgaaccctgcccggagacgcgagcaatcatagacaggcatggcgatcgctcggaccggcgtgtacgtcgacgactacctcgagtactcgagcaccctggccggcgacctgcaaaggattctctccaccatgcgcgagctcgatgacagggcacatggcattatgggtcagaccaaagaacagataaagtatattctaggagtatcatcccatgggtatgacaggtcaaacatggatgatgatgagtcggagaggatgaagaaggacattgaagctagccaggacaatgctctgaatctttgcaccgagaaagtcttactggcacgccaagcttatgacctgatagagagccatataaaacgccttgatgaagacttgggccagtttgcagaagatttaaagcatgaagggaagatacctccagatgaacctacagtccttcctccagttccggtggttagcagggatgagaaaaggaggtttggttttagtacacctcaagcatcaaaaaaatttagagagagggaatgggacagggaaaggggtatggactttgatttaatgccccctccaggtagcagcaagaaagcaggtacatctatggatgtggatcaaacaattgatccaaatgaaccgacatactgtatatgccaccagatttcatatggtgacatgattgcttgtgacaatgagaattgtggaggaggtgaatggtttcattacacgtgtgtgggtcttacaccagaaacgagattcaaggggaaatggttttgcccaacgtgcaggaatcttcagtgagaggttctccaagtaggtatgatgaaccaaggccattggcgagaatggaacctgctggaatgatatacaaggggtaatcgttttgctcgacatgcatgatcttcatccggaggttgttctgtgtgaagaacttgtcgcaatttggtcgctcggagttgttgcttaaagcgagtttaacattagagactcgcccttcatctcttggctgtctgtctatacttggcactgattttccttgcttggaataacttatggtcagattcacaaacgtttgtagttgtgatatgaaacgctgtgtgttcttttcgacatcgagcaatttagcattatcacgtttggaacatcgctgtcagcatttcatcatgaacagcatttcc

SEQ ID NO: 5261 - DNA, 1555 bp, Zea Mays
agaatattatccttgcacataacattgtttatcgcgacctcggcgggtagattcgccgccgcccacagcccacccggtcgctggggcctccccgtcgtcgccggtcgctcgacattccccgtgccggtccgcgcttccgatccccagcgcttccccgagtcgctgcgtgctcgcgtttccccgagccaagggtcgaaggtcgattcagcgccgtcctcaccggagcttgtccacgcccccttgtcccttcgcgcccgctccttcgccggagaccaccacgctgtccttgagcccgtcttctcgggaaacggcgcttcacgccctgcaagcgggacgaccccgtcccgcatctacggtgaatattcgcctgtgggacgagcccatcccacttctcctcacatccaaccaaacgccagcgagaagaggaccgtcccgtcccgttacggttcgtctctccacccctagttccccaaaccggggcatcgattcatcgaaccctgcccggagacgcgagcaatcatagacaggcatggcgatcgctcggaccggcgtgtacgtcgacgactacctcgagtactcgagcaccctggccggcgacctgcaaaggattctctccaccatgcgcgagctcgatgacagggcacatggcattatgggtcagaccaaagaacagataaagtatattctaggagtatcatcccatgggtatgacaggtcaaacatggatgatgatgagtcggagaggatgaagaaggacattgaagctagccaggacaatgctctgaatctttgcaccgagaaagtcttactggcacgccaagcttatgacctgatagagagccatataaaacgccttgatgaagacttgggccagtttgcagaagatttaaagcatgaagggaagatacctccagatgaacctacagtccttcctccagttccggtggttagcagggatgagaaaaggagcaagaaagcaggtacatctatggatgtggatcaaacaattgatccaaatgaaccgacatactgtatatgccaccagatttcatatggtgacatgattgcttgtgacaatgagaattgtggaggaggtgaatggtttcattacacgtgtgtgggtcttacaccagaaacgagattcaaggggaaatggttttgcccaacgtgcaggaatcttcagtgagaggttctccaagtagaaccaaggccattggcgagaatggaacctgctggaatgatatacaaggggtaatcgttttgctcgacatgcatgatcttcatccggaggttgttctgtgtgaagaacttgtcgcaatttggtcgctcggagttgttgcttaaagcgagtttaacattagagactcgcccttcatctcttggctgtctgtctatacttggcactgattttccttgcttggaataacttatggtcagattcacaaacgtttgtagttgtgatatgaaacgctgtgtgttcttttcgacatcgagcaatttagcattatcacgtttggaacatcgctgtcagcatttcatcatgaacagcatttcc

SEQ ID NO: 5262 - DNA, 1558 bp, Zea Mays
agaatattatccttgcacataacattgtttatcgcgacctcggcgggtagattcgccgccgcccacagcccacccggtcgctggggcctccccgtcgtcgccggtcgctcgacattccccgtgccggtccgcgcttccgatccccagcgcttccccgagtcgctgcgtgctcgcgtttccccgagccaagggtcgaaggtcgattcagcgccgtcctcaccggagcttgtccacgcccccttgtcccttcgcgcccgctccttcgccggagaccaccacgctgtccttgagcccgtcttctcgggaaacggcgcttcacgccctgcaagcgggacgaccccgtcccgcatctacggtgaatattcgcctgtgggacgagcccatcccacttctcctcacatccaaccaaacgccagcgagaagaggaccgtcccgtcccgttacggttcgtctctccacccctagttccccaaaccggggcatcgattcatcgaaccctgcccggagacgcgagcaatcatagacaggcatggcgatcgctcggaccggcgtgtacgtcgacgactacctcgagtactcgagcaccctggccggcgacctgcaaaggattctctccaccatgcgcgagctcgatgacagggcacatggcattatgggtcagaccaaagaacagataaagtatattctaggagtatcatcccatgggtatgacaggtcaaacatggatgatgatgagtcggagaggatgaagaaggacattgaagctagccaggacaatgctctgaatctttgcaccgagaaagtcttactggcacgccaagcttatgacctgatagagagccatataaaacgccttgatgaagacttgggccagtttgcagaagatttaaagcatgaagggaagatacctccagatgaacctacagtccttcctccagttccggtggttagcagggatgagaaaaggaggtagcagcaagaaagcaggtacatctatggatgtggatcaaacaattgatccaaatgaaccgacatactgtatatgccaccagatttcatatggtgacatgattgcttgtgacaatgagaattgtggaggaggtgaatggtttcattacacgtgtgtgggtcttacaccagaaacgagattcaaggggaaatggttttgcccaacgtgcaggaatcttcagtgagaggttctccaaaaccaaggccattggcgagaatggaacctgctggaatgatatacaaggggtaatcgttttgctcgacatgcatgatcttcatccggaggttgttctgtgtgaagaacttgtcgcaatttggtcgctcggagttgttgcttaaagcgagtttaacattagagactcgcccttcatctcttggctgtctgtctatacttggcactgattttccttgcttggaataacttatggtcagattcacaaacgtttgtagttgtgatatgaaacgctgtgtgttcttttcgacatcgagcaatttagcattatcacgtttggaacatcgctgtcagcatttcatcatgaacagcatttcc

SEQ ID NO: 5263 - DNA, 1562 bp, Zea Mays
agaatattatccttgcacataacattgtttatcgcgacctcggcgggtagattcgccgccgcccacagcccacccggtcgctggggcctccccgtcgtcgccggtcgctcgacattccccgtgccggtccgcgcttccgatccccagcgcttccccgagtcgctgcgtgctcgcgtttccccgagccaagggtcgaaggtcgattcagcgccgtcctcaccggagcttgtccacgcccccttgtcccttcgcgcccgctccttcgccggagaccaccacgctgtccttgagcccgtcttctcgggaaacggcgcttcacgccctgcaagcgggacgaccccgtcccgcatctacggtgaatattcgcctgtgggacgagcccatcccacttctcctcacatccaaccaaacgccagcgagaagaggaccgtcccgtcccgttacggttcgtctctccacccctagttccccaaaccggggcatcgattcatcgaaccctgcccggagacgcgagcaatcatagacaggcatggcgatcgctcggaccggcgtgtacgtcgacgactacctcgagtactcgagcaccctggccggcgacctgcaaaggattctctccaccatgcgcgagctcgatgacagggcacatggcattatgggtcagaccaaagaacagataaagtatattctaggagtatcatcccatgggtatgacaggtcaaacatggatgatgatgagtcggagaggatgaagaaggacattgaagctagccaggacaatgctctgaatctttgcaccgagaaagtcttactggcacgccaagcttatgacctgatagagagccatataaaacgccttgatgaagacttgggccagtttgcagaagatttaaagcatgaagggaagatacctccagatgaacctacagtccttcctccagttccggtggttagcagggatgagaaaaggaggtagcagcaagaaagcaggtacatctatggatgtggatcaaacaattgatccaaatgaaccgacatactgtatatgccaccagatttcatatggtgacatgattgcttgtgacaatgagaattgtggaggaggtgaatggtttcattacacgtgtgtgggtcttacaccagaaacgagattcaaggggaaatggttttgcccaacgtgcaggaatcttcagtgagaggttctccaagtagaaccaaggccattggcgagaatggaacctgctggaatgatatacaaggggtaatcgttttgctcgacatgcatgatcttcatccggaggttgttctgtgtgaagaacttgtcgcaatttggtcgctcggagttgttgcttaaagcgagtttaacattagagactcgcccttcatctcttggctgtctgtctatacttggcactgattttccttgcttggaataacttatggtcagattcacaaacgtttgtagttgtgatatgaaacgctgtgtgttcttttcgacatcgagcaatttagcattatcacgtttggaacatcgctgtcagcatttcatcatgaacagcatttcc

SEQ ID NO: 5264 - DNA, 915 bp, Zea Mays
ggtagacccagcaaagaataacaaacaaaaaaaaggaacatgaacctgtttcaaatatggatcaccttgcgctgatgatggaactgctaggaatgatgcctcgaaagatcgcgttgggtggtcggtactcacgtgatttcttcaatcggtacggggatttgaggcacatccgacggttgcggttctggcctctcaacaaggtgctgatggagaagtatgagttcactgaaataaatgctcatgggatggcggattttcttgttccaatacttgattttgttcctgagaagcgccctacagctgctcagttgcttcagcatccatggcttgatgttggtcccctccgacagcaacctaaaacactgcctgactcagcacagaattcagatgacggtgtttcagagaagcagaagaaagagagtgaagaaagagaggcaatggctctagagttggggaacattgccatagatggtgctggtggcaaatgaccctcaagcaaaaaagcgcaactaaaacaactgctacctcttctaagtgaggtgcatttggtttcacgagttaagctgtaaaagttgttttcagtcgagaattgtcgcacgagtgggtaacagatgtttttttaggtttaaaatatgttaggatagctgccgagggaaaagtagagtaggccaattatttgctttatggggttggatggacaagactagattcgtttgggttgcagtaaccctagttttttttcctttgagaacatattcttttgtacaattagaatctggaaaaaaattaaggttagcagtgaacaactgggaacccgaaatgtgttgcgttaaggcctgcctaaaattttctgctggaatcatctggaaacatgatgtgccaccttttatcactgtaaagtttttactgtacatt

SEQ ID NO: 5265 - DNA, 2273 bp, Zea Mays
gtatatgccatttgggttttgtagttgattggcctcagcattttgttggggatcaactgctgatcactctacgaattagtccttggactatgcaaaattttctacatcaaggtttcttcatttcagtagtatttctgcatgttccaagatcaccttgcgctgatgatggaactgctaggaatgatgcctcgaaagatcgcgttgggtggtcggtactcacgtgatttcttcaatcggtacggggatttgaggcacatccgacggttgcggttctggcctctcaacaaggtgctgatggagaagtatgagttcactgaaataaatgctcatgggatggcggattttcttgttccaatacttgattttgttcctgagaagcgccctacagctgctcagttgcttcagcatccatggcttgatgttggtcccctccgacagcaacctaaaacactgcctgactcagcacagaattcagatgacggtgtttcagagaagcagaagaaagagagtgaagaaagagaggcaatggctctagagttggggaacattgccatagatggtgctggtggcaaatgaccctcaagcaaaaaagcgcaactaaaacaactgctacctcttctaagtgaggtgcatttggtttcacgagttaagctgtaaaagttgttttcagtcgagaattgtcgcacgagtgggtaacagatgtttttttaggtttaaaatatgttaggatagctgccgagggaaaagtagagtaggccaattatttgctttatggggttggatggacaagactagattcgtttgggttgcagtaaccctagttttttttcctttgagaacatattcttttgtacaattagaatctggaaaaaaattaaggttagcagtgaacaactgggaacccgaaatgtgttgcgttaaggcctgcctaaaattttctgctggaatcatctggaaacatgatgtgccaccttttatcactgtaaagtttttactgtacattttttgcctggtatatgaattccagcatagatttaaacatgtcctgtttatgcacacggcaacgcaggtgtactttatgtttggtttatcacgttacctacatgtgctgatacaagggaagaagggcagtgagccagtggcgttgacgacactgcagacgaggcaaccatagttgattagttgcaatcagttgaaagagttgagttgtggcatttgggtcgggcacttgggtgatgggtccgaggcccgagctgcacccggtgcatggcgtgggtttgggtcgcggttcctgaatccgcaatccagtggtcgccccgcgcgcagcacaccacccaaaagggaagtcaagtcaaccaaaggccgcacggggtacagccctacccctcccgtcacaaatcccagcggcgccaagcccaagtcagcgcgcgcggcgatggagcggcgggggcaacagcctggcgacgcgcagcagccaggcaaggacggcgccggcgactcccctcctccaccgccaccgttcctggaggtgagctgcaggagctccggcaaggttcggcggttcgcggcggggacgacggcccgctacgcgctgcacgccatcaaccgcaagctcggccccggggccccgccggcgctgcacgtcgaggccgtcagggacggcgaggagcccgtcagcttcggccccagcgcggccctcgccgactacggccgcggctggaggctgcagaccgtcaccgcgcacgacgcgcccgggatccatcacgcgccgcacgcggacacggcgaaacagggcgacaggcagccgtccaaagaagatgccgatggtacggagacagtcaggggcacttgcatctacgtcgccaagatcgtgctcgcgtttgcgtttctcttcctgctaggtggatcgctcacgtacctgctggaggtgatccctgacatgctgcagactgcatcggcgcttgagttaactgattttttctacgacccgctgactgaaaatgtatgacgcatgtatcatttcattagcattaattatatggcattgtgtggggctttgtaacttggtcaattttaattcgtgtcgctgcagctcatgataattcatcgtctttgttattaggtctactttctaggcattgtgcaaggtttgcttgagtgcttggtaggacttttttttttttgacgtagacaaacgcacactcacctatataaacatacacatcacacatatgctgatatgcacacattacctctgtaagcacatctgaaag

SEQ ID NO: 5266 - DNA, 485 bp, Zea Mays
gccttcacgccggaggtctgcgtcagccaccccagcgcctcgatggcggcgtcccgctccgcgagctgcttgttccgcttcggcttccccacgaactgcatccccttgaactccaccacggccctgaactcgttcgtcttgaggtgcttcgtcttgtacctgggcggggtgtggccggcccgcatcagcagcgtctgcagcaggctcttggggttcatcccgtcctttatgaggttgctcttgccgtcgtcctcggggctccggagccgggcccggctcgtctcgcggccgaacacgaacctcccttcgcacaggtcgccggcggcgagctcttgtacggcgaataggatgtacttgccttccttgtggatgtcgaagtttgggtcttcaagctggactcgaacaaataaattgtcggatcacgcaaaaagtatcacagtcagactgttgactgaaacaaagcacatatcactgctcaaagactg

SEQ ID NO: 5267 - DNA, 147 bp, Zea Mays
ctcctctctctgtggataccctttctgcaactgccattgcagatattcttcgtggctgtgtacaaattatgttacaaaaagcccctcgaccagactcaatttctgattccaatacaaactgaggcagctgtgttgttttaccacacc

SEQ ID NO: 5268 - DNA, 238 bp, Zea Mays
acctgccaacttctctgaaaattccgcatccgaatgctcttcctctgaagtatcttctccatgactgaccgatcaagaagggaatcatgctgctcatccaggttcgcattctcagtcatgtcagagccattttttgtgttgccaccacatttattcagtggtaagaatgcgcggtctaggtgctcctgcacaagtccttcaactctcctctgcaaacccagcgggattaccacctgtt

SEQ ID NO: 5269 - DNA, 138 bp, Zea Mays
tgtagagtcccatcctcttggcgaggttggctatctggtcataatcccggcggtccctccggtccctggagatgatctcctgttcctccgcgttgcgctgcagcatgctcagcttccacctccactcgtcgatgttcg

SEQ ID NO: 5270 - DNA, 296 bp, Zea Mays
cccggaggtcctcgtactcgtggtcgtattcgtcgtctgagaactgctcgacggcgcgctccccgacggggaagctgcagaaggagtggcgggagaagccattgaagcgtcgggggaggagagccgcgagagagatcggcggcaggcggctgggtgcgtgcgggagcgggacgaggaggatgcccaacccgcgacgcaggccgcggcgcatgctacccgtggctcgttagctctactgcggcggcggcatgacaggagatggaactcaggggaggcaccgagccagccagcctgcc

SEQ ID NO: 5271 - DNA, 2631 bp, Zea Mays
gccctgcatgtgcgcctgtttacttcacctaataacaggcgcgctgccgtgctgctgctcctaacttaacttctgtctctatatatataggtggttcgaggtgatcggcagaaccacacaggcaaagatggcgagcgtgcacaaggccaccacccttgttctcatgttctgcctgctagcgctggggagagcggagtacctcaagtacaaggacccaaagcagcccgtcgctgttcgcatcaaggacctgctgggtcggatgactctcgccgaaaagatcggccagatgacgcagatcgagagggaaaacgccacggccgacgcgctggccaaatacttcataggtagcgtgctgagcggcggaggcagcgtgcctgctcctcaggcgtctgctcaggcttgggccgccatggtgaccgagatgcagaagggcgctctttctacgcgtctgggtataccgatcatctacggtatcgatgcagtgcatgggcacaacaacgtctacaaagctactattttccctcacaacgtcgggcttggagctaccagggaccctgacctcgttaagagaattggagaagcaactgctcttgaagttagagctactggaattccttacgcctttgctccctgtatagcggtctgtagagatccaagatggggacgttgctatgagagctacagtgaggatccaaaggttgtccagtcactgacttcactcatctctggcctgcaaggtgacgctcctgcggattccgcgggaaggccgtatgttgggggaagtaagaaggttgctgcatgcgcgaagcactatgtcggtgatggtggaacgcataacggaatcaacgagaacaacacgatcatcgacacacacgggctgctgagcatccatatgcctccttactacaactctatcatccgaggtgtctccacggtcatggtctcctactccagctggaacggagtgaagatgcacgcgaaccatttcctggtcacggattttctcaagaacaagctcaagtttaggggttttgtgatttccgactgggagggcattgatcggatcactactcctcctcacgccaactactcttactcaattgaggctggtgttggtgctggaattgacatgatcatggttccattcagatacacagaattcatcgacgatctgacgacacaagttcagaacaaggtcatccccatgagcagaatcgacgacgccgtctacaggatccttcgtgtcaagttcaccatgggtctgttcgagaacccttaccccgactctagcctcgccggcgagctcgggaagcaagaacaccgggaactggcgcgcgaagccgtcaggaaatcccttgttctcctgaagaacggcaagtcctcctacgctccgttgctgcccctcccgaagaaggccggcaagatcctggtcgccggcagccacgccaacgacctgggcaaccagtgcggggggtggacgatcacgtggcaaggaagcagcggcaacaccactgccggcacgacgatcctctccgggatcgaggccaccgtggaccccagcacgcaggtggtgtactcggagagcccggacagcggcgtgctggccgacaagtacgactacgcgatcgtggtggtcggtgagccgccatacgcggagacgttcggcgacaacctgaacctgacgatcccggcgcccgggccgagcgtgatccagtcggtgtgcggggccgccaagtgcgtagtggtcctcatctccggcaggccgctggtggtggagccgtacctgggcgacatggacgcgctggtggcggcgtggctgccggggtcggaggggcagggcgtggcggacgtgctgttcggcgactacgggttcacggggaagctgccgcggacgtggttcaagtcggtggaccagctgcccatgaacgtgggcgacgcgcactacgacccgctcttcccgttcggcttcggactcaccaccaagggcacgaagtgagtgagtgtgaggcgctctgatgggatgtggcctgtgagtgagctgtgtattcgtgggcgggcgtgaggctctttggctttcgaattggttgggggtgacgggcggcgagtcgtgtacgccgcacacattgcgcagcgtacgttgggttgggatgtttgcgtctgggtaataacagtgatgcattcttgagatggttgctgttagtgtgggttgtttggaatgaacaataagatcaggcgcgttacattggcacgctactacctctcctgctgagaccagagatggcgatgtgcatttacccatcggcccgtgctattccataccctatttagccgtgtactgataaaagaatttgtcaaaccgtgtacgggtaaaatcatgtatccatgtactgctcactataccgtatacgccagctacttctactaccaatattactcgtatctagtgtaaaaatgattagggtgctaatattagggcctgtttggcatggctccagagcaaaactccaaggaggagctggccagagcatgccaaacaccctaactccagagttgtaaactctatgaagtttttggagctgcagtacaattttttggagtacctcttttgctgctctgaaaactccaaaaaag

SEQ ID NO: 5272 - DNA, 2926 bp, Zea Mays
gcacagatcacatgtccacccgcaaaaaagagcagcaaactgagcacgccgctgggcgctggaacagtagccactgtgttactcgattacgcacacacacgggtccacattcacggctgtacatcgggtccaccgatcagtgagaagtaaccaggacactcgcgtcagtgcgggtcggtcggtccccgccgtccgacacccgcacggtcagattcaccggtcgccggcctttgggtgtcgtctggtcgctgtagatcctcggggtgaaaaaaaagggagaaaagctgctcagtaaaggcggccccggacgagcgcaataaagcctgggcacccgtcgccagccttccttgcccccggtgagctgccactgccagcttccccgtgcgcgagctgtgctgctgctcggcggcgcgcccactccccggccgctccctcgtcactccgcctgccggtctctatatatataggtggttcgaggtgatcggcagaaccacacaggcaaagatggcgagcgtgcacaaggccaccacccttgttctcatgttctgcctgctagcgctggggagagcggagtacctcaagtacaaggacccaaagcagcccgtcgctgttcgcatcaaggacctgctgggtcggatgactctcgccgaaaagatcggccagatgacgcagatcgagagggaaaacgccacggccgacgcgctggccaaatacttcataggtagcgtgctgagcggcggaggcagcgtgcctgctcctcaggcgtctgctcaggcttgggccgccatggtgaccgagatgcagaagggcgctctttctacgcgtctgggtataccgatcatctacggtatcgatgcagtgcatgggcacaacaacgtctacaaagctactattttccctcacaacgtcgggcttggagctaccagggaccctgacctcgttaagagaattggagaagcaactgctcttgaagttagagctactggaattccttacgcctttgctccctgtatagcggtctgtagagatccaagatggggacgttgctatgagagctacagtgaggatccaaaggttgtccagtcactgacttcactcatctctggcctgcaaggtgacgctcctgcggattccgcgggaaggccgtatgttgggggaagtaagaaggttgctgcatgcgcgaagcactatgtcggtgatggtggaacgcataacggaatcaacgagaacaacacgatcatcgacacacacgggctgctgagcatccatatgcctccttactacaactctatcatccgaggtgtctccacggtcatggtctcctactccagctggaacggagtgaagatgcacgcgaaccatttcctggtcacggattttctcaagaacaagctcaagtttaggggttttgtgatttccgactgggagggcattgatcggatcactactcctcctcacgccaactactcttactcaattgaggctggtgttggtgctggaattgacatgatcatggttccattcagatacacagaattcatcgacgatctgacgacacaagttcagaacaaggtcatccccatgagcagaatcgacgacgccgtctacaggatccttcgtgtcaagttcaccatgggtctgttcgagaacccttaccccgactctagcctcgccggcgagctcgggaagcaagaacaccgggaactggcgcgcgaagccgtcaggaaatcccttgttctcctgaagaacggcaagtcctcctacgctccgttgctgcccctcccgaagaaggccggcaagatcctggtcgccggcagccacgccaacgacctgggcaaccagtgcggggggtggacgatcacgtggcaaggaagcagcggcaacaccactgccggcacgacgatcctctccgggatcgaggccaccgtggaccccagcacgcaggtggtgtactcggagagcccggacagcggcgtgctggccgacaagtacgactacgcgatcgtggtggtcggtgagccgccatacgcggagacgttcggcgacaacctgaacctgacgatcccggcgcccgggccgagcgtgatccagtcggtgtgcggggccgccaagtgcgtagtggtcctcatctccggcaggccgctggtggtggagccgtacctgggcgacatggacgcgctggtggcggcgtggctgccggggtcggaggggcagggcgtggcggacgtgctgttcggcgactacgggttcacggggaagctgccgcggacgtggtgttcgcggagagccccgacgccgagttcgtcaggagcggcggcttctcgtacgcgatcgtggccgtgggcgagcacccgtacacggagaccaagggcgacagcatgaacctgacgatcccggaccccgggccgagcaccgtacagacggtgtgcgccgccgtgcggtgcgtgaccgtgctcatcagcggccgccccgtggtgatacagccgttcctgggcgccatggacgcggtcgtggcggcctggctgccggggaccgagggccagggtgtcaccgacgtgctgttcggggactacgggttcacggggaagctgccgcggacgtggttcaggtcggtggaccagctgccgatgaactacggcgacgcgcactacgacccgctgttcccgctcgggttcgggctcaccacacagggcaagatgtaccagaactagaagaaggcggagcgaggggaaaggggtagtacttggtaaagataataggaaattgaattaagcagtgctctgccgaggaaacgtgaacctgtagttcttgtttccctcaattctatgtcgattaattttgatgtatgctcagttctcactgtggagtagcatccacacatgagccatctcattcttatatgataatcatgatttgattttgctca

SEQ ID NO: 5273 - DNA, 1871 bp, Zea Mays
cacagcgacattccaactgatagatgccgctcactcttggtgctgcgttccacgagcctgagagtagtggtggaggtcgagagacggccgtctgctcagccgtcgttggcgacggctcgtttcagggtcccccacctactaatcacgaccctggcctctctcgattctgttgccttgccattgccatcatccaccctcatgcatgtcggtgcaacgcccatgggcatccactggtgcttataagaggaataatccggcttccgttcctctgaggacatcctcggccttccagggcagcaaccacgaaagccttctgcgcggggtgctttcctcgcagcaaatattcctgccttttgcattccggctttgcaagttccttgctttgggcatatatattgtgaggtctctatatatataggtggttcgaggtgatcggcagaaccacacaggcaaagatggcgagcgtgcacaaggccaccacccttgttctcatgttctgcctgctagcgctggggagagcggagtacctcaagtacaaggacccaaagcagcccgtcgctgttcgcatcaaggacctgctgggtcggatgactctcgccgaaaagatcggccagatgacgcagatcgagagggaaaacgccacggccgacgcgctggccaaatacttcataggtagcgtgctgagcggcggaggcagcgtgcctgctcctcaggcgtctgctcaggcttgggccgccatggtgaccgagatgcagaagggcgctctttctacgcgtctgggtataccgatcatctacggtatcgatgcagtgcatgggcacaacaacgtctacaaagctactattttccctcacaacgtcgggcttggagctaccagggaccctgacctcgttaagagaattggagaagcaactgctcttgaagttagagctactggaattccttacgcctttgctccctgtatagcggtctgtagagatccaagatggggacgttgctatgagagctacagtgaggatccaaaggttgtccagtcactgacttcactcatctctggcctgcaaggtgacgctcctgcggattccgcgggaaggccgtatgttgggggaagtaagaaggttgctgcatgcgcgaagcactatgtcggtgatggtggaacgcataacggaatcaacgagaacaacacgatcatcgacacacacgggctgctgagcatccatatgcctccttactacaactctatcatccgaggtgtctccacggtcatggtctcctactccagctggaacggagtgaagatgcacgcgaaccatttcctggtcacggattttctcaagaacaagctcaagtttaggggttttgtgatttccgactgggagggcattgatcggatcactactcctcctcacgccaactactcttactcaattgaggctggtgttggtgctggaattgacatgatcatggttccattcagatacacagaattcatcgacgatctgacgacacaagttcagaacaaggtcatccccatgagcagaatcgacgacgccgtctacaggatccttcgtgtcaagttcaccatgggtctgttcgagaacccttaccccgactctagcctcgccggcgagctcgggaagcaagaacaccgggaactggcgcgcgaagccgtcaggaaatcccttgttctcctgaagaacggcaagtcctcctacgctccgttgctgcccctcccgaagaaggccggcaagatcctggtcgccggcagccacgccaacgacctgggcaaccagtgcggggggtggacgatcacgtggcaaggaagcagcggcaacaccactgccggattcgtgagcaacgaccgacctgga

SEQ ID NO: 5274 - DNA, 1209 bp, Zea Mays
taacactgaagcagaaggtgacagacagacttgtgcgtgcctgctcctcaggcgtctgctcaggcttgggccgccatggtgaccgagatgcagaagggcgctctttctacgcgtctgggtataccgatcatctacggtatcgatgcagtgcatgggcacaacaacgtctacaaagctactattttccctcacaacgtcgggcttggagctaccagggaccctgacctcgttaagagaattggagaagcaactgctcttgaagttagagctactggaattccttacgcctttgctccctgtatagcggtctgtagagatccaagatggggacgttgctatgagagctacagtgaggatccaaaggttgtccagtcactgacttcactcatctctggcctgcaaggtgacgctcctgcggattccgcgggaaggccgtatgttgggggaagtaagaaggttgctgcatgcgcgaagcactatgtcggtgatggtggaacgcataacggaatcaacgagaacaacacgatcatcgacacacacgggctgctgagcatccatatgcctccttactacaactctatcatccgaggtgtctccacggtcatggtctcctactccagctggaacggagtgaagatgcacgcgaaccatttcctggtcacggattttctcaagaacaagctcaagtttaggggttttgtgatttccgactgggagggcattgatcggatcactactcctcctcacgccaactactcttactcaattgaggctggtgttggtgctggaattgacatgatcatggttccattcagatacacagaattcatcgacgatctgacgacacaagttcagaacaaggtcatccccatgagcagaatcgacgacgccgtctacaggatccttcgtgtcaagttcaccatgggtctgttcgagaacccttaccccgactctagcctcgccggcgagctcgggaagcaagaacaccgggaactggcgcgcgaagccgtcaggaaatcccttgttctcctgaagaacggcaagtcctcctacgctccgttgctgcccctcccgaagaaggccggcaagatcctggtcgccggcagccacgccaacgacctgggcaaccagtgcggggggtggacgatcacgtggcaaggaagcagcggcaacaccactgccggattcgtgagcaacgaccgacctgga

SEQ ID NO: 5275 - DNA, 3066 bp, Zea Mays
acccagctggacccacaattcatagatgcagtggtaattataacaagaagacaacattgtagatgcagtggtaattataacaagaagacaacattgtgagtggcaaaaatccaattatctcctgatttgcctccattaaacataaatcgtggccgctcgagctgagcccactccccattcctcgatccattcgtctccagatatatagaatcatcgcgtctgccaccacctgcagcaccctctccgcttcgtcctccctcggtcctccgtccgccattgttgcttggctggcttgctcaagccagccgtgtgcgtcgtcgttgcttctgcgggcactcctccaccacttggtagaatataactcgctgacaagttggaggccggaggcggagagggagcaggagcaggataagcttggcagtcggcacagcagatagggggcctgattagattaaatcattagagatagataaaagacacagacatggagtgtgctgccgtcaagtaacagcgcagctggctggttgcgggcccctgctgatctggggctgggtggcagtggcacggacgccgtcgctttcgatcgacgggggagctgagggctccctgctctgccgccgcaccggcaccgcgcccacttcaccgcatcgccgcgcggattcgtccttacttgatcgagacgactagctatactataacctagcctgccccctcacccggtcacccctcctcgctcgaccgactctataaatatatataaacctcgcgcagcgcagggcatgcatcgtctagagccatcctcttcttctagtctttttcctcgtgctgctgggcagggctgttgctccatccttccacgaccgccggcgctgctctgcctcgccgtaccgctttcccgacgaggcgtcccggccggatcgctcacatgggggtggcgatgaaactgcttgcacgagtccggaggcgcctcgtcccgctcctccgccgccaccggatggcgctgctcacggcgccggcggtggccgcgctgctgctgctcttctggtccgcggcgtacggcggtgacgcccaggaccagggcgtgccgccgccgtaccaggacgccagcaaggacgtggaggtccgcgtcagggacctgctcgcgcggatgacgctggccgagaaggtcggccagatgacgcagatagagcggatcgtcgcgtcgccgcaggcgctcagggactactacatcggcagcctgctcagcggcggcggcagcgtgccgcggaagcaggcgacggcggcggagtgggtcaccatggtcagcgacttccagaaggcgtgcctgtccacgcgcctcggcatcccgatgatctacggcatcgacgccgtccacggccacaacaacgtggatccaaacctggtgaagaggatcggcgccgcgaccgcgcttgaagtgagagccaccggcatccagtacgcgttcgcgccatgcattgcggtgtgccgtgatccgaggtggggccggtgctacgagagctacagcgaggaccaccgtatcgtgcaggccatgactgagctcatcccgggcctgcagggcgacgtcccgcagaacttcaccagcggcatgcccttcgccgccggaaaggacaaggtcgcggcgtgcgccaagcacttcgtcggcgacggtggcacgcagaacggcatcaacgagaacaacaccatcatcgaccagcagggcctgatgagcatccacatgccggcctacctggacgcgctccgcaagggcgtctccaccgtcatgatctcctactccagctggaacgggctcaagatgcacgccaaccacgacctcatcacaggcttcctcaagggcaggctcaacttccagggcttcacgatctcggattgggagggcatcgacaggatcaccagccctccaggggcgaactactcctactctgtgcaggcttcgattcttgctggcattgacatgatcatggtgcccaacaactaccaaaacttcatcaccatcctgacgggtcacgtcaacagcggcctgatcccgatgagcaggatcgacgacgccgtgactcggattctgcgcgtcaagttcaccatgggcctgttcgagaaccccatgccggaccccagcctcgcggaccagctggggaagcaggagcacagggacctggcgcgggaggcggtgcgcaagtcgctggtgctcctcaagaacggcaagccgggcgacgcgccgctgctgcccctgcccaagaaggccgccaggatcctggtcgcagggagccacgccgacaacctggggtaccagtgcggcgggtggacgatcgagtggcagggcgacacggggcgcaccaccgtcggcaccacggtcctggacgccgtgaaggcggccgtggacccgtcgacggaggtggtgttcgcggagagccccgacgccgagttcgtcaggagcggcggcttctcgtacgcgatcgtggccgtgggcgagcacccgtacacggagaccaagggcgacagcatgaacctgacgatcccggaccccgggccgagcaccgtacagacggtgtgcgccgccgtgcggtgcgtgaccgtgctcatcagcggccgccccgtggtgatacagccgttcctgggcgccatggacgcggtcgtggcggcctggctgccggggaccgagggccagggtgtcaccgacgtgctgttcggggactacgggttcacggggaagctgccgcggacgtggttcaggtcggtggaccagctgccgatgaactacggcgacgcgcactacgacccgctgttcccgctcgggttcgggctcaccacacagggcaagatgtaccagaactagaagaaggcggagcgaggggaaaggggtagtacttggtaaagataataggaaattgaattaagcagtgctctgccgaggaaacgtgaacctgtagttcttgtttccctcaattctatgtcgattaattttgatgtatgctcagttctcactgtggagtagcatccacacatgagccatctcattcttatatgataatcatgatttgattttgctca

SEQ ID NO: 5276 - DNA, 2505 bp, Zea Mays
gttcacgcgagttgggcatttgtgtgcgggagagggattccaacccgtcgcaacaaacgcattgaatcatcatcaccttccccccttcatagcctagcctcgtcacacgagcagtgctgccctgccgccgccggttctccgaagagcgccgccggggcatcgtgcctgtacttgcttcatataaccctcctgttcgtcctcgccgggctcacgcatttgtggttgtggcgcagcagggctcctccaccggtccagttcctctgcttccggtccggaggcgcctcgtcccgctcctccgccgccaccggatggcgctgctcacggcgccggcggtggccgcgctgctgctgctcttctggtccgcggcgtacggcggtgacgcccaggaccagggcgtgccgccgccgtaccaggacgccagcaaggacgtggaggtccgcgtcagggacctgctcgcgcggatgacgctggccgagaaggtcggccagatgacgcagatagagcggatcgtcgcgtcgccgcaggcgctcagggactactacatcggcagcctgctcagcggcggcggcagcgtgccgcggaagcaggcgacggcggcggagtgggtcaccatggtcagcgacttccagaaggcgtgcctgtccacgcgcctcggcatcccgatgatctacggcatcgacgccgtccacggccacaacaacgtgtacggcgccaccatcttcccccacaacgtcggcctcggagccaccagggatccaaacctggtgaagaggatcggcgccgcgaccgcgcttgaagtgagagccaccggcatccagtacgcgttcgcgccatgcattgcggtgtgccgtgatccgaggtggggccggtgctacgagagctacagcgaggaccaccgtatcgtgcaggccatgactgagctcatcccgggcctgcagggcgacgtcccgcagaacttcaccagcggcatgcccttcgccgccggaaaggacaaggtcgcggcgtgcgccaagcacttcgtcggcgacggtggcacgcagaacggcatcaacgagaacaacaccatcatcgaccagcagggcctgatgagcatccacatgccggcctacctggacgcgctccgcaagggcgtctccaccgtcatgatctcctactccagctggaacgggctcaagatgcacgccaaccacgacctcatcacaggcttcctcaagggcaggctcaacttccaggtgagaagaagaagaagcagatagatgcgttttttaaacgttaatcagacttggaagctgcctgtgtatttttacagggcttcacgatctcggattgggagggcatcgacaggatcaccagccctccaggggcgaactactcctactctgtgcaggcttcgattcttgctggcattgacatgatcatggtgcccaacaactaccaaaacttcatcaccatcctgacgggtcacgtcaacagcggcctgatcccgatgagcaggatcgacgacgccgtgactcggattctgcgcgtcaagttcaccatgggcctgttcgagaaccccatgccggaccccagcctcgcggaccagctggggaagcaggagcacagggacctggcgcgggaggcggtgcgcaagtcgctggtgctcctcaagaacggcaagccgggcgacgcgccgctgctgcccctgcccaagaaggccgccaggatcctggtcgcagggagccacgccgacaacctggggtaccagtgcggcgggtggacgatcgagtggcagggcgacacggggcgcaccaccgtcggcaccacggtcctggacgccgtgaaggcggccgtggacccgtcgacggaggtggtgttcgcggagagccccgacgccgagttcgtcaggagcggcggcttctcgtacgcgatcgtggccgtgggcgagcacccgtacacggagaccaagggcgacagcatgaacctgacgatcccggaccccgggccgagcaccgtacagacggtgtgcgccgccgtgcggtgcgtgaccgtgctcatcagcggccgccccgtggtgatacagccgttcctgggcgccatggacgcggtcgtggcggcctggctgccggggaccgagggccagggtgtcaccgacgtgctgttcggggactacgggttcacggggaagctgccgcggacgtggttcaggtcggtggaccagctgccgatgaactacggcgacgcgcactacgacccgctgttcccgctcgggttcgggctcaccacacagggcaagatgtaccagaactagaagaaggcggagcgaggggaaaggggtagtacttggtaaagataataggaaattgaattaagcagtgctctgccgaggaaacgtgaacctgtagttcttgtttccctcaattctatgtcgattaattttgatgtatgctcagttctcactgtggagtagcatccacacatgagccatctcattcttatatgataatcatgatttgattttgctca

SEQ ID NO: 5277 - DNA, 2325 bp, Zea Mays
gttcacgcgagttgggcatttgtgtgcgggagagggattccaacccgtcgcaacaaacgcattgaatcatcatcaccttccccccttcatagcctagcctcgtcacacgagcagtgctgccctgccgccgccggttctccgaagagcgccgccggggcatcgtgcctcagggctcctccaccggtccagttcctctgcttccggtgattgattggtccggaggcgcctcgtcccgctcctccgccgccaccggatggcgctgctcacggcgccggcggtggccgcgctgctgctgctcttctggtccgcggcgtacggcggtgacgcccaggaccagggcgtgccgccgccgtaccaggacgccagcaaggacgtggaggtccgcgtcagggacctgctcgcgcggatgacgctggccgagaaggtcggccagatgacgcagatagagcggatcgtcgcgtcgccgcaggcgctcagggactactacatcggcagcctgctcagcggcggcggcagcgtgccgcggaagcaggcgacggcggcggagtgggtcaccatggtcagcgacttccagaaggcgtgcctgtccacgcgcctcggcatcccgatgatctacggcatcgacgccgtccacggccacaacaacgtggatccaaacctggtgaagaggatcggcgccgcgaccgcgcttgaagtgagagccaccggcatccagtacgcgttcgcgccatgcattgcggtgtgccgtgatccgaggtggggccggtgctacgagagctacagcgaggaccaccgtatcgtgcaggccatgactgagctcatcccgggcctgcagggcgacgtcccgcagaacttcaccagcggcatgcccttcgccgccggaaaggacaaggtcgcggcgtgcgccaagcacttcgtcggcgacggtggcacgcagaacggcatcaacgagaacaacaccatcatcgaccagcagggcctgatgagcatccacatgccggcctacctggacgcgctccgcaagggcgtctccaccgtcatgatctcctactccagctggaacgggctcaagatgcacgccaaccacgacctcatcacaggcttcctcaagggcaggctcaacttccagggcttcacgatctcggattgggagggcatcgacaggatcaccagccctccaggggcgaactactcctactctgtgcaggcttcgattcttgctggcattgacatgatcatggtgcccaacaactaccaaaacttcatcaccatcctgacgggtcacgtcaacagcggcctgatcccgatgagcaggatcgacgacgccgtgactcggattctgcgcgtcaagttcaccatgggcctgttcgagaaccccatgccggaccccagcctcgcggaccagctggggaagcaggagcacagggacctggcgcgggaggcggtgcgcaagtcgctggtgctcctcaagaacggcaagccgggcgacgcgccgctgctgcccctgcccaagaaggccgccaggatcctggtcgcagggagccacgccgacaacctggggtaccagtgcggcgggtggacgatcgagtggcagggcgacacggggcgcaccaccgtcggcaccacggtcctggacgccgtgaaggcggccgtggacccgtcgacggaggtggtgttcgcggagagccccgacgccgagttcgtcaggagcggcggcttctcgtacgcgatcgtggccgtgggcgagcacccgtacacggagaccaagggcgacagcatgaacctgacgatcccggaccccgggccgagcaccgtacagacggtgtgcgccgccgtgcggtgcgtgaccgtgctcatcagcggccgccccgtggtgatacagccgttcctgggcgccatggacgcggtcgtggcggcctggctgccggggaccgagggccagggtgtcaccgacgtgctgttcggggactacgggttcacggggaagctgccgcggacgtggttcaggtcggtggaccagctgccgatgaactacggcgacgcgcactacgacccgctgttcccgctcgggttcgggctcaccacacagggcaagatgtaccagaactagaagaaggcggagcgaggggaaaggggtagtacttggtaaagataataggaaattgaattaagcagtgctctgccgaggaaacgtgaacctgtagttcttgtttccctcaattctatgtcgattaattttgatgtatgctcagttctcactgtggagtagcatccacacatgagccatctcattcttatatgataatcatgatttgattttgctca

SEQ ID NO: 5278 - DNA, 2169 bp, Zea Mays
gttagtttgcgtgttctggagtagatagtgctttgcaagctaatcgtttcgtattagcgtccggaggcgcctcgtcccgctcctccgccgccaccggatggcgctgctcacggcgccggcggtggccgcgctgctgctgctcttctggtccgcggcgtacggcggtgacgcccaggaccagggcgtgccgccgccgtaccaggacgccagcaaggacgtggaggtccgcgtcagggacctgctcgcgcggatgacgctggccgagaaggtcggccagatgacgcagatagagcggatcgtcgcgtcgccgcaggcgctcagggactactacatcggcagcctgctcagcggcggcggcagcgtgccgcggaagcaggcgacggcggcggagtgggtcaccatggtcagcgacttccagaaggcgtgcctgtccacgcgcctcggcatcccgatgatctacggcatcgacgccgtccacggccacaacaacgtggatccaaacctggtgaagaggatcggcgccgcgaccgcgcttgaagtgagagccaccggcatccagtacgcgttcgcgccatgcattgcggtgtgccgtgatccgaggtggggccggtgctacgagagctacagcgaggaccaccgtatcgtgcaggccatgactgagctcatcccgggcctgcagggcgacgtcccgcagaacttcaccagcggcatgcccttcgccgccggaaaggacaaggtcgcggcgtgcgccaagcacttcgtcggcgacggtggcacgcagaacggcatcaacgagaacaacaccatcatcgaccagcagggcctgatgagcatccacatgccggcctacctggacgcgctccgcaagggcgtctccaccgtcatgatctcctactccagctggaacgggctcaagatgcacgccaaccacgacctcatcacaggcttcctcaagggcaggctcaacttccagggcttcacgatctcggattgggagggcatcgacaggatcaccagccctccaggggcgaactactcctactctgtgcaggcttcgattcttgctggcattgacatgatcatggtgcccaacaactaccaaaacttcatcaccatcctgacgggtcacgtcaacagcggcctgatcccgatgagcaggatcgacgacgccgtgactcggattctgcgcgtcaagttcaccatgggcctgttcgagaaccccatgccggaccccagcctcgcggaccagctggggaagcaggagcacagggacctggcgcgggaggcggtgcgcaagtcgctggtgctcctcaagaacggcaagccgggcgacgcgccgctgctgcccctgcccaagaaggccgccaggatcctggtcgcagggagccacgccgacaacctggggtaccagtgcggcgggtggacgatcgagtggcagggcgacacggggcgcaccaccgtcggcaccacggtcctggacgccgtgaaggcggccgtggacccgtcgacggaggtggtgttcgcggagagccccgacgccgagttcgtcaggagcggcggcttctcgtacgcgatcgtggccgtgggcgagcacccgtacacggagaccaagggcgacagcatgaacctgacgatcccggaccccgggccgagcaccgtacagacggtgtgcgccgccgtgcggtgcgtgaccgtgctcatcagcggccgccccgtggtgatacagccgttcctgggcgccatggacgcggtcgtggcggcctggctgccggggaccgagggccagggtgtcaccgacgtgctgttcggggactacgggttcacggggaagctgccgcggacgtggttcaggtcggtggaccagctgccgatgaactacggcgacgcgcactacgacccgctgttcccgctcgggttcgggctcaccacacagggcaagatgtaccagaactagaagaaggcggagcgaggggaaaggggtagtacttggtaaagataataggaaattgaattaagcagtgctctgccgaggaaacgtgaacctgtagttcttgtttccctcaattctatgtcgattaattttgatgtatgctcagttctcactgtggagtagcatccacacatgagccatctcattcttatatgataatcatgatttgattttgctca

SEQ ID NO: 5279 - DNA, 2158 bp, Zea Mays
gttagtttgcgtgttctggagtagatagtgctttgcaagctaatcgtttcgtattagcgtccggaggcgcctcgtcccgctcctccgccgccaccggatggcgctgctcacggcgccggcggtggccgcgctgctgctgctcttctggtccgcggcgtacggcggtgacgcccaggaccagggcgtgccgccgccgtaccaggacgccagcaaggacgtggaggtccgcgtcagggacctgctcgcgcggatgacgctggccgagaaggtcggccagatgacgcagatagagcggatcgtcgcgtcgccgcaggcgctcagggactactacatcggcagcctgctcagcggcggcggcagcgtgccgcggaagcaggcgacggcggcggagtgggtcaccatggtcagcgacttccagaaggcgtgcctgtccacgcgcctcggcatcccgatgatctacggcatcgacgccgtccacggccacaacaacgtgtacggcgccaccatcttcccccacaacgtcggcctcggagccaccagggatccaaacctggtgaagaggatcggcgccgcgaccgcgcttgaagtgagagccaccggcatccagtacgcgttcgcgccatgcattgcggtgtgccgtgatccgaggtggggccggtgctacgagagctacagcgaggaccaccgtatcgtgcaggccatgactgagctcatcccgggcctgcagggcgacgtcccgcagaacttcaccagcggcatgcccttcgccgccggaaaggacaaggtcgcggcgtgcgccaagcacttcgtcggcgacggtggcacgcagaacggcatcaacgagaacaacaccatcatcgaccagcagggcctgatgagcatccacatgccggcctacctggacgcgctccgcaagggcgtctccaccgtcatgatctcctactccagctggaacgggctcaagatgcacgccaaccacgacctcatcacaggcttcctcaagggcaggctcaacttccagggcttcacgatctcggattgggagggcatcgacaggatcaccagccctccaggggcgaactactcctactctgtgcaggcttcgattcttgctggcattgacatgcggcctgatcccgatgagcaggatcgacgacgccgtgactcggattctgcgcgtcaagttcaccatgggcctgttcgagaaccccatgccggaccccagcctcgcggaccagctggggaagcaggagcacagggacctggcgcgggaggcggtgcgcaagtcgctggtgctcctcaagaacggcaagccgggcgacgcgccgctgctgcccctgcccaagaaggccgccaggatcctggtcgcagggagccacgccgacaacctggggtaccagtgcggcgggtggacgatcgagtggcagggcgacacggggcgcaccaccgtcggcaccacggtcctggacgccgtgaaggcggccgtggacccgtcgacggaggtggtgttcgcggagagccccgacgccgagttcgtcaggagcggcggcttctcgtacgcgatcgtggccgtgggcgagcacccgtacacggagaccaagggcgacagcatgaacctgacgatcccggaccccgggccgagcaccgtacagacggtgtgcgccgccgtgcggtgcgtgaccgtgctcatcagcggccgccccgtggtgatacagccgttcctgggcgccatggacgcggtcgtggcggcctggctgccggggaccgagggccagggtgtcaccgacgtgctgttcggggactacgggttcacggggaagctgccgcggacgtggttcaggtcggtggaccagctgccgatgaactacggcgacgcgcactacgacccgctgttcccgctcgggttcgggctcaccacacagggcaagatgtaccagaactagaagaaggcggagcgaggggaaaggggtagtacttggtaaagataataggaaattgaattaagcagtgctctgccgaggaaacgtgaacctgtagttcttgtttccctcaattctatgtcgattaattttgatgtatgctcagttctcactgtggagtagcatccacacatgagccatctcattcttatatgataatcatgatttgattttgctca

SEQ ID NO: 5280 - DNA, 815 bp, Zea Mays
gctgtgcagctatccactctccagtgctccacgctctccaattctctctcgaccgcggcatggccgccggcctctcattcccccgcgccggggccccgttcatcctcctccgcacctcctgtttctctccgtgggcagctctggtgccccgccgtcgacttctctctgggcctcccactgccggtgatcccccgcccccggcgctcccgccaacttcgaagctcgccgccccgccggttgtgggaacgccggagcccccgctgccgtttagggccgtggaggcggagatccttcgcgatattgaccccgtcgtcctgctcatcaaggatatcctccactccgatagatacggggatggcgaatgtctctgcccaagggacgaaaatgtcgtcgtggagaagctcctctcctaccatccacgcgcgcaggacaaaattgggtgtggacttgacgctataatggcaccctgagttcagaaagtcaagatgcctcttcgttgttcgaacagacggtgtttggattgatttctcataccagaagtgcctccgtgcatacatccgggaaaagtacccgtctcatgccgacagatttatacgagaacatttcaagcgaacatgaagcaaacccaaaagtaatttgaatacattgtatttttatgagttttggcatagtttatgtacatcattgaccctcaaagcctgttggtctattcatcgctttcctagcacgcgcgtgtatgactggaatctagagcgcacctttgcaaaaaaaagtataaaggaatgcatgcaaggttaataaattgtccagagaag

SEQ ID NO: 5281 - DNA, 223 bp, Zea Mays
cccacccccgcttcgtctctcatgccccaaagcaaagcaaagcttcaaagcatctctgctaggattttagcgagcggcaacgacgagcgacccaaaaaagcaatcattagtcaccatatctggtcctctcgctccacccccctcctctgcgacttgaggcaggacaggaggcacagacgtgcaatgggacaaaaccagcaccaaaattcgcagaacaaacagt

SEQ ID NO: 5282 - DNA, 4883 bp, Zea Mays
cttgctttcgcacacctcaatctgtgccggacgcgaccaaattcgaaattgcccaacgtctcgcctctcgcgacctccgctccccatttcaaaccgaaaggtccgaaaccccatctcgaccccgttctgccgtatctccgatccgcctccgccgccgtctcccctgcccaggcgccggaagtccacctcgggctccagcatatccgcgatgcatctggacggcgtcgacgacgagctcggaggcggcagctgcgccccctcccccgcgcgctttgagctccaagaggatccttccttctggaaggacaacaatgtgcaggttgcgatccgtatccggccgctgagcggcagtgaggtgtcgatgcaggggcagaagcggtgcgtcaggcaggatagtagccagagccttacctggattggacaccccgagtccaggttcactttcgatcttgtcgctgacgaacatgtcacgcaggagggcatgttcaatgttgccggggtgcccatggtggagaactgcatagctggctataacagctgcatgtttgcttacgggcagactggaagcggaaaaacacatacaatgcttggtgacatagaaaatggaacacggaggaacaatgtgaattgtggtataactcctcgagtgtttgagcatctctttgtaaggatccaaaaggaaaaagaattaaggagagatgaaaagctcatgtttacttgtaaatgctcatttttggagatttataatgagcagattctggatctgctcaacccaaattctgtaaacttgcagataagggaggatgccagaaagggtatacatgttgagaatttgacggaacatgaaatctccaatgctcgagaagcgctgcaacaacttattgagggagcagcaaacagaaaggtagcagccaccaatatgaaccgagcaagtagccgctctcatagtgttttcacctgccttatagaaagtaagtgggagtcacaaggtatcaagcaccaccgcttttctcgactcaaccttgttgaccttgcgggctcagagaggcaaaagagctcaggtgctgaaggggagcgattgaaggaagctaccaacatcaacaaatcactatcaactttgggacttgtcattacgaacctaattgctgtgtcaaacaaaaagtcacagcatgttccatacagagattcaaaattaacattcctcctccaggattcccttggaggaaattcaaaaacgaccataattgcaaacataagcccatccagctgttgtgctgctgagacattaagcacattgaaattcgcgcaacgagctaaatatataaggaataatgctataattaatgaggatgcttctggtgatgttcttagcatgcgtttacagatccagaaccttaagaaagtaatcagccgtttgcaaggacaattgggttctgataaaacagaaagcattgcctctcatgggtttgtctgcgagtcccctagcacattcaaatgggatcagggtcatggcatgttcactccacttacttttgataaaagggctacacagaggaacgattgtgatgctgcccttgtcgctgcttttaggagggaacaagagaaggaagcacaattgaaggcagtaatagatgcaaagcagactgctgaacagctggtagctcaaaagacagaagaggtaagaagtttcaagatgaggcttaagtttcgtgaagaacggatcaaaagattggagcaggttgcttcagggaagttatctgctgaagcacatcttttgcaagagaaggaaaaccttgtaaaggaattagaggtcctgcggggtcaattagatcgtaatccagaaattacaaaatttgcaatggagaatctacaattaaaggaagagctacgaaggttgcagtcatttgttgatgaaggtgaacgagaaatgatgcatgagcaaatcattgttttacaagataagctgcttgaggcacttgactggaagcttatgaatgagaaggaacctattaacaagggtctctcattatttggggagtcagctggcgatgaggaaaatgagtttcttcgtttgcaggctattcaaaatgagagagaaattgagtcgttgcgtaaaaaaatgacattctgccttgaagcaaaagataatcttgaaaggcatgtcaatgagttgaccacagagttggagcttacaaagaaacacaacaacacatataaagagttcaaggctgcccagctccaggagcaaggagaagcagatttacataacttgtctgacgctcagatggaacttaagactttggttgatgcaatagcttctgcgagtcaacgggaggcagaagctcatgaaactgctatcggtttggccaaagagaatgaagaattgaggctgcagcttaaggttttgattgaggataacaagagattggttgagctctatgaacacactgttgtcaatgttgaggcaaatcaagatggaaaccctgtagatgatctgttgaatgcccaaccagcagccacatcagatttccatgcacataactcatctagtgtggcacaggagtctaagatagtagacgaaaaatgcaccaatgaggacaatttctcaagagttacatctgttgaattgcgtcttcagctggaggagatgcatgaggaaaatgatagacttatggggttgtatgagaaagctatgcaggaaagagatgaattcaaacggaaaattttagagcaaagcgactctgaagctgtaaaacatattcagttggacgagaaagatgtcgaaatgagtgaagcagctgagaatcctgaagtgaaacatattcatgactccacaattgcagctttgaaagaagtgctgcagattgttcggagtaagttggagcttgtccaagataaggttgtgtctgctcaggatgcagtaaaatattttaaggcactcgaaatagctagtggtaaggccgaagaactttctgcaagaattgagcttcagcgtctaggtgcgcagcgtggtcaggaagaaatcactttcctgaagtctgtgctatcagaatcacagaagaagaaaaatgcttttgaaggcaagtatttcttgcctgcagcatcatgttggaacttggttttgaagaccaaaagtcttgcggagtccaagtttgatgccagctttggatcaatgaatcagaagaaagaacagttgaatcatctccaaactcgcaaaattgaactatctgctgcaagaacgagagcacgtgaatctgaaactgagttgaaaagcaaaattgatggccttaaagcgaaacttcgcgctcatgaagctcaaagaaaggaggaagaaaaggtcctgtttgctattgataacctggatacttccactacactaatgcataaacccaagaactatggcaaggcaaccgacctgctgaaatctgaggaggatcggatgaagcttctgtgtgaactacagaaggcccgcgaacagcgctccatggtacataaggaaataagaagcatgaatgagtgtgattatattgatcgtgagattggagtccttgaagcagaaatagaggattcctgcatctccatactggaaactgacattgagaagtttgtccgtgacaacactttagcagagatttgggagggtagcgcaaaggatctggaggcattgctggtcgattaccaagactgtgttttccaagtcaacttgaaggaggaagagatcaaggtgtgcagtgagtccttgcagtatcaagccagggacatggataaacttcagtcgaagctgaaccaagcgatccgggagctgggtgagcttctgcaagatagaagaagcctaaccgcttgcagtctggatgaacccacgctgcccgttggtgaaaaggtgtgccagccggcggcaacctgtgcggggagcgccaagggctccaggaaagaatcggcggcgggctcgcgatcgggaaggggagcggggcgcatgcgcgagcactggcacggcgacggcgacggcgacggcgaggacgagcatgagccccagccggggtgcggggagggcgcggggcaggcggcggcgaactgcgcggcggtgtgctgctgctgcccgctggcgctgctcgacgtgctgctgctcgtcaccgtccggctccccgcgggcgtcatgcggcgggtgaggaggaggcgccggcgccgccgcggccacggaggtgccggagccaaccggaagaggccggcgcccgcgtcgccttcgggaagcagcggcaaggcgatgatcggagcggcgacgctagacatcgacgaggaggcgcgcggcgaggtggagtcggcggcggcggcggagctggagcgcgagatcatgagctcgcacttctacggcgccggcttctggcgcagcgtctcctccaactccagctcctcgtccaggcgctaccaatagatgcgcgttctggcgtaaatagtgagcactcggtcgctactaaactacccacgattactccatctgttcttggagtctcctccaactgccagtcagcgcagcatgcatggcaaaaggagcagcagccttcggcatcgtgcaagtgcacttattctgaatggacacgtgcgaaactggcacgtgcgggttgcatcattgtactgctacgccattgtctcgagcatggaccacgccagcagctgcagcttgggatggagaagcgaaaggggtcagtgattgtgcttaggtttttcatctctctcctaatcttttttgtgtaactggagcaggaaatgctgaaacctcaagcttctgtccaaacgatgtactcctatttagtattattgattgattgagaggccgatcgataacaaatgaacaaatagaacactgttcatgacgcagtgcttttttt

SEQ ID NO: 5283 - DNA, 5479 bp, Zea Mays
cctcaatctgtgccggacgcgaccaaattcgaaattgcccaacgtctcgcctctcgcgacctccgctccccatttcaaaccgaaaggtccgaaaccccatctcgaccccgttctgccgtatctccgatccgcctccgccgccgtctcccctgcccaggcgccggaagtccacctcgggctccagcatatccgcgatgcatctggacggcgtcgacgacgagctcggaggcggcagctgcgccccctcccccgcgcgctttgagctccaagaggatccttccttctggaaggacaacaatgtgcaggttgcgatccgtatccggccgctgagcggcagtgaggtgtcgatgcaggggcagaagcggtgcgtcaggcaggatagtagccagagccttacctggattggacaccccgagtccaggttcactttcgatcttgtcgctgacgaacatgtcacgcaggagggcatgttcaatgttgccggggtgcccatggtggagaactgcatagctggctataacagctgcatgtttgcttacgggcagactggaagcggaaaaacacatacaatgcttggtgacatagaaaatggaacacggaggaacaatgtgaattgtggtataactcctcgagtgtttgagcatctctttgtaaggatccaaaaggaaaaagaattaaggagagatgaaaagctcatgtttacttgtaaatgctcatttttggagatttataatgagcagattctggatctgctcaacccaaattctgtaaacttgcagataagggaggatgccagaaagggtatacatgttgagaatttgacggaacatgaaatctccaatgctcgagaagcgctgcaacaacttattgagggagcagcaaacagaaaggtagcagccaccaatatgaaccgagcaagtagccgctctcatagtgttttcacctgccttatagaaagtaagtgggagtcacaaggtatcaagcaccaccgcttttctcgactcaaccttgttgaccttgcgggctcagagaggcaaaagagctcaggtgctgaaggggagcgattgaaggaagctaccaacatcaacaaatcactatcaactttgggacttgtcattacgaacctaattgctgtgtcaaacaaaaagtcacagcatgttccatacagagattcaaaattaacattcctcctccaggattcccttggaggaaattcaaaaacgaccataattgcaaacataagcccatccagctgttgtgctgctgagacattaagcacattgaaattcgcgcaacgagctaaatatataaggaataatgctataattaatgaggatgcttctggtgatgttcttagcatgcgtttacagatccagaaccttaagaaagtaatcagccgtttgcaaggacaattgggttctgataaaacagaaagcattgcctctcatgggtttgtctgcgagtcccctagcacattcaaatgggatcagggtcatggcatgttcactccacttacttttgataaaagggctacacagaggaacgattgtgatgctgcccttgtcgctgcttttaggagggaacaagagaaggaagcacaattgaaggcagtaatagatgcaaagcagactgctgaacagctggtagctcaaaagacagaagaggtaagaagtttcaagatgaggcttaagtttcgtgaagaacggatcaaaagattggagcaggttgcttcagggaagttatctgctgaagcacatcttttgcaagagaaggaaaaccttgtaaaggaattagaggtcctgcggggtcaattagatcgtaatccagaaattacaaaatttgcaatggagaatctacaattaaaggaagagctacgaaggttgcagtcatttgttgatgaaggtgaacgagaaatgatgcatgagcaaatcattgttttacaagataagctgcttgaggcacttgactggaagcttatgaatgagaaggaacctattaacaagggtctctcattatttggggagtcagctggcgatgaggaaaatgagtttcttcgtttgcaggctattcaaaatgagagagaaattgagtcgttgcgtaaaaaaatgacattctgccttgaagcaaaagataatcttgaaaggcatgtcaatgagttgaccacagagttggagcttacaaagaaacacaacaacacatataaagagttcaaggctgcccagctccaggagcaaggagaagcagatttacataacttgtctgacgctcagatggaacttaagactttggttgatgcaatagcttctgcgagtcaacgggaggcagaagctcatgaaactgctatcggtttggccaaagagaatgaagaattgaggctgcagcttaaggttttgattgaggataacaagagattggttgagctctatgaacacactgttgtcaatgttgaggcaaatcaagatggaaaccctgtagatgatctgttgaatgcccaaccagcagccacatcagatttccatgcacataactcatctagtgtggcacaggagtctaagatagtagacgaaaaatgcaccaatgaggacaatttctcaagagttacatctgttgaattgcgtcttcagctggaggagatgcatgaggaaaatgatagacttatggggttgtatgagaaagctatgcaggaaagagatgaattcaaacggaaaattttagagcaaagcgactctgaagctgtaaaacatattcagttggacgagaaagatgtcgaaatgagtgaagcagctgagaatcctgaagtgaaacatattcatgactccacaattgcagctttgaaagaagtgctgcagattgttcggagtaagttggagcttgtccaagataaggttgtgtctgctcaggatgcagtaaaatattttaaggcactcgaaatagctagtggtaaggccgaagaactttctgcaagaattgagcttcagcgtctaggtgcgcagcgtggtcaggaagaaatcactttcctgaagtctgtgctatcagaatcacagaagaagaaaaatgcttttgaaggcaagtatttcttgcctgcagcatcatgttggaacttggttttgaagaccaaaagtcttgcggagtccaagtttgatgccagctttggatcaatgaatcagaagaaagaacagttgaatcatctccaaactcgcaaaattgaactatctgctgcaagaacgagagcacgtgaatctgaaactgagttgaaaagcaaaattgatggccttaaagcgaaacttcgcgctcatgaagctcaaagaaaggaggaagaaaaggtcctgtttgctattgataacctggatacttccactacactaatgcataaacccaagaactatggcaaggcaaccgacctgctgaaatctgaggaggatcggatgaagcttctgtgtgaactacagaaggcccgcgaacagcgctccatggtacataaggaaataagaagcatgaatgagtgtgattatattgatcgtgagattggagtccttgaagcagaaatagaggattcctgcatctccatactggaaactgacattgagaagtttgtccgtgacaacactttagcagagatttgggagggtagcgcaaaggatctggaggcattgctggtcgattaccaagactgtgttttccaagtcaacttgaaggaggaagagatcaaggtgtgcagtgagtccttgcagtatcaagccagggacatggataaacttcagtcgaagctgaaccaagcgatccgggagctgggtgagcttctgcaagatagaagaagcctaaccgcttgcagtctggatgaacccacgctgcccgttggtgaaaaggtggcagcagaccttgaggccgtccggattcatgtcgatgaagctaagcagcttttgattctcgacaaccaagctaattcatgaacctgcgcagctagtttcaggtcccttataaagatgcgacgagtgacaggctagtctgtcttggcttctgctgttcagatccttagtacgtagtagcaagacatcagagatgggaagctgcggaatttgcttcattagttggaagctatctgaagccgaatctgctgattcttttttccgtggatcagctaccttcttctggtggtcttgcttcgagtcaaaacaacaggtcctgcaagccactgttccggatccgatttctcctctggtgtacacttcaagatggagcggagaaactgatccgacttaggcttgaccttttgcttctgtaactctccagagactggtagcaactagcaaccagtgggtggacttgtatcacaacttaatctgagccaggtgtcttattttatttatgctataagtgcacaaatgctgcactccagtttcttgtagaaattttcgggctgatcttgaattttacctgctgaagagtttccgtgttctgctgctgtactgtaaacaggtgtgccagccggcggcaacctgtgcggggagcgccaagggctccaggaaagaatcggcggcgggctcgcgatcgggaaggggagcggggcgcatgcgcgagcactggcacggcgacggcgacggcgacggcgaggacgagcatgagccccagccggggtgcggggagggcgcggggcaggcggcggcgaactgcgcggcggtgtgctgctgctgcccgctggcgctgctcgacgtgctgctgctcgtcaccgtccggctccccgcgggcgtcatgcggcgggtgaggaggaggcgccggcgccgccgcggccacggaggtgccggagccaaccggaagaggccggcgcccgcgtcgccttcgggaagcagcggcaaggcgatgatcggagcggcgacgctagacatcgacgaggaggcgcgcggcgaggtggagtcggcggcggcggcggagctggagcgcgagatcatgagctcgcacttctacggcgccggcttctggcgcagcgtctcctccaactccagctcctcgtccaggcgctaccaatagatgcgcgttctggcgtaaatagtgagcactcggtcgctactaaactacccacgattactccatctgttcttggagtctcctccaactgccagtcagcgcagcatgcatggcaaaaggagcagcagccttcggcatcgtgcaagtgcacttattctgaatggacacgtgcgaaactggcacgtgcgggttgcatcattgtactgctacgccattgtctcgagcatggaccacgccagcagctgcagcttgggatggagaagcgaaaggggtcagtgattgtgcttaggtttttcatctctctcctaatcttttttgtgtaactggagcaggaaatgctgaaacctcaagcttctgtccaaacgatgtactcctatttagtattattgattgattgagaggccgatcgataacaaatgaacaaatagaacactgttcatgacgcagtgcttttttt

SEQ ID NO: 5284 - DNA, 4851 bp, Zea Mays
caatctgtgccggacgcgaccaaattcgaaattgcccaacgtctcgcctctcgcgacctccgctccccatttcaaaccgaaaggtccgaaaccccatctcgaccccgttctgccgtatctccgatccgcctccgccgccgtctcccctgcccaggcgccggaagtccacctcgggctccagcatatccgcgatgcatctggacggcgtcgacgacgagctcggaggcggcagctgcgccccctcccccgcgcgctttgagctccaagaggatccttccttctggaaggacaacaatgtgcaggttgcgatccgtatccggccgctgagcggcagtgaggtgtcgatgcaggggcagaagcggtgcgtcaggcaggatagtagccagagccttacctggattggacaccccgagtccaggttcactttcgatcttgtcgctgacgaacatgtcacgcaggagggcatgttcaatgttgccggggtgcccatggtggagaactgcatagctggctataacagctgcatgtttgcttacgggcagactggaagcggaaaaacacatacaatgcttggtgacatagaaaatggaacacggaggaacaatgtgaattgtggtataactcctcgagtgtttgagcatctctttgaaaaagaattaaggagagatgaaaagctcatgtttacttgtaaatgctcatttttggagatttataatgagcagattctggatctgctcaacccaaattctgtaaacttgcagataagggaggatgccagaaagggtatacatgttgagaatttgacggaacatgaaatctccaatgctcgagaagcgctgcaacaacttattgagggagcagcaaacagaaaggtagcagccaccaatatgaaccgagcaagtagccgctctcatagtgttttcacctgccttatagaaagtaagtgggagtcacaaggtatcaagcaccaccgcttttctcgactcaaccttgttgaccttgcgggctcagagaggcaaaagagctcaggtgctgaaggggagcgattgaaggaagctaccaacatcaacaaatcactatcaactttgggacttgtcattacgaacctaattgctgtgtcaaacaaaaagtcacagcatgttccatacagagattcaaaattaacattcctcctccaggattcccttggaggaaattcaaaaacgaccataattgcaaacataagcccatccagctgttgtgctgctgagacattaagcacattgaaattcgcgcaacgagctaaatatataaggaataatgctataattaatgaggatgcttctggtgatgttcttagcatgcgtttacagatccagaaccttaagaaagtaatcagccgtttgcaaggacaattgggttctgataaaacagaaagcattgcctctcatgggtttgtctgcgagtcccctagcacattcaaatgggatcagggtcatggcatgttcactccacttacttttgataaaagggctacacagaggaacgattgtgatgctgcccttgtcgctgcttttaggagggaacaagagaaggaagcacaattgaaggcagtaatagatgcaaagcagactgctgaacagctggtagctcaaaagacagaagaggtaagaagtttcaagatgaggcttaagtttcgtgaagaacggatcaaaagattggagcaggttgcttcagggaagttatctgctgaagcacatcttttgcaagagaaggaaaaccttgtaaaggaattagaggtcctgcggggtcaattagatcgtaatccagaaattacaaaatttgcaatggagaatctacaattaaaggaagagctacgaaggttgcagtcatttgttgatgaaggtgaacgagaaatgatgcatgagcaaatcattgttttacaagataagctgcttgaggcacttgactggaagcttatgaatgagaaggaacctattaacaagggtctctcattatttggggagtcagctggcgatgaggaaaatgagtttcttcgtttgcaggctattcaaaatgagagagaaattgagtcgttgcgtaaaaaaatgacattctgccttgaagcaaaagataatcttgaaaggcatgtcaatgagttgaccacagagttggagcttacaaagaaacacaacaacacatataaagagttcaaggctgcccagctccaggagcaaggagaagcagatttacataacttgtctgacgctcagatggaacttaagactttggttgatgcaatagcttctgcgagtcaacgggaggcagaagctcatgaaactgctatcggtttggccaaagagaatgaagaattgaggctgcagcttaaggttttgattgaggataacaagagattggttgagctctatgaacacactgttgtcaatgttgaggcaaatcaagatggaaaccctgtagatgatctgttgaatgcccaaccagcagccacatcagatttccatgcacataactcatctagtgtggcacaggagtctaagatagtagacgaaaaatgcaccaatgaggacaatttctcaagagttacatctgttgaattgcgtcttcagctggaggagatgcatgaggaaaatgatagacttatggggttgtatgagaaagctatgcaggaaagagatgaattcaaacggaaaattttagagcaaagcgactctgaagctgtaaaacatattcagttggacgagaaagatgtcgaaatgagtgaagcagctgagaatcctgaagtgaaacatattcatgactccacaattgcagctttgaaagaagtgctgcagattgttcggagtaagttggagcttgtccaagataaggttgtgtctgctcaggatgcagtaaaatattttaaggcactcgaaatagctagtggtaaggccgaagaactttctgcaagaattgagcttcagcgtctaggtgcgcagcgtggtcaggaagaaatcactttcctgaagtctgtgctatcagaatcacagaagaagaaaaatgcttttgaaggcaagtatttcttgcctgcagcatcatgttggaacttggttttgaagaccaaaagtcttgcggagtccaagtttgatgccagctttggatcaatgaatcagaagaaagaacagttgaatcatctccaaactcgcaaaattgaactatctgctgcaagaacgagagcacgtgaatctgaaactgagttgaaaagcaaaattgatggccttaaagcgaaacttcgcgctcatgaagctcaaagaaaggaggaagaaaaggtcctgtttgctattgataacctggatacttccactacactaatgcataaacccaagaactatggcaaggcaaccgacctgctgaaatctgaggaggatcggatgaagcttctgtgtgaactacagaaggcccgcgaacagcgctccatggtacataaggaaataagaagcatgaatgagtgtgattatattgatcgtgagattggagtccttgaagcagaaatagaggattcctgcatctccatactggaaactgacattgagaagtttgtccgtgacaacactttagcagagatttgggagggtagcgcaaaggatctggaggcattgctggtcgattaccaagactgtgttttccaagtcaacttgaaggaggaagagatcaaggtgtgcagtgagtccttgcagtatcaagccagggacatggataaacttcagtcgaagctgaaccaagcgatccgggagctgggtgagcttctgcaagatagaagaagcctaaccgcttgcagtctggatgaacccacgctgcccgttggtgaaaaggtgtgccagccggcggcaacctgtgcggggagcgccaagggctccaggaaagaatcggcggcgggctcgcgatcgggaaggggagcggggcgcatgcgcgagcactggcacggcgacggcgacggcgacggcgaggacgagcatgagccccagccggggtgcggggagggcgcggggcaggcggcggcgaactgcgcggcggtgtgctgctgctgcccgctggcgctgctcgacgtgctgctgctcgtcaccgtccggctccccgcgggcgtcatgcggcgggtgaggaggaggcgccggcgccgccgcggccacggaggtgccggagccaaccggaagaggccggcgcccgcgtcgccttcgggaagcagcggcaaggcgatgatcggagcggcgacgctagacatcgacgaggaggcgcgcggcgaggtggagtcggcggcggcggcggagctggagcgcgagatcatgagctcgcacttctacggcgccggcttctggcgcagcgtctcctccaactccagctcctcgtccaggcgctaccaatagatgcgcgttctggcgtaaatagtgagcactcggtcgctactaaactacccacgattactccatctgttcttggagtctcctccaactgccagtcagcgcagcatgcatggcaaaaggagcagcagccttcggcatcgtgcaagtgcacttattctgaatggacacgtgcgaaactggcacgtgcgggttgcatcattgtactgctacgccattgtctcgagcatggaccacgccagcagctgcagcttgggatggagaagcgaaaggggtcagtgattgtgcttaggtttttcatctctctcctaatcttttttgtgtaactggagcaggaaatgctgaaacctcaagcttctgtccaaacgatgtactcctatttagtattattgattgattgagaggccgatcgataacaaatgaacaaatagaacactgttcatgacgcagtgcttttttt

SEQ ID NO: 5285 - DNA, 5417 bp, Zea Mays
cgcctctcgcgacctccgctccccatttcaaaccgaaaggtccgaaaccccatctcgaccccgttctgccgtatctccgatccgcctccgccgccgtctcccctgcccaggcgccggaagtccacctcgggctccagcatatccgcgatgcatctggacggcgtcgacgacgagctcggaggcggcagctgcgccccctcccccgcgcgctttgagctccaagaggatccttccttctggaaggacaacaatgtgcaggttgcgatccgtatccggccgctgagcggcagtgaggtgtcgatgcaggggcagaagcggtgcgtcaggcaggatagtagccagagccttacctggattggacaccccgagtccaggttcactttcgatcttgtcgctgacgaacatgtcacgcaggagggcatgttcaatgttgccggggtgcccatggtggagaactgcatagctggctataacagctgcatgtttgcttacgggcagactggaagcggaaaaacacatacaatgcttggtgacatagaaaatggaacacggaggaacaatgtgaattgtggtataactcctcgagtgtttgagcatctctttgaaaaagaattaaggagagatgaaaagctcatgtttacttgtaaatgctcatttttggagatttataatgagcagattctggatctgctcaacccaaattctgtaaacttgcagataagggaggatgccagaaagggtatacatgttgagaatttgacggaacatgaaatctccaatgctcgagaagcgctgcaacaacttattgagggagcagcaaacagaaaggtagcagccaccaatatgaaccgagcaagtagccgctctcatagtgttttcacctgccttatagaaagtaagtgggagtcacaaggtatcaagcaccaccgcttttctcgactcaaccttgttgaccttgcgggctcagagaggcaaaagagctcaggtgctgaaggggagcgattgaaggaagctaccaacatcaacaaatcactatcaactttgggacttgtcattacgaacctaattgctgtgtcaaacaaaaagtcacagcatgttccatacagagattcaaaattaacattcctcctccaggattcccttggaggaaattcaaaaacgaccataattgcaaacataagcccatccagctgttgtgctgctgagacattaagcacattgaaattcgcgcaacgagctaaatatataaggaataatgctataattaatgaggatgcttctggtgatgttcttagcatgcgtttacagatccagaaccttaagaaagtaatcagccgtttgcaaggacaattgggttctgataaaacagaaagcattgcctctcatgggtttgtctgcgagtcccctagcacattcaaatgggatcagggtcatggcatgttcactccacttacttttgataaaagggctacacagaggaacgattgtgatgctgcccttgtcgctgcttttaggagggaacaagagaaggaagcacaattgaaggcagtaatagatgcaaagcagactgctgaacagctggtagctcaaaagacagaagaggtaagaagtttcaagatgaggcttaagtttcgtgaagaacggatcaaaagattggagcaggttgcttcagggaagttatctgctgaagcacatcttttgcaagagaaggaaaaccttgtaaaggaattagaggtcctgcggggtcaattagatcgtaatccagaaattacaaaatttgcaatggagaatctacaattaaaggaagagctacgaaggttgcagtcatttgttgatgaaggtgaacgagaaatgatgcatgagcaaatcattgttttacaagataagctgcttgaggcacttgactggaagcttatgaatgagaaggaacctattaacaagggtctctcattatttggggagtcagctggcgatgaggaaaatgagtttcttcgtttgcaggctattcaaaatgagagagaaattgagtcgttgcgtaaaaaaatgacattctgccttgaagcaaaagataatcttgaaaggcatgtcaatgagttgaccacagagttggagcttacaaagaaacacaacaacacatataaagagttcaaggctgcccagctccaggagcaaggagaagcagatttacataacttgtctgacgctcagatggaacttaagactttggttgatgcaatagcttctgcgagtcaacgggaggcagaagctcatgaaactgctatcggtttggccaaagagaatgaagaattgaggctgcagcttaaggttttgattgaggataacaagagattggttgagctctatgaacacactgttgtcaatgttgaggcaaatcaagatggaaaccctgtagatgatctgttgaatgcccaaccagcagccacatcagatttccatgcacataactcatctagtgtggcacaggagtctaagatagtagacgaaaaatgcaccaatgaggacaatttctcaagagttacatctgttgaattgcgtcttcagctggaggagatgcatgaggaaaatgatagacttatggggttgtatgagaaagctatgcaggaaagagatgaattcaaacggaaaattttagagcaaagcgactctgaagctgtaaaacatattcagttggacgagaaagatgtcgaaatgagtgaagcagctgagaatcctgaagtgaaacatattcatgactccacaattgcagctttgaaagaagtgctgcagattgttcggagtaagttggagcttgtccaagataaggttgtgtctgctcaggatgcagtaaaatattttaaggcactcgaaatagctagtggtaaggccgaagaactttctgcaagaattgagcttcagcgtctaggtgcgcagcgtggtcaggaagaaatcactttcctgaagtctgtgctatcagaatcacagaagaagaaaaatgcttttgaaggcaagtatttcttgcctgcagcatcatgttggaacttggttttgaagaccaaaagtcttgcggagtccaagtttgatgccagctttggatcaatgaatcagaagaaagaacagttgaatcatctccaaactcgcaaaattgaactatctgctgcaagaacgagagcacgtgaatctgaaactgagttgaaaagcaaaattgatggccttaaagcgaaacttcgcgctcatgaagctcaaagaaaggaggaagaaaaggtcctgtttgctattgataacctggatacttccactacactaatgcataaacccaagaactatggcaaggcaaccgacctgctgaaatctgaggaggatcggatgaagcttctgtgtgaactacagaaggcccgcgaacagcgctccatggtacataaggaaataagaagcatgaatgagtgtgattatattgatcgtgagattggagtccttgaagcagaaatagaggattcctgcatctccatactggaaactgacattgagaagtttgtccgtgacaacactttagcagagatttgggagggtagcgcaaaggatctggaggcattgctggtcgattaccaagactgtgttttccaagtcaacttgaaggaggaagagatcaaggtgtgcagtgagtccttgcagtatcaagccagggacatggataaacttcagtcgaagctgaaccaagcgatccgggagctgggtgagcttctgcaagatagaagaagcctaaccgcttgcagtctggatgaacccacgctgcccgttggtgaaaaggtggcagcagaccttgaggccgtccggattcatgtcgatgaagctaagcagcttttgattctcgacaaccaagctaattcatgaacctgcgcagctagtttcaggtcccttataaagatgcgacgagtgacaggctagtctgtcttggcttctgctgttcagatccttagtacgtagtagcaagacatcagagatgggaagctgcggaatttgcttcattagttggaagctatctgaagccgaatctgctgattcttttttccgtggatcagctaccttcttctggtggtcttgcttcgagtcaaaacaacaggtcctgcaagccactgttccggatccgatttctcctctggtgtacacttcaagatggagcggagaaactgatccgacttaggcttgaccttttgcttctgtaactctccagagactggtagcaactagcaaccagtgggtggacttgtatcacaacttaatctgagccaggtgtcttattttatttatgctataagtgcacaaatgctgcactccagtttcttgtagaaattttcgggctgatcttgaattttacctgctgaagagtttccgtgttctgctgctgtactgtaaacaggtgtgccagccggcggcaacctgtgcggggagcgccaagggctccaggaaagaatcggcggcgggctcgcgatcgggaaggggagcggggcgcatgcgcgagcactggcacggcgacggcgacggcgacggcgaggacgagcatgagccccagccggggtgcggggagggcgcggggcaggcggcggcgaactgcgcggcggtgtgctgctgctgcccgctggcgctgctcgacgtgctgctgctcgtcaccgtccggctccccgcgggcgtcatgcggcgggtgaggaggaggcgccggcgccgccgcggccacggaggtgccggagccaaccggaagaggccggcgcccgcgtcgccttcgggaagcagcggcaaggcgatgatcggagcggcgacgctagacatcgacgaggaggcgcgcggcgaggtggagtcggcggcggcggcggagctggagcgcgagatcatgagctcgcacttctacggcgccggcttctggcgcagcgtctcctccaactccagctcctcgtccaggcgctaccaatagatgcgcgttctggcgtaaatagtgagcactcggtcgctactaaactacccacgattactccatctgttcttggagtctcctccaactgccagtcagcgcagcatgcatggcaaaaggagcagcagccttcggcatcgtgcaagtgcacttattctgaatggacacgtgcgaaactggcacgtgcgggttgcatcattgtactgctacgccattgtctcgagcatggaccacgccagcagctgcagcttgggatggagaagcgaaaggggtcagtgattgtgcttaggtttttcatctctctcctaatcttttttgtgtaactggagcaggaaatgctgaaacctcaagcttctgtccaaacgatgtactcctatttagtattattgattgattgagaggccgatcgataacaaatgaacaaatagaacactgttcatgacgcagtgcttttttt

SEQ ID NO: 5286 - DNA, 5312 bp, Zea Mays
cgcctctcgcgacctccgctccccatttcaaaccgaaaggtccgaaaccccatctcgaccccgttctgccgtatctccgatccgcctccgccgccgtctcccctgcccaggcgccggaagtccacctcgggctccagcatatccgcgatgcatctggacggcgtcgacgacgagctcggaggcggcagctgcgccccctcccccgcgcgctttgagctccaagaggatccttccttctggaaggacaacaatgtgcaggttgcgatccgtatccggccgctgagcggcagtgaggtgtcgatgcaggggcagaagcggtgcgtcaggcaggatagtagccagagccttacctggattggacaccccgagtccaggttcactttcgatcttgtcgctgacgaacatgtcacgcaggagggcatgttcaatgttgccggggtgcccatggtggagaactgcatagctggctataacagctgcatgtttgcttacgggcaggaaaaagaattaaggagagatgaaaagctcatgtttacttgtaaatgctcatttttggagatttataatgagcagattctggatctgctcaacccaaattctgtaaacttgcagataagggaggatgccagaaagggtatacatgttgagaatttgacggaacatgaaatctccaatgctcgagaagcgctgcaacaacttattgagggagcagcaaacagaaaggtagcagccaccaatatgaaccgagcaagtagccgctctcatagtgttttcacctgccttatagaaagtaagtgggagtcacaaggtatcaagcaccaccgcttttctcgactcaaccttgttgaccttgcgggctcagagaggcaaaagagctcaggtgctgaaggggagcgattgaaggaagctaccaacatcaacaaatcactatcaactttgggacttgtcattacgaacctaattgctgtgtcaaacaaaaagtcacagcatgttccatacagagattcaaaattaacattcctcctccaggattcccttggaggaaattcaaaaacgaccataattgcaaacataagcccatccagctgttgtgctgctgagacattaagcacattgaaattcgcgcaacgagctaaatatataaggaataatgctataattaatgaggatgcttctggtgatgttcttagcatgcgtttacagatccagaaccttaagaaagtaatcagccgtttgcaaggacaattgggttctgataaaacagaaagcattgcctctcatgggtttgtctgcgagtcccctagcacattcaaatgggatcagggtcatggcatgttcactccacttacttttgataaaagggctacacagaggaacgattgtgatgctgcccttgtcgctgcttttaggagggaacaagagaaggaagcacaattgaaggcagtaatagatgcaaagcagactgctgaacagctggtagctcaaaagacagaagaggtaagaagtttcaagatgaggcttaagtttcgtgaagaacggatcaaaagattggagcaggttgcttcagggaagttatctgctgaagcacatcttttgcaagagaaggaaaaccttgtaaaggaattagaggtcctgcggggtcaattagatcgtaatccagaaattacaaaatttgcaatggagaatctacaattaaaggaagagctacgaaggttgcagtcatttgttgatgaaggtgaacgagaaatgatgcatgagcaaatcattgttttacaagataagctgcttgaggcacttgactggaagcttatgaatgagaaggaacctattaacaagggtctctcattatttggggagtcagctggcgatgaggaaaatgagtttcttcgtttgcaggctattcaaaatgagagagaaattgagtcgttgcgtaaaaaaatgacattctgccttgaagcaaaagataatcttgaaaggcatgtcaatgagttgaccacagagttggagcttacaaagaaacacaacaacacatataaagagttcaaggctgcccagctccaggagcaaggagaagcagatttacataacttgtctgacgctcagatggaacttaagactttggttgatgcaatagcttctgcgagtcaacgggaggcagaagctcatgaaactgctatcggtttggccaaagagaatgaagaattgaggctgcagcttaaggttttgattgaggataacaagagattggttgagctctatgaacacactgttgtcaatgttgaggcaaatcaagatggaaaccctgtagatgatctgttgaatgcccaaccagcagccacatcagatttccatgcacataactcatctagtgtggcacaggagtctaagatagtagacgaaaaatgcaccaatgaggacaatttctcaagagttacatctgttgaattgcgtcttcagctggaggagatgcatgaggaaaatgatagacttatggggttgtatgagaaagctatgcaggaaagagatgaattcaaacggaaaattttagagcaaagcgactctgaagctgtaaaacatattcagttggacgagaaagatgtcgaaatgagtgaagcagctgagaatcctgaagtgaaacatattcatgactccacaattgcagctttgaaagaagtgctgcagattgttcggagtaagttggagcttgtccaagataaggttgtgtctgctcaggatgcagtaaaatattttaaggcactcgaaatagctagtggtaaggccgaagaactttctgcaagaattgagcttcagcgtctaggtgcgcagcgtggtcaggaagaaatcactttcctgaagtctgtgctatcagaatcacagaagaagaaaaatgcttttgaaggcaagtatttcttgcctgcagcatcatgttggaacttggttttgaagaccaaaagtcttgcggagtccaagtttgatgccagctttggatcaatgaatcagaagaaagaacagttgaatcatctccaaactcgcaaaattgaactatctgctgcaagaacgagagcacgtgaatctgaaactgagttgaaaagcaaaattgatggccttaaagcgaaacttcgcgctcatgaagctcaaagaaaggaggaagaaaaggtcctgtttgctattgataacctggatacttccactacactaatgcataaacccaagaactatggcaaggcaaccgacctgctgaaatctgaggaggatcggatgaagcttctgtgtgaactacagaaggcccgcgaacagcgctccatggtacataaggaaataagaagcatgaatgagtgtgattatattgatcgtgagattggagtccttgaagcagaaatagaggattcctgcatctccatactggaaactgacattgagaagtttgtccgtgacaacactttagcagagatttgggagggtagcgcaaaggatctggaggcattgctggtcgattaccaagactgtgttttccaagtcaacttgaaggaggaagagatcaaggtgtgcagtgagtccttgcagtatcaagccagggacatggataaacttcagtcgaagctgaaccaagcgatccgggagctgggtgagcttctgcaagatagaagaagcctaaccgcttgcagtctggatgaacccacgctgcccgttggtgaaaaggtggcagcagaccttgaggccgtccggattcatgtcgatgaagctaagcagcttttgattctcgacaaccaagctaattcatgaacctgcgcagctagtttcaggtcccttataaagatgcgacgagtgacaggctagtctgtcttggcttctgctgttcagatccttagtacgtagtagcaagacatcagagatgggaagctgcggaatttgcttcattagttggaagctatctgaagccgaatctgctgattcttttttccgtggatcagctaccttcttctggtggtcttgcttcgagtcaaaacaacaggtcctgcaagccactgttccggatccgatttctcctctggtgtacacttcaagatggagcggagaaactgatccgacttaggcttgaccttttgcttctgtaactctccagagactggtagcaactagcaaccagtgggtggacttgtatcacaacttaatctgagccaggtgtcttattttatttatgctataagtgcacaaatgctgcactccagtttcttgtagaaattttcgggctgatcttgaattttacctgctgaagagtttccgtgttctgctgctgtactgtaaacaggtgtgccagccggcggcaacctgtgcggggagcgccaagggctccaggaaagaatcggcggcgggctcgcgatcgggaaggggagcggggcgcatgcgcgagcactggcacggcgacggcgacggcgacggcgaggacgagcatgagccccagccggggtgcggggagggcgcggggcaggcggcggcgaactgcgcggcggtgtgctgctgctgcccgctggcgctgctcgacgtgctgctgctcgtcaccgtccggctccccgcgggcgtcatgcggcgggtgaggaggaggcgccggcgccgccgcggccacggaggtgccggagccaaccggaagaggccggcgcccgcgtcgccttcgggaagcagcggcaaggcgatgatcggagcggcgacgctagacatcgacgaggaggcgcgcggcgaggtggagtcggcggcggcggcggagctggagcgcgagatcatgagctcgcacttctacggcgccggcttctggcgcagcgtctcctccaactccagctcctcgtccaggcgctaccaatagatgcgcgttctggcgtaaatagtgagcactcggtcgctactaaactacccacgattactccatctgttcttggagtctcctccaactgccagtcagcgcagcatgcatggcaaaaggagcagcagccttcggcatcgtgcaagtgcacttattctgaatggacacgtgcgaaactggcacgtgcgggttgcatcattgtactgctacgccattgtctcgagcatggaccacgccagcagctgcagcttgggatggagaagcgaaaggggtcagtgattgtgcttaggtttttcatctctctcctaatcttttttgtgtaactggagcaggaaatgctgaaacctcaagcttctgtccaaacgatgtactcctatttagtattattgattgattgagaggccgatcgataacaaatgaacaaatagaacactgttcatgacgcagtgcttttttt

SEQ ID NO: 5287 - DNA, 4437 bp, Zea Mays
tcgcgacctccgctccccatttcaaaccgaaaggtccgaaaccccatctcgaccccgttctgccgtatctccgatccgcctccgccgccgtctcccctgcccaggcgccggaagtccacctcgggctccagcatatccgcgatgcatctggacggcgtcgacgacgagctcggaggcggcagctgcgccccctcccccgcgcgctttgagctccaagaggatccttccttctggaaggacaacaatgtgcaggttgcgatccgtatccggccgctgagcggcagtgaggtgtcgatgcaggggcagaagcggtgcgtcaggcaggatagtagccagagccttacctggattggacaccccgagtccaggttcactttcgatcttgtcgctgacgaacatgtcacgcaggagggcatgttcaatgttgccggggtgcccatggtggagaactgcatagctggctataacagctgcatgtttgcttacgggcagactggaagcggaaaaacacatacaatgcttggtgacatagaaaatggaacacggaggaacaatgtgaattgtggtataactcctcgagtgtttgagcatctctttgtaaggatccaaaaggaaaaagaattaaggagagatgaaaagctcatgtttacttgtaaatgctcatttttggagatttataatgagcagattctggatctgctcaacccaaattctgtaaacttgcagataagggaggatgccagaaagggtatacatgttgagaatttgacggaacatgaaatctccaatgctcgagaagcgctgcaacaacttattgagggagcagcaaacagaaaggtagcagccaccaatatgaaccgagcaagtagccgctctcatagtgttttcacctgccttatagaaagtaagtgggagtcacaaggtatcaagcaccaccgcttttctcgactcaaccttgttgaccttgcgggctcagagaggcaaaagagctcaggtgctgaaggggagcgattgaaggaagctaccaacatcaacaaatcactatcaactttgggacttgtcattacgaacctaattgctgtgtcaaacaaaaagtcacagcatgttccatacagagattcaaaattaacattcctcctccagcttccattccattttgaaagttacacatttgatatttctcgctttctatccagttgtgctgctgagacattaagcacattgaaattcgcgcaacgagctaaatatataaggaataatgctataattaatgaggatgcttctggtgatgttcttagcatgcgtttacagatccagaaccttaagattatcattcatcttaaacttacctgcttttgcagaaaagtaatcagccgtttgcaaggacaattgggttctgataaaacagaaagcattgcctctcatgggtttgtctgcgagtcccctagcacattcaaatgggatcagggtcatggcatgttcactccacttacttttgataaaagggctacacagaggaacgattgtgatgctgcccttgtcgctgcttttaggagggaacaagagaaggaagcacaattgaaggcagtaatagatgcaaagcagactgctgaacagctggtagctcaaaagacagaagaggtaagaagtttcaagatgaggcttaagtttcgtgaagaacggatcaaaagattggagcaggttgcttcagggaagttatctgctgaagcacatcttttgcaagagaaggaaaaccttgtaaaggaattagaggtcctgcggggtcaattagatcgtaatccagaaattacaaaatttgcaatggagaatctacaattaaaggaagagctacgaaggttgcagtcatttgttgatgaaggtgaacgagaaatgatgcatgagcaaatcattgttttacaagataagctgcttgaggcacttgactggaagcttatgaatgagaaggaacctattaacaagggtctctcattatttggggagtcagctggcgatgaggaaaatgagtttcttcgtttgcaggctattcaaaatgagagagaaattgagtcgttgcgtaaaaaaatgacattctgccttgaagcaaaagataatcttgaaaggcatgtcaatgagttgaccacagagttggagcttacaaagaaacacaacaacacatataaagagttcaaggctgcccagctccaggagcaaggagaagcagatttacataacttgtctgacgctcagatggaacttaagactttggttgatgcaatagcttctgcgagtcaacgggaggcagaagctcatgaaactgctatcggtttggccaaagagaatgaagaattgaggctgcagcttaaggttttgattgaggataacaagagattggttgagctctatgaacacactgttgtcaatgttgaggcaaatcaagatggaaaccctgtagatgatctgttgaatgcccaaccagcagccacatcagatttccatgcacataactcatctagtgtggcacaggagtctaagatagtagacgaaaaatgcaccaatgaggacaatttctcaagagttacatctgttgaattgcgtcttcagctggaggagatgcatgaggaaaatgatagacttatggggttgtatgagaaagctatgcaggaaagagatgaattcaaacggaaaattttagagcaaagcgactctgaagctgtaaaacatattcagttggacgagaaagatgtcgaaatgagtgaagcagctgagaatcctgaagtgaaacatattcatgactccacaattgcagctttgaaagaagtgctgcagattgttcggagtaagttggagcttgtccaagataaggttgtgtctgctcaggatgcagtaaaatattttaaggcactcgaaatagctagtggtaaggccgaagaactttctgcaagaattgagcttcagcgtctaggtgcgcagcgtggtcaggaagaaatcactttcctgaagtctgtgctatcagaatcacagaagaagaaaaatgcttttgaaggcaagtatttcttgcctgcagcatcatgttggaacttggttttgaagaccaaaagtcttgcggagtccaagtttgatgccagctttggatcaatgaatcagaagaaagaacagttgaatcatctccaaactcgcaaaattgaactatctgctgcaagaacgagagcacgtgaatctgaaactgagttgaaaagcaaaattgatggccttaaagcgaaacttcgcgctcatgaagctcaaagaaaggaggaagaaaaggtcctgtttgctattgataacctggatacttccactacactaatgcataaacccaagaactatggcaaggcaaccgacctgctgaaatctgaggaggatcggatgaagcttctgtgtgaactacagaaggcccgcgaacagcgctccatggtacataaggaaataagaagcatgaatgagtgtgattatattgatcgtgagattggagtccttgaagcagaaatagaggattcctgcatctccatactggaaactgacattgagaagtttgtccgtgacaacactttagcagagatttgggagggtagcgcaaaggatctggaggcattgctggtcgattaccaagactgtgttttccaagtcaacttgaaggaggaagagatcaaggtgtgcagtgagtccttgcagtatcaagccagggacatggataaacttcagtcgaagctgaaccaagcgatccgggagctgggtgagcttctgcaagatagaagaagcctaaccgcttgcagtctggatgaacccacgctgcccgttggtgaaaaggtggcagcagaccttgaggccgtccggattcatgtcgatgaagctaagcagcttttgattctcgacaaccaagctaattcatgaacctgcgcagctagtttcaggtcccttataaagatgcgacgagtgacaggctagtctgtcttggcttctgctgttcagatccttagtacgtagtagcaagacatcagagatgggaagctgcggaatttgcttcattagttggaagctatctgaagccgaatctgctgattcttttttccgtggatcagctaccttcttctggtggtcttgcttcgagtcaaaacaacaggtcctgcaagccactgttccggatccgatttctcctctggtgtacacttcaagatggagcggagaaactgatccgacttaggcttgaccttttgcttctgtaactctccagagactggtagcaactagcaaccagtgggtggacttgtatcacaacttaatctgagccaggtgtcttattttatttatgctataagtgcacaaatgctgcactccagtttcttgtagaaattttcgggctgatcttgaattttacctgctgaagagtttccgtaaaaaaaa

SEQ ID NO: 5288 - DNA, 4808 bp, Zea Mays
ccgctccccatttcaaaccgaaaggtccgaaaccccatctcgaccccgttctgccgtatctccgatccgcctccgccgccgtctcccctgcccaggcgccggaagtccacctcgggctccagcatatccgcgatgcatctggacggcgtcgacgacgagctcggaggcggcagctgcgccccctcccccgcgcgctttgagctccaagaggatccttccttctggaaggacaacaatgtgcaggttgcgatccgtatccggccgctgagcggcagtgaggtgtcgatgcaggggcagaagcggtgcgtcaggcaggatagtagccagagccttacctggattggacaccccgagtccaggttcactttcgatcttgtcgctgacgaacatgtcacgcaggagggcatgttcaatgttgccggggtgcccatggtggagaactgcatagctggctataacagctgcatgtttgcttacgggcagactggaagcggaaaaacacatacaatgcttggtgacatagaaaatggaacacggaggaacaatgtgaattgtggtataactcctcgagtgtttgagcatctctttgtaaggatccaaaaggaaaaagaattaaggagagatgaaaagctcatgtttacttgtaaatgctcatttttggagatttataatgagcagattctggatctgctcaacccaaattctgtaaacttgcagataagggaggatgccagaaagggtatacatgttgagaatttgacggaacatgaaatctccaatgctcgagaagcgctgcaacaacttattgagggagcagcaaacagaaaggtagcagccaccaatatgaaccgagcaagtagccgctctcatagtgttttcacctgccttatagaaagtaagtgggagtcacaaggtatcaagcaccaccgcttttctcgactcaaccttgttgaccttgcgggctcagagaggcaaaagagctcaggtgctgaaggggagcgattgaaggaagctaccaacatcaacaaatcactatcaactttgggacttgtcattacgaacctaattgctgtgtcaaacaaaaagtcacagcatgttccatacagagattcaaaattaacattcctcctccaggattcccttggaggaaattcaaaaacgaccataattgcaaacataagcccatccagctgttgtgctgctgagacattaagcacattgaaattcgcgcaacgagctaaatatataaggaataatgctataattaatgaggatgcttctggtgatgttcttagcatgcgtttacagatccagaaccttaagaaaagtaatcagccgtttgcaaggacaattgggttctgataaaacagaaagcattgcctctcatgggtttgtctgcgagtcccctagcacattcaaatgggatcagggtcatggcatgttcactccacttacttttgataaaagggctacacagaggaacgattgtgatgctgcccttgtcgctgcttttaggagggaacaagagaaggaagcacaattgaaggcagtaatagatgcaaagcagactgctgaacagctggtagctcaaaagacagaagaggtaagaagtttcaagatgaggcttaagtttcgtgaagaacggatcaaaagattggagcaggttgcttcagggaagttatctgctgaagcacatcttttgcaagagaaggaaaaccttgtaaaggaattagaggtcctgcggggtcaattagatcgtaatccagaaattacaaaatttgcaatggagaatctacaattaaaggaagagctacgaaggttgcagtcatttgttgatgaaggtgaacgagaaatgatgcatgagcaaatcattgttttacaagataagctgcttgaggcacttgactggaagcttatgaatgagaaggaacctattaacaagggtctctcattatttggggagtcagctggcgatgaggaaaatgagtttcttcgtttgcaggctattcaaaatgagagagaaattgagtcgttgcgtaaaaaaatgacattctgccttgaagcaaaagataatcttgaaaggcatgtcaatgagttgaccacagagttggagcttacaaagaaacacaacaacacatataaagagttcaaggctgcccagctccaggagcaaggagaagcagatttacataacttgtctgacgctcagatggaacttaagactttggttgatgcaatagcttctgcgagtcaacgggaggcagaagctcatgaaactgctatcggtttggccaaagagaatgaagaattgaggctgcagcttaaggttttgattgaggataacaagagattggttgagctctatgaacacactgttgtcaatgttgaggcaaatcaagatggaaaccctgtagatgatctgttgaatgcccaaccagcagccacatcagatttccatgcacataactcatctagtgtggcacaggagtctaagatagtagacgaaaaatgcaccaatgaggacaatttctcaagagttacatctgttgaattgcgtcttcagctggaggagatgcatgaggaaaatgatagacttatggggttgtatgagaaagctatgcaggaaagagatgaattcaaacggaaaattttagagcaaagcgactctgaagctgtaaaacatattcagttggacgagaaagatgtcgaaatgagtgaagcagctgagaatcctgaagtgaaacatattcatgactccacaattgcagctttgaaagaagtgctgcagattgttcggagtaagttggagcttgtccaagataaggttgtgtctgctcaggatgcagtaaaatattttaaggcactcgaaatagctagtggtaaggccgaagaactttctgcaagaattgagcttcagcgtctaggtgcgcagcgtggtcaggaagaaatcactttcctgaagtctgtgctatcagaatcacagaagaagaaaaatgcttttgaaggcaagtatttcttgcctgcagcatcatgttggaacttggttttgaagaccaaaagtcttgcggagtccaagtttgatgccagctttggatcaatgaatcagaagaaagaacagttgaatcatctccaaactcgcaaaattgaactatctgctgcaagaacgagagcacgtgaatctgaaactgagttgaaaagcaaaattgatggccttaaagcgaaacttcgcgctcatgaagctcaaagaaaggaggaagaaaaggtcctgtttgctattgataacctggatacttccactacactaatgcataaacccaagaactatggcaaggcaaccgacctgctgaaatctgaggaggatcggatgaagcttctgtgtgaactacagaaggcccgcgaacagcgctccatggtacataaggaaataagaagcatgaatgagtgtgattatattgatcgtgagattggagtccttgaagcagaaatagaggattcctgcatctccatactggaaactgacattgagaagtttgtccgtgacaacactttagcagagatttgggagggtagcgcaaaggatctggaggcattgctggtcgattaccaagactgtgttttccaagtcaacttgaaggaggaagagatcaaggtgtgcagtgagtccttgcagtatcaagccagggacatggataaacttcagtcgaagctgaaccaagcgatccgggagctgggtgagcttctgcaagatagaagaagcctaaccgcttgcagtctggatgaacccacgctgcccgttggtgaaaaggtgtgccagccggcggcaacctgtgcggggagcgccaagggctccaggaaagaatcggcggcgggctcgcgatcgggaaggggagcggggcgcatgcgcgagcactggcacggcgacggcgacggcgacggcgaggacgagcatgagccccagccggggtgcggggagggcgcggggcaggcggcggcgaactgcgcggcggtgtgctgctgctgcccgctggcgctgctcgacgtgctgctgctcgtcaccgtccggctccccgcgggcgtcatgcggcgggtgaggaggaggcgccggcgccgccgcggccacggaggtgccggagccaaccggaagaggccggcgcccgcgtcgccttcgggaagcagcggcaaggcgatgatcggagcggcgacgctagacatcgacgaggaggcgcgcggcgaggtggagtcggcggcggcggcggagctggagcgcgagatcatgagctcgcacttctacggcgccggcttctggcgcagcgtctcctccaactccagctcctcgtccaggcgctaccaatagatgcgcgttctggcgtaaatagtgagcactcggtcgctactaaactacccacgattactccatctgttcttggagtctcctccaactgccagtcagcgcagcatgcatggcaaaaggagcagcagccttcggcatcgtgcaagtgcacttattctgaatggacacgtgcgaaactggcacgtgcgggttgcatcattgtactgctacgccattgtctcgagcatggaccacgccagcagctgcagcttgggatggagaagcgaaaggggtcagtgattgtgcttaggtttttcatctctctcctaatcttttttgtgtaactggagcaggaaatgctgaaacctcaagcttctgtccaaacgatgtactcctatttagtattattgattgattgagaggccgatcgataacaaatgaacaaatagaacactgttcatgacgcagtgcttttttt

SEQ ID NO: 5289 - DNA, 4655 bp, Zea Mays
cccatctcgaccccgttctgccgtatctccgatccgcctccgccgccgtctcccctgcccaggcgccggaagtccacctcgggctccagcatatccgcgatgcatctggacggcgtcgacgacgagctcggaggcggcagctgcgccccctcccccgcgcgctttgagctccaagaggatccttccttctggaaggacaacaatgtgcaggttgcgatccgtatccggccgctgagcggcagtgaggtgtcgatgcaggggcagaagcggtgcgtcaggcaggatagtagccagagccttacctggattggacaccccgagtccaggttcactttcgatcttgtcgctgacgaacatgtcacgcaggagggcatgttcaatgttgccggggtgcccatggtggagaactgcatagctggctataacagctgcatgtttgcttacgggcaggaaaaagaattaaggagagatgaaaagctcatgtttacttgtaaatgctcatttttggagatttataatgagcagattctggatctgctcaacccaaattctgtaaacttgcagataagggaggatgccagaaagggtatacatgttgagaatttgacggaacatgaaatctccaatgctcgagaagcgctgcaacaacttattgagggagcagcaaacagaaaggtagcagccaccaatatgaaccgagcaagtagccgctctcatagtgttttcacctgccttatagaaagtaagtgggagtcacaaggtatcaagcaccaccgcttttctcgactcaaccttgttgaccttgcgggctcagagaggcaaaagagctcaggtgctgaaggggagcgattgaaggaagctaccaacatcaacaaatcactatcaactttgggacttgtcattacgaacctaattgctgtgtcaaacaaaaagtcacagcatgttccatacagagattcaaaattaacattcctcctccaggattcccttggaggaaattcaaaaacgaccataattgcaaacataagcccatccagctgttgtgctgctgagacattaagcacattgaaattcgcgcaacgagctaaatatataaggaataatgctataattaatgaggatgcttctggtgatgttcttagcatgcgtttacagatccagaaccttaagaaaagtaatcagccgtttgcaaggacaattgggttctgataaaacagaaagcattgcctctcatgggtttgtctgcgagtcccctagcacattcaaatgggatcagggtcatggcatgttcactccacttacttttgataaaagggctacacagaggaacgattgtgatgctgcccttgtcgctgcttttaggagggaacaagagaaggaagcacaattgaaggcagtaatagatgcaaagcagactgctgaacagctggtagctcaaaagacagaagaggtaagaagtttcaagatgaggcttaagtttcgtgaagaacggatcaaaagattggagcaggttgcttcagggaagttatctgctgaagcacatcttttgcaagagaaggaaaaccttgtaaaggaattagaggtcctgcggggtcaattagatcgtaatccagaaattacaaaatttgcaatggagaatctacaattaaaggaagagctacgaaggttgcagtcatttgttgatgaaggtgaacgagaaatgatgcatgagcaaatcattgttttacaagataagctgcttgaggcacttgactggaagcttatgaatgagaaggaacctattaacaagggtctctcattatttggggagtcagctggcgatgaggaaaatgagtttcttcgtttgcaggctattcaaaatgagagagaaattgagtcgttgcgtaaaaaaatgacattctgccttgaagcaaaagataatcttgaaaggcatgtcaatgagttgaccacagagttggagcttacaaagaaacacaacaacacatataaagagttcaaggctgcccagctccaggagcaaggagaagcagatttacataacttgtctgacgctcagatggaacttaagactttggttgatgcaatagcttctgcgagtcaacgggaggcagaagctcatgaaactgctatcggtttggccaaagagaatgaagaattgaggctgcagcttaaggttttgattgaggataacaagagattggttgagctctatgaacacactgttgtcaatgttgaggcaaatcaagatggaaaccctgtagatgatctgttgaatgcccaaccagcagccacatcagatttccatgcacataactcatctagtgtggcacaggagtctaagatagtagacgaaaaatgcaccaatgaggacaatttctcaagagttacatctgttgaattgcgtcttcagctggaggagatgcatgaggaaaatgatagacttatggggttgtatgagaaagctatgcaggaaagagatgaattcaaacggaaaattttagagcaaagcgactctgaagctgtaaaacatattcagttggacgagaaagatgtcgaaatgagtgaagcagctgagaatcctgaagtgaaacatattcatgactccacaattgcagctttgaaagaagtgctgcagattgttcggagtaagttggagcttgtccaagataaggttgtgtctgctcaggatgcagtaaaatattttaaggcactcgaaatagctagtggtaaggccgaagaactttctgcaagaattgagcttcagcgtctaggtgcgcagcgtggtcaggaagaaatcactttcctgaagtctgtgctatcagaatcacagaagaagaaaaatgcttttgaaggcaagtatttcttgcctgcagcatcatgttggaacttggttttgaagaccaaaagtcttgcggagtccaagtttgatgccagctttggatcaatgaatcagaagaaagaacagttgaatcatctccaaactcgcaaaattgaactatctgctgcaagaacgagagcacgtgaatctgaaactgagttgaaaagcaaaattgatggccttaaagcgaaacttcgcgctcatgaagctcaaagaaaggaggaagaaaaggtcctgtttgctattgataacctggatacttccactacactaatgcataaacccaagaactatggcaaggcaaccgacctgctgaaatctgaggaggatcggatgaagcttctgtgtgaactacagaaggcccgcgaacagcgctccatggtacataaggaaataagaagcatgaatgagtgtgattatattgatcgtgagattggagtccttgaagcagaaatagaggattcctgcatctccatactggaaactgacattgagaagtttgtccgtgacaacactttagcagagatttgggagggtagcgcaaaggatctggaggcattgctggtcgattaccaagactgtgttttccaagtcaacttgaaggaggaagagatcaaggtgtgcagtgagtccttgcagtatcaagccagggacatggataaacttcagtcgaagctgaaccaagcgatccgggagctgggtgagcttctgcaagatagaagaagcctaaccgcttgcagtctggatgaacccacgctgcccgttggtgaaaaggtgtgccagccggcggcaacctgtgcggggagcgccaagggctccaggaaagaatcggcggcgggctcgcgatcgggaaggggagcggggcgcatgcgcgagcactggcacggcgacggcgacggcgacggcgaggacgagcatgagccccagccggggtgcggggagggcgcggggcaggcggcggcgaactgcgcggcggtgtgctgctgctgcccgctggcgctgctcgacgtgctgctgctcgtcaccgtccggctccccgcgggcgtcatgcggcgggtgaggaggaggcgccggcgccgccgcggccacggaggtgccggagccaaccggaagaggccggcgcccgcgtcgccttcgggaagcagcggcaaggcgatgatcggagcggcgacgctagacatcgacgaggaggcgcgcggcgaggtggagtcggcggcggcggcggagctggagcgcgagatcatgagctcgcacttctacggcgccggcttctggcgcagcgtctcctccaactccagctcctcgtccaggcgctaccaatagatgcgcgttctggcgtaaatagtgagcactcggtcgctactaaactacccacgattactccatctgttcttggagtctcctccaactgccagtcagcgcagcatgcatggcaaaaggagcagcagccttcggcatcgtgcaagtgcacttattctgaatggacacgtgcgaaactggcacgtgcgggttgcatcattgtactgctacgccattgtctcgagcatggaccacgccagcagctgcagcttgggatggagaagcgaaaggggtcagtgattgtgcttaggtttttcatctctctcctaatcttttttgtgtaactggagcaggaaatgctgaaacctcaagcttctgtccaaacgatgtactcctatttagtattattgattgattgagaggccgatcgataacaaatgaacaaatagaacactgttcatgacgcagtgcttttttt

SEQ ID NO: 5290 - DNA, 5231 bp, Zea Mays
tccgatccgcctccgccgccgtctcccctgcccaggcgccggaagtccacctcgggctccagcatatccgcgatgcatctggacggcgtcgacgacgagctcggaggcggcagctgcgccccctcccccgcgcgctttgagctccaagaggatccttccttctggaaggacaacaatgtgcaggttgcgatccgtatccggccgctgagcggcagtgaggtgtcgatgcaggggcagaagcggtgcgtcaggcaggatagtagccagagccttacctggattggacaccccgagtccaggttcactttcgatcttgtcgctgacgaacatgtcacgcaggagggcatgttcaatgttgccggggtgcccatggtggagaactgcatagctggctataacagctgcatgtttgcttacgggcaggaaaaagaattaaggagagatgaaaagctcatgtttacttgtaaatgctcatttttggagatttataatgagcagattctggatctgctcaacccaaattctgtaaacttgcagataagggaggatgccagaaagggtatacatgttgagaatttgacggaacatgaaatctccaatgctcgagaagcgctgcaacaacttattgagggagcagcaaacagaaaggtagcagccaccaatatgaaccgagcaagtagccgctctcatagtgttttcacctgccttatagaaagtaagtgggagtcacaaggtatcaagcaccaccgcttttctcgactcaaccttgttgaccttgcgggctcagagaggcaaaagagctcaggtgctgaaggggagcgattgaaggaagctaccaacatcaacaaatcactatcaactttgggacttgtcattacgaacctaattgctgtgtcaaacaaaaagtcacagcatgttccatacagagattcaaaattaacattcctcctccagcttccattccattttgaaagttacacatttgatatttctcgctttctatccagttgtgctgctgagacattaagcacattgaaattcgcgcaacgagctaaatatataaggaataatgctataattaatgaggatgcttctggtgatgttcttagcatgcgtttacagatccagaaccttaagaaagtaatcagccgtttgcaaggacaattgggttctgataaaacagaaagcattgcctctcatgggtttgtctgcgagtcccctagcacattcaaatgggatcagggtcatggcatgttcactccacttacttttgataaaagggctacacagaggaacgattgtgatgctgcccttgtcgctgcttttaggagggaacaagagaaggaagcacaattgaaggcagtaatagatgcaaagcagactgctgaacagctggtagctcaaaagacagaagaggtaagaagtttcaagatgaggcttaagtttcgtgaagaacggatcaaaagattggagcaggttgcttcagggaagttatctgctgaagcacatcttttgcaagagaaggaaaaccttgtaaaggaattagaggtcctgcggggtcaattagatcgtaatccagaaattacaaaatttgcaatggagaatctacaattaaaggaagagctacgaaggttgcagtcatttgttgatgaaggtgaacgagaaatgatgcatgagcaaatcattgttttacaagataagctgcttgaggcacttgactggaagcttatgaatgagaaggaacctattaacaagggtctctcattatttggggagtcagctggcgatgaggaaaatgagtttcttcgtttgcaggctattcaaaatgagagagaaattgagtcgttgcgtaaaaaaatgacattctgccttgaagcaaaagataatcttgaaaggcatgtcaatgagttgaccacagagttggagcttacaaagaaacacaacaacacatataaagagttcaaggctgcccagctccaggagcaaggagaagcagatttacataacttgtctgacgctcagatggaacttaagactttggttgatgcaatagcttctgcgagtcaacgggaggcagaagctcatgaaactgctatcggtttggccaaagagaatgaagaattgaggctgcagcttaaggttttgattgaggataacaagagattggttgagctctatgaacacactgttgtcaatgttgaggcaaatcaagatggaaaccctgtagatgatctgttgaatgcccaaccagcagccacatcagatttccatgcacataactcatctagtgtggcacaggagtctaagatagtagacgaaaaatgcaccaatgaggacaatttctcaagagttacatctgttgaattgcgtcttcagctggaggagatgcatgaggaaaatgatagacttatggggttgtatgagaaagctatgcaggaaagagatgaattcaaacggaaaattttagagcaaagcgactctgaagctgtaaaacatattcagttggacgagaaagatgtcgaaatgagtgaagcagctgagaatcctgaagtgaaacatattcatgactccacaattgcagctttgaaagaagtgctgcagattgttcggagtaagttggagcttgtccaagataaggttgtgtctgctcaggatgcagtaaaatattttaaggcactcgaaatagctagtggtaaggccgaagaactttctgcaagaattgagcttcagcgtctaggtgcgcagcgtggtcaggaagaaatcactttcctgaagtctgtgctatcagaatcacagaagaagaaaaatgcttttgaaggcaagtatttcttgcctgcagcatcatgttggaacttggttttgaagaccaaaagtcttgcggagtccaagtttgatgccagctttggatcaatgaatcagaagaaagaacagttgaatcatctccaaactcgcaaaattgaactatctgctgcaagaacgagagcacgtgaatctgaaactgagttgaaaagcaaaattgatggccttaaagcgaaacttcgcgctcatgaagctcaaagaaaggaggaagaaaaggtcctgtttgctattgataacctggatacttccactacactaatgcataaacccaagaactatggcaaggcaaccgacctgctgaaatctgaggaggatcggatgaagcttctgtgtgaactacagaaggcccgcgaacagcgctccatggtacataaggaaataagaagcatgaatgagtgtgattatattgatcgtgagattggagtccttgaagcagaaatagaggattcctgcatctccatactggaaactgacattgagaagtttgtccgtgacaacactttagcagagatttgggagggtagcgcaaaggatctggaggcattgctggtcgattaccaagactgtgttttccaagtcaacttgaaggaggaagagatcaaggtgtgcagtgagtccttgcagtatcaagccagggacatggataaacttcagtcgaagctgaaccaagcgatccgggagctgggtgagcttctgcaagatagaagaagcctaaccgcttgcagtctggatgaacccacgctgcccgttggtgaaaaggtggcagcagaccttgaggccgtccggattcatgtcgatgaagctaagcagcttttgattctcgacaaccaagctaattcatgaacctgcgcagctagtttcaggtcccttataaagatgcgacgagtgacaggctagtctgtcttggcttctgctgttcagatccttagtacgtagtagcaagacatcagagatgggaagctgcggaatttgcttcattagttggaagctatctgaagccgaatctgctgattcttttttccgtggatcagctaccttcttctggtggtcttgcttcgagtcaaaacaacaggtcctgcaagccactgttccggatccgatttctcctctggtgtacacttcaagatggagcggagaaactgatccgacttaggcttgaccttttgcttctgtaactctccagagactggtagcaactagcaaccagtgggtggacttgtatcacaacttaatctgagccaggtgtcttattttatttatgctataagtgcacaaatgctgcactccagtttcttgtagaaattttcgggctgatcttgaattttacctgctgaagagtttccgtgttctgctgctgtactgtaaacaggtgtgccagccggcggcaacctgtgcggggagcgccaagggctccaggaaagaatcggcggcgggctcgcgatcgggaaggggagcggggcgcatgcgcgagcactggcacggcgacggcgacggcgacggcgaggacgagcatgagccccagccggggtgcggggagggcgcggggcaggcggcggcgaactgcgcggcggtgtgctgctgctgcccgctggcgctgctcgacgtgctgctgctcgtcaccgtccggctccccgcgggcgtcatgcggcgggtgaggaggaggcgccggcgccgccgcggccacggaggtgccggagccaaccggaagaggccggcgcccgcgtcgccttcgggaagcagcggcaaggcgatgatcggagcggcgacgctagacatcgacgaggaggcgcgcggcgaggtggagtcggcggcggcggcggagctggagcgcgagatcatgagctcgcacttctacggcgccggcttctggcgcagcgtctcctccaactccagctcctcgtccaggcgctaccaatagatgcgcgttctggcgtaaatagtgagcactcggtcgctactaaactacccacgattactccatctgttcttggagtctcctccaactgccagtcagcgcagcatgcatggcaaaaggagcagcagccttcggcatcgtgcaagtgcacttattctgaatggacacgtgcgaaactggcacgtgcgggttgcatcattgtactgctacgccattgtctcgagcatggaccacgccagcagctgcagcttgggatggagaagcgaaaggggtcagtgattgtgcttaggtttttcatctctctcctaatcttttttgtgtaactggagcaggaaatgctgaaacctcaagcttctgtccaaacgatgtactcctatttagtattattgattgattgagaggccgatcgataacaaatgaacaaatagaacactgttcatgacgcagtgcttttttt

SEQ ID NO: 5291 - DNA, 5238 bp, Zea Mays
tccgatccgcctccgccgccgtctcccctgcccaggcgccggaagtccacctcgggctccagcatatccgcgatgcatctggacggcgtcgacgacgagctcggaggcggcagctgcgccccctcccccgcgcgctttgagctccaagaggatccttccttctggaaggacaacaatgtgcaggttgcgatccgtatccggccgctgagcggcagtgaggtgtcgatgcaggggcagaagcggtgcgtcaggcaggatagtagccagagccttacctggattggacaccccgagtccaggttcactttcgatcttgtcgctgacgaacatgtcacgcaggagggcatgttcaatgttgccggggtgcccatggtggagaactgcatagctggctataacagctgcatgtttgcttacgggcaggaaaaagaattaaggagagatgaaaagctcatgtttacttgtaaatgctcatttttggagatttataatgagcagattctggatctgctcaacccaaattctgtaaacttgcagataagggaggatgccagaaagggtatacatgttgagaatttgacggaacatgaaatctccaatgctcgagaagcgctgcaacaacttattgagggagcagcaaacagaaaggtagcagccaccaatatgaaccgagcaagtagccgctctcatagtgttttcacctgccttatagaaagtaagtgggagtcacaaggtatcaagcaccaccgcttttctcgactcaaccttgttgaccttgcgggctcagagaggcaaaagagctcaggtgctgaaggggagcgattgaaggaagctaccaacatcaacaaatcactatcaactttgggacttgtcattacgaacctaattgctgtgtcaaacaaaaagtcacagcatgttccatacagagattcaaaattaacattcctcctccaggattcccttggaggaaattcaaaaacgaccataattgcaaacataagcccatccagctgttgtgctgctgagacattaagcacattgaaattcgcgcaacgagctaaatatataaggaataatgctataattaatgaggatgcttctggtgatgttcttagcatgcgtttacagatccagaaccttaagaaaagtaatcagccgtttgcaaggacaattgggttctgataaaacagaaagcattgcctctcatgggtttgtctgcgagtcccctagcacattcaaatgggatcagggtcatggcatgttcactccacttacttttgataaaagggctacacagaggaacgattgtgatgctgcccttgtcgctgcttttaggagggaacaagagaaggaagcacaattgaaggcagtaatagatgcaaagcagactgctgaacagctggtagctcaaaagacagaagaggtaagaagtttcaagatgaggcttaagtttcgtgaagaacggatcaaaagattggagcaggttgcttcagggaagttatctgctgaagcacatcttttgcaagagaaggaaaaccttgtaaaggaattagaggtcctgcggggtcaattagatcgtaatccagaaattacaaaatttgcaatggagaatctacaattaaaggaagagctacgaaggttgcagtcatttgttgatgaaggtgaacgagaaatgatgcatgagcaaatcattgttttacaagataagctgcttgaggcacttgactggaagcttatgaatgagaaggaacctattaacaagggtctctcattatttggggagtcagctggcgatgaggaaaatgagtttcttcgtttgcaggctattcaaaatgagagagaaattgagtcgttgcgtaaaaaaatgacattctgccttgaagcaaaagataatcttgaaaggcatgtcaatgagttgaccacagagttggagcttacaaagaaacacaacaacacatataaagagttcaaggctgcccagctccaggagcaaggagaagcagatttacataacttgtctgacgctcagatggaacttaagactttggttgatgcaatagcttctgcgagtcaacgggaggcagaagctcatgaaactgctatcggtttggccaaagagaatgaagaattgaggctgcagcttaaggttttgattgaggataacaagagattggttgagctctatgaacacactgttgtcaatgttgaggcaaatcaagatggaaaccctgtagatgatctgttgaatgcccaaccagcagccacatcagatttccatgcacataactcatctagtgtggcacaggagtctaagatagtagacgaaaaatgcaccaatgaggacaatttctcaagagttacatctgttgaattgcgtcttcagctggaggagatgcatgaggaaaatgatagacttatggggttgtatgagaaagctatgcaggaaagagatgaattcaaacggaaaattttagagcaaagcgactctgaagctgtaaaacatattcagttggacgagaaagatgtcgaaatgagtgaagcagctgagaatcctgaagtgaaacatattcatgactccacaattgcagctttgaaagaagtgctgcagattgttcggagtaagttggagcttgtccaagataaggttgtgtctgctcaggatgcagtaaaatattttaaggcactcgaaatagctagtggtaaggccgaagaactttctgcaagaattgagcttcagcgtctaggtgcgcagcgtggtcaggaagaaatcactttcctgaagtctgtgctatcagaatcacagaagaagaaaaatgcttttgaaggcaagtatttcttgcctgcagcatcatgttggaacttggttttgaagaccaaaagtcttgcggagtccaagtttgatgccagctttggatcaatgaatcagaagaaagaacagttgaatcatctccaaactcgcaaaattgaactatctgctgcaagaacgagagcacgtgaatctgaaactgagttgaaaagcaaaattgatggccttaaagcgaaacttcgcgctcatgaagctcaaagaaaggaggaagaaaaggtcctgtttgctattgataacctggatacttccactacactaatgcataaacccaagaactatggcaaggcaaccgacctgctgaaatctgaggaggatcggatgaagcttctgtgtgaactacagaaggcccgcgaacagcgctccatggtacataaggaaataagaagcatgaatgagtgtgattatattgatcgtgagattggagtccttgaagcagaaatagaggattcctgcatctccatactggaaactgacattgagaagtttgtccgtgacaacactttagcagagatttgggagggtagcgcaaaggatctggaggcattgctggtcgattaccaagactgtgttttccaagtcaacttgaaggaggaagagatcaaggtgtgcagtgagtccttgcagtatcaagccagggacatggataaacttcagtcgaagctgaaccaagcgatccgggagctgggtgagcttctgcaagatagaagaagcctaaccgcttgcagtctggatgaacccacgctgcccgttggtgaaaaggtggcagcagaccttgaggccgtccggattcatgtcgatgaagctaagcagcttttgattctcgacaaccaagctaattcatgaacctgcgcagctagtttcaggtcccttataaagatgcgacgagtgacaggctagtctgtcttggcttctgctgttcagatccttagtacgtagtagcaagacatcagagatgggaagctgcggaatttgcttcattagttggaagctatctgaagccgaatctgctgattcttttttccgtggatcagctaccttcttctggtggtcttgcttcgagtcaaaacaacaggtcctgcaagccactgttccggatccgatttctcctctggtgtacacttcaagatggagcggagaaactgatccgacttaggcttgaccttttgcttctgtaactctccagagactggtagcaactagcaaccagtgggtggacttgtatcacaacttaatctgagccaggtgtcttattttatttatgctataagtgcacaaatgctgcactccagtttcttgtagaaattttcgggctgatcttgaattttacctgctgaagagtttccgtgttctgctgctgtactgtaaacaggtgtgccagccggcggcaacctgtgcggggagcgccaagggctccaggaaagaatcggcggcgggctcgcgatcgggaaggggagcggggcgcatgcgcgagcactggcacggcgacggcgacggcgacggcgaggacgagcatgagccccagccggggtgcggggagggcgcggggcaggcggcggcgaactgcgcggcggtgtgctgctgctgcccgctggcgctgctcgacgtgctgctgctcgtcaccgtccggctccccgcgggcgtcatgcggcgggtgaggaggaggcgccggcgccgccgcggccacggaggtgccggagccaaccggaagaggccggcgcccgcgtcgccttcgggaagcagcggcaaggcgatgatcggagcggcgacgctagacatcgacgaggaggcgcgcggcgaggtggagtcggcggcggcggcggagctggagcgcgagatcatgagctcgcacttctacggcgccggcttctggcgcagcgtctcctccaactccagctcctcgtccaggcgctaccaatagatgcgcgttctggcgtaaatagtgagcactcggtcgctactaaactacccacgattactccatctgttcttggagtctcctccaactgccagtcagcgcagcatgcatggcaaaaggagcagcagccttcggcatcgtgcaagtgcacttattctgaatggacacgtgcgaaactggcacgtgcgggttgcatcattgtactgctacgccattgtctcgagcatggaccacgccagcagctgcagcttgggatggagaagcgaaaggggtcagtgattgtgcttaggtttttcatctctctcctaatcttttttgtgtaactggagcaggaaatgctgaaacctcaagcttctgtccaaacgatgtactcctatttagtattattgattgattgagaggccgatcgataacaaatgaacaaatagaacactgttcatgacgcagtgcttttttt

SEQ ID NO: 5292 - DNA, 564 bp, Zea Mays
cacgggggttgccgctttggggctcggcacctacggcgcgcacatgttccgccccaagaaccccgcgtacaaagaggtttggcacacggcgtccctgtaccatctcgtccacaccgcggcgctgctcggggcgcccatcaccaaagcgcccccaacgttttcggagggctcctcactgctggaattgtgctcttctctggaacgtgctacaccgtggcttatcttgaagacaggaagttttcttcaccggcaccattggggggctttgcgtttattgctgcttgggccagcctcctcttctgattaaattgtgcttttccaagaaaacaaaaaaagtcataaacctctctatatggtgttttatcaggttgtgaaaaatatacttgtaaagtgtatacagtggacagtatgcgcctctgtttaataattcaatctgtgattcctatgtttctattctatgatatgcttgctgctcatgatatgttttcagttggacatgccagtgaaattgcgcctctggttaataattcaagctgtatgatgtttatgtaacggccgaggttc

SEQ ID NO: 5293 - DNA, 5413 bp, Zea Mays
atttgctactgctgctgcagtgtcgcgcgctgaggagacttgcagtcacagtccacagctgcagccaaaaatatatccagccaaacagatatttactacttgtatggagagtcgagttgctatcttcacgctagtagtgtatcataatacggtcagcgctgactagcaaggagccaagcaggacataatactgaagcaggctgcggctgcggctgcagcaacaagtcaaggaggttgaaggcgaattagagagaagaggaagatgttggcggcgacggatccgatgctgtggcacaaggtggccgccgtctccggggttgccgctttggggctcggcacctacggcgcgcacatgttccgccccaagaaccccgcgtacaaagaggtttggcacacggcgtccctgtaccatctcgtccacaccgcggcgctgctcggggcgcccatcaccaaagcgcccccaacgttttcggagggctcctcactgctggaattgtgctcttctctggaacgtgctacaccgtggcttatcttgaagacaggaagttttcttcaccggcaccattggggggctttgcgtttattgctgcttgggccagcctcctcttctgattaaattgtgcttttccaagaaaacaaaaaaagtcataaacctctctatatggtgttttatcaggttgtgaaaaatatacttgtaaagtgtatacagtggacagtatgcgcctctgtttaataattcaatctgtgattcctatgtttctattctatgatatgcttgctgctcatgatatgttttcagttggacatgccagtgaaattgcgcctctggttaataattcaagctgtatgatgtttatgtaacggccgaggttcaaggcagaccctttgcttgcctaaaagttaatggccacatgttcgctacttgatgcacaaatatgagaatctctctttgctttgaatgaacaatgcgatggtggaacaacacaatataaaactacactcgataaggtcggcaaagttaaagatggttcctttctttatgatgcccccttgacaaggcaggaatctgatttctttccttgtcttgtctttccacaccatcttcagtattgcaacatgtggcatctgacttcataaagcatattgctccttagccatgtacatctgaattccccttccatgattaaggcaacctttgtctttgcgcttctctctttcatctacactccaccatcccctcctaagcatgagtgataggataatcatgataacatcaccatctaagagggatgatgccagagatattggagatattgatttgcagtcctacatggacttggagaacatcgcgttctaccaggttccagcaaatttggaatcagccttgtccatggaaagtgagagatcactaggaattcatgtctgcatggacaacagtggtgtcaacttcctgcacaggtttcttcgtcatcttgtggagtataaagagaattacatgaatttgagaaacatcctattccatggtattgaatggcaggttcaagggttgcaacttctctgttcacttttaggccctggctcaagcgtgaagcaggtggaattcaagaagaatgttttcagcacaaaaccaggacatgcttttgttccactttcggagatgcttcaccagaacaacaccatcaaagcagttgttttttctgaatgtagaattggatcaactggagccacgttgcttgcttcagctttggcaaacaacagaagtgtggaggatttccaaatatgggaggactccataggatccaagggggcagaagaactctccaagatgattgaggtgaactttatgctgaagaagttgatcatccttgacaacagctccattacagtggctccacttatctctgctgtactcgcacgcaaccgtagagtggaggttcacatatggggacacggttgtggtacaaaaggtggcacgaacagctgtaaaattgttgaattcctgcctgagactgggagcatgaagatctacagcagcattagctcaacagggctgcaacgggttgcttgtgctctgccatggaataccacagtgacaacactggacatgtcaagtgtcccactaaagtccaaatggaccaaagagcttagaggagtccttgaacggaacaggagcctgaaaactgtgaagctcagcaagtgttcccttggggacaaagcagtggtgtatatagctgcagggctttttaagaacagctatttagagaacttgactttggatggaaatagatttggtggagtaggggtggagcatttgctatgccctcttagcaccttttctccacttcagagacaagccaataccacattgaaggttttgagttttggaggagagcgagcgaatataagcaagtttggtgtacctgctatcttgcagatgttggagacaaaccagagcctaattcagctggcaatatgcaatgatgcaagtttgaagccaaatgatgttgtcaaaatctttactagtttagagaggaatgccactcttcgtagcttgtctttgagaggctgtaagggagttgagggggaggcaatcctgcagaccattatgagcactttagaagtcaacccttggattgaagaaattgacctccacggaacacctttgcatgttgctggtaaaacggaccaaatttatgagaagctctgtcaaaatgagagtcttgttctgccaaacgattttcttgatttgccactaagtgctcctacttgctgccgggtttttctatgtggtcaggaatcagcaggtaaaagcacgttacataactccataaatcagagcatgaacccattgaagtcgcctcacataaatataacaagtactttgatgaatccggttttgcaaatggagtacaccaatgagaataaaagtagtgttttctttgatggcaacacaaaaatgacaatgtacaatcttgatggacaagaggagggttttccctcacatgattttatgtttctggtgcatggtggtccatgctttttcatgattgtatctagtttggttctgaagcctgctaataggtatcccaaaagcatagagcagattgaactggagctaatatattggcttaagtttttggtttcaaattctaagagagtctcacaattatttcttcccagtgtaactatagttctcacccattatgacaaggtagctcatctgccagaagggctacagccaattgccacacttgtacaaaggctcagagaagaattccattcatatgcagaaatttaccccactgtttttgccgtggatgcaagatcattggtttcagtaagtagactcacccatcacttgaggatgacaattaagacaatcctccagcaagtacctcaagtttatgaagtatgcaatgatttggttagagttttgcatgactggaggttgaagaataataaagctgtaatcaaatggtctgagttccgtgagatatgtcagctcaacattccagagctaagattgagatcaaggcgtgataatgtagagaaagtggacacaagaagacgtacggttgcaaaatcactgcataacttgggtgaaatcatattttttgaggatcttggagtactgatcttggattgcgactggttctgtcgatatgtccttaaccaactggctacactgaaatcaatcaagacagaaagaagtggttttatccgcaaacaagagcttgagaagattctacaagagaagctgtgcaaccaaattcaagggtcaaactggagagccggtgcatctttccagggcaatgatgtcataaatttgctgttgaagcttgaattgtgttatgaacaggaacctggaaacccagacacattacttctagtgccatcaattcttgaggaaagcaaagaaggtgctcagcagtggcacttggccatgccagagtgcagatatgttggaaggtgtcttaaatgcacagatatacatatgtttttgacaggcgatttctttccaaggcttcaggttcgtttgcagaacaagatcatgtgcatgggacaacaacagggtgcactctacatcttggagaaaaatcttatttatacagtggtcaatagtatccatgtcagagtggtgctgggaagtacattagagtcatccgtcgatgtgcttgcatgctccagcaaaagtgttactgacatggtgaggatattccacaagttaataatcccaaccatactaaacctgtcttcaagtttgatgttcgaggaaagcattatcaggccagactgtgtaaaatatctcataccgcataggttcctccaaacacagcagctgcctctgaagagaatgaagcaaattcttttgtcattgcctgcagaaagcatgtatgattacgagcatacatggagtgccattgaaagcaataaaaggatcatcttacaatcaggatcagatcatgccagagaattgctatcagatgatgatttccatgaggttcttcaccgtagatactatgatctacagcacctcgcaactgaacttgctgtcaaccctgacaatcagcagcaacatgaaatcatccccgaaacagatgtggttgatccttccatattaggcattgcaaaaggtgttgagatggttctacaaagattgaagagagtggaacaaggaataagggacctcaaggaggaaatcgcaagcttgaggtactatgagtatcaccttttgactgaactccacaggaaaatggactacatgatgaattacaacacccagttggaggagaggaaagtgccacagatgttttatcttgttagcctggacaaccggtccaaacagctggtcacaagaatactgcctgggatgcggtccttacgggtgcatatgctatgtgaattccgtagagagatgcatgtagtggaagatcagctcggctgtgacctgattcaagtggacaaccagacggtgaaatccttgctaccttacatgagtaagttcatgaagctgctgacctttgctctgaagatcggcgcgcatttcatcgttgggatgggagagatgatacctgacctgagcagggaggtggtgcgcctgctggactcctcggccttgtacggcacaactgcatctgccatgtccgtgggggctctgggcgcggcagcactgtatggcaagtcaaggaatggtagcacgagcgacatgggagaggatatgacagcagccaggcaatggcttgtggatttcttgaaagggcaaggggttctgacggggatggacatagcacagagatttggcctgtggcgtgttcgatacagagatgacggccacattgcatggatctgcaggaaacacatcgcagcaagggaagaggaaatcttcgagctgccactttgagcatccagaggc

SEQ ID NO: 5294 - DNA, 5427 bp, Zea Mays
tgcagtgtcgcgcgctgaggagacttgcagtcacagtccacagctgcagccaaaaatatatccagccaaacagatatttactacttgtatggagagtcgagttgctatcttcacgctagtagtgtatcataatacggtcagcgctgactagcaaggagccaagcaggacataatactgaagcaggctgcggctgcggctgcagcaacaagtcaaggaggttgaaggcgaattagagagaagaggaagatgttggcggcgacggatccgatgctgtggcacaaggtggccgccgtctccggggttgccgctttggggctcggcacctacggcgcgcacatgttccgccccaagaaccccgcgtacaaagaggtttggcacacggcgtccctgtaccatctcgtccacaccgcggcgctgctcggggcgcccatcaccaaagcgcccccaacgttttcggagggctcctcactgctggaattgtgctcttctctggaacgtaagcattggtccccccctaaccaaaacgtgctacaccgtggcttatcttgaagacaggaagttttcttcaccggcaccattggggggctttgcgtttattgctgcttgggccagcctcctcttctgattaaattgtgcttttccaagaaaacaaaaaaagtcataaacctctctatatggtgttttatcaggttgtgaaaaatatacttgtaaagtgtatacagtggacagtatgcgcctctgtttaataattcaatctgtgattcctatgtttctattctatgatatgcttgctgctcatgatatgttttcagttggacatgccagtgaaattgcgcctctggttaataattcaagctgtatgatgtttatgtaacggccgaggttcaaggcagaccctttgcttgcctaaaagttaatggccacatgttcgctacttgatgcacaaatatgagaatctctctttgctttgaatgaacaatgcgatggtggaacaacacaatataaaactacactcgataaggtcggcaaagttaaagatggttcctttctttatgatgcccccttgacaaggcaggaatctgatttctttccttgtcttgtctttccacaccatcttcagtattgcaacatgtggcatctgacttcataaagcatattgctccttagccatgtacatctgaattccccttccatgattaaggcaacctttgtctttgcgcttctctctttcatctacactccaccatcccctcctaagcatgagtgataggataatcatgataacatcaccatctaagagggatgatgccagagatattggagatattgatttgcagtcctacatggacttggagaacatcgcgttctaccaggttccagcaaatttggaatcagccttgtccatggaaagtgagagatcactaggaattcatgtctgcatggacaacagtggtgtcaacttcctgcacaggtttcttcgtcatcttgtggagtataaagagaattacatgaatttgagaaacatcctattccatggtattgaatggcaggttcaagggttgcaacttctctgttcacttttaggccctggctcaagcgtgaagcaggtggaattcaagaagaatgttttcagcacaaaaccaggacatgcttttgttccactttcggagatgcttcaccagaacaacaccatcaaagcagttgttttttctgaatgtagaattggatcaactggagccacgttgcttgcttcagctttggcaaacaacagaagtgtggaggatttccaaatatgggaggactccataggatccaagggggcagaagaactctccaagatgattgaggtgaactttatgctgaagaagttgatcatccttgacaacagctccattacagtggctccacttatctctgctgtactcgcacgcaaccgtagagtggaggttcacatatggggacacggttgtggtacaaaaggtggcacgaacagctgtaaaattgttgaattcctgcctgagactgggagcatgaagatctacagcagcattagctcaacagggctgcaacgggttgcttgtgctctgccatggaataccacagtgacaacactggacatgtcaagtgtcccactaaagtccaaatggaccaaagagcttagaggagtccttgaacggaacaggagcctgaaaactgtgaagctcagcaagtgttcccttggggacaaagcagtggtgtatatagctgcagggctttttaagaacagctatttagagaacttgactttggatggaaatagatttggtggagtaggggtggagcatttgctatgccctcttagcaccttttctccacttcagagacaagccaataccacattgaaggttttgagttttggaggagagcgagcgaatataagcaagtttggtgtacctgctatcttgcagatgttggagacaaaccagagcctaattcagctggcaatatgcaatgatgcaagtttgaagccaaatgatgttgtcaaaatctttactagtttagagaggaatgccactcttcgtagcttgtctttgagaggctgtaagggagttgagggggaggcaatcctgcagaccattatgagcactttagaagtcaacccttggattgaagaaattgacctccacggaacacctttgcatgttgctggtaaaacggaccaaatttatgagaagctctgtcaaaatgagagtcttgttctgccaaacgattttcttgatttgccactaagtgctcctacttgctgccgggtttttctatgtggtcaggaatcagcaggtaaaagcacgttacataactccataaatcagagcatgaacccattgaagtcgcctcacataaatataacaagtactttgatgaatccggttttgcaaatggagtacaccaatgagaataaaagtagtgttttctttgatggcaacacaaaaatgacaatgtacaatcttgatggacaagaggagggttttccctcacatgattttatgtttctggtgcatggtggtccatgctttttcatgattgtatctagtttggttctgaagcctgctaataggtatcccaaaagcatagagcagattgaactggagctaatatattggcttaagtttttggtttcaaattctaagagagtctcacaattatttcttcccagtgtaactatagttctcacccattatgacaaggtagctcatctgccagaagggctacagccaattgccacacttgtacaaaggctcagagaagaattccattcatatgcagaaatttaccccactgtttttgccgtggatgcaagatcattggtttcagtaagtagactcacccatcacttgaggatgacaattaagacaatcctccagcaagtacctcaagtttatgaagtatgcaatgatttggttagagttttgcatgactggaggttgaagaataataaagctgtaatcaaatggtctgagttccgtgagatatgtcagctcaacattccagagctaagattgagatcaaggcgtgataatgtagagaaagtggacacaagaagacgtacggttgcaaaatcactgcataacttgggtgaaatcatattttttgaggatcttggagtactgatcttggattgcgactggttctgtcgatatgtccttaaccaactggctacactgaaatcaatcaagacagaaagaagtggttttatccgcaaacaagagcttgagaagattctacaagagaagctgtgcaaccaaattcaagggtcaaactggagagccggtgcatctttccagggcaatgatgtcataaatttgctgttgaagcttgaattgtgttatgaacaggaacctggaaacccagacacattacttctagtgccatcaattcttgaggaaagcaaagaaggtgctcagcagtggcacttggccatgccagagtgcagatatgttggaaggtgtcttaaatgcacagatatacatatgtttttgacaggcgatttctttccaaggcttcaggttcgtttgcagaacaagatcatgtgcatgggacaacaacagggtgcactctacatcttggagaaaaatcttatttatacagtggtcaatagtatccatgtcagagtggtgctgggaagtacattagagtcatccgtcgatgtgcttgcatgctccagcaaaagtgttactgacatggtgaggatattccacaagttaataatcccaaccatactaaacctgtcttcaagtttgatgttcgaggaaagcattatcaggccagactgtgtaaaatatctcataccgcataggttcctccaaacacagcagctgcctctgaagagaatgaagcaaattcttttgtcattgcctgcagaaagcatgtatgattacgagcatacatggagtgccattgaaagcaataaaaggatcatcttacaatcaggatcagatcatgccagagaattgctatcagatgatgatttccatgaggttcttcaccgtagatactatgatctacagcacctcgcaactgaacttgctgtcaaccctgacaatcagcagcaacatgaaatcatccccgaaacagatgtggttgatccttccatattaggcattgcaaaaggtgttgagatggttctacaaagattgaagagagtggaacaaggaataagggacctcaaggaggaaatcgcaagcttgaggtactatgagtatcaccttttgactgaactccacaggaaaatggactacatgatgaattacaacacccagttggaggagaggaaagtgccacagatgttttatcttgttagcctggacaaccggtccaaacagctggtcacaagaatactgcctgggatgcggtccttacgggtgcatatgctatgtgaattccgtagagagatgcatgtagtggaagatcagctcggctgtgacctgattcaagtggacaaccagacggtgaaatccttgctaccttacatgagtaagttcatgaagctgctgacctttgctctgaagatcggcgcgcatttcatcgttgggatgggagagatgatacctgacctgagcagggaggtggtgcgcctgctggactcctcggccttgtacggcacaactgcatctgccatgtccgtgggggctctgggcgcggcagcactgtatggcaagtcaaggaatggtagcacgagcgacatgggagaggatatgacagcagccaggcaatggcttgtggatttcttgaaagggcaaggggttctgacggggatggacatagcacagagatttggcctgtggcgtgttcgatacagagatgacggccacattgcatggatctgcaggaaacacatcgcagcaagggaagaggaaatcttcgagctgccactttgagcatccagaggc

SEQ ID NO: 5295 - DNA, 5398 bp, Zea Mays
gagacttgcagtcacagtccacagctgcagccaaaaatatatccagccaaacagatatttactacttgtatggagagtcgagttgctatcttcacgctagtagtgtatcataatacggtcagcgctgactagcaaggagccaagcaggacataatactgaagcaggctgcggctgcggctgcagcaacaagtcaaggaggttgaaggcgaattagagagaagaggaagatgttggcggcgacggatccgatgctgtggcacaaggtggccgccgtctccggggttgccgctttggggctcggcacctacggcgcgcacatgttccgccccaagaaccccgcgtacaaagaggtttggcacacggcgtccctgtaccatctcgtccacaccgcggcgctgctcggggcgcccatcaccaaagcgcccccaacgttttcggagggctcctcactgctggaattgtgctcttctctggaacgtgctacaccgtggcttatcttgaagacaggaagttttcttcaccggcaccattggggggctttgcgtttattgctgcttgggccagcctcctcttctgattaaattgtgcttttccaagaaaacaaaaaaagtcataaacctctctatatggtgttttatcaggttgtgaaaaatatacttgtaaagtgtatacagtggacagtatgcgcctctgtttaataattcaatctgtgattcctatgtttctattctatgatatgcttgctgctcatgatatgttttcagttggacatgccagtgaaattgcgcctctggttaataattcaagctgtatgatgtttatgtaacggccgaggttcaaggcagaccctttgcttgcctaaaagttaatggccacatgttcgctacttgatgcacaaatatgagaatctctctttgctttgaatgaacaatgcgatggtggaacaacacaatataaaactacactcgataagttactggttgtctttccaggtcggcaaagttaaagatggttcctttctttatgatgcccccttgacaaggcaggaatctgatttctttccttgtcttgtctttccacaccatcttcagtattgcaacatgtggcatctgacttcataaagcatattgctccttagccatgtacatctgaattccccttccatgattaaggcaacctttgtctttgcgcttctctctttcatctacactccaccatcccctcctaagcatgagtgataggataatcatgataacatcaccatctaagagggatgatgccagagatattggagatattgatttgcagtcctacatggacttggagaacatcgcgttctaccaggttccagcaaatttggaatcagccttgtccatggaaagtgagagatcactaggaattcatgtctgcatggacaacagtggtgtcaacttcctgcacaggtttcttcgtcatcttgtggagtataaagagaattacatgaatttgagaaacatcctattccatggtattgaatggcaggttcaagggttgcaacttctctgttcacttttaggccctggctcaagcgtgaagcaggtggaattcaagaagaatgttttcagcacaaaaccaggacatgcttttgttccactttcggagatgcttcaccagaacaacaccatcaaagcagttgttttttctgaatgtagaattggatcaactggagccacgttgcttgcttcagctttggcaaacaacagaagtgtggaggatttccaaatatgggaggactccataggatccaagggggcagaagaactctccaagatgattgaggtgaactttatgctgaagaagttgatcatccttgacaacagctccattacagtggctccacttatctctgctgtactcgcacgcaaccgtagagtggaggttcacatatggggacacggttgtggtacaaaaggtggcacgaacagctgtaaaattgttgaattcctgcctgagactgggagcatgaagatctacagcagcattagctcaacagggctgcaacgggttgcttgtgctctgccatggaataccacagtgacaacactggacatgtcaagtgtcccactaaagtccaaatggaccaaagagcttagaggagtccttgaacggaacaggagcctgaaaactgtgaagctcagcaagtgttcccttggggacaaagcagtggtgtatatagctgcagggctttttaagaacagctatttagagaacttgactttggatggaaatagatttggtggagtaggggtggagcatttgctatgccctcttagcaccttttctccacttcagagacaagccaataccacattgaaggttttgagttttggaggagagcgagcgaatataagcaagtttggtgtacctgctatcttgcagatgttggagacaaaccagagcctaattcagctggcaatatgcaatgatgcaagtttgaagccaaatgatgttgtcaaaatctttactagtttagagaggaatgccactcttcgtagcttgtctttgagaggctgtaagggagttgagggggaggcaatcctgcagaccattatgagcactttagaagtcaacccttggattgaagaaattgacctccacggaacacctttgcatgttgctggtaaaacggaccaaatttatgagaagctctgtcaaaatgagagtcttgttctgccaaacgattttcttgatttgccactaagtgctcctacttgctgccgggtttttctatgtggtcaggaatcagcaggtaaaagcacgttacataactccataaatcagagcatgaacccattgaagtcgcctcacataaatataacaagtactttgatgaatccggttttgcaaatggagtacaccaatgagaataaaagtagtgttttctttgatggcaacacaaaaatgacaatgtacaatcttgatggacaagaggagggttttccctcacatgattttatgtttctggtgcatggtggtccatgctttttcatgattgtatctagtttggttctgaagcctgctaataggtatcccaaaagcatagagcagattgaactggagctaatatattggcttaagtttttggtttcaaattctaagagagtctcacaattatttcttcccagtgtaactatagttctcacccattatgacaaggtagctcatctgccagaagggctacagccaattgccacacttgtacaaaggctcagagaagaattccattcatatgcagaaatttaccccactgtttttgccgtggatgcaagatcattggtttcagtaagtagactcacccatcacttgaggatgacaattaagacaatcctccagcaagtacctcaagtttatgaagtatgcaatgatttggttagagttttgcatgactggaggttgaagaataataaagctgtaatcaaatggtctgagttccgtgagatatgtcagctcaacattccagagctaagattgagatcaaggcgtgataatgtagagaaagtggacacaagaagacgtacggttgcaaaatcactgcataacttgggtgaaatcatattttttgaggatcttggagtactgatcttggattgcgactggttctgtcgatatgtccttaaccaactggctacactgaaatcaatcaagacagaaagaagtggttttatccgcaaacaagagcttgagaagattctacaagagaagctgtgcaaccaaattcaagggtcaaactggagagccggtgcatctttccagggcaatgatgtcataaatttgctgttgaagcttgaattgtgttatgaacaggaacctggaaacccagacacattacttctagtgccatcaattcttgaggaaagcaaagaaggtgctcagcagtggcacttggccatgccagagtgcagatatgttggaaggtgtcttaaatgcacagatatacatatgtttttgacaggcgatttctttccaaggcttcaggttcgtttgcagaacaagatcatgtgcatgggacaacaacagggtgcactctacatcttggagaaaaatcttatttatacagtggtcaatagtatccatgtcagagtggtgctgggaagtacattagagtcatccgtcgatgtgcttgcatgctccagcaaaagtgttactgacatggtgaggatattccacaagttaataatcccaaccatactaaacctgtcttcaagtttgatgttcgaggaaagcattatcaggccagactgtgtaaaatatctcataccgcataggttcctccaaacacagcagctgcctctgaagagaatgaagcaaattcttttgtcattgcctgcagaaagcatgtatgattacgagcatacatggagtgccattgaaagcaataaaaggatcatcttacaatcaggatcagatcatgccagagaattgctatcagatgatgatttccatgaggttcttcaccgtagatactatgatctacagcacctcgcaactgaacttgctgtcaaccctgacaatcagcagcaacatgaaatcatccccgaaacagatgtggttgatccttccatattaggcattgcaaaaggtgttgagatggttctacaaagattgaagagagtggaacaaggaataagggacctcaaggaggaaatcgcaagcttgaggtactatgagtatcaccttttgactgaactccacaggaaaatggactacatgatgaattacaacacccagttggaggagaggaaagtgccacagatgttttatcttgttagcctggacaaccggtccaaacagctggtcacaagaatactgcctgggatgcggtccttacgggtgcatatgctatgtgaattccgtagagagatgcatgtagtggaagatcagctcggctgtgacctgattcaagtggacaaccagacggtgaaatccttgctaccttacatgagtaagttcatgaagctgctgacctttgctctgaagatcggcgcgcatttcatcgttgggatgggagagatgatacctgacctgagcagggaggtggtgcgcctgctggactcctcggccttgtacggcacaactgcatctgccatgtccgtgggggctctgggcgcggcagcactgtatggcaagtcaaggaatggtagcacgagcgacatgggagaggatatgacagcagccaggcaatggcttgtggatttcttgaaagggcaaggggttctgacggggatggacatagcacagagatttggcctgtggcgtgttcgatacagagatgacggccacattgcatggatctgcaggaaacacatcgcagcaagggaagaggaaatcttcgagctgccactttgagcatccagaggc

SEQ ID NO: 5296 - DNA, 4550 bp, Zea Mays
gcattggtccccccctaaccaaaacgtgctacaccgtggcttatcttgaagacaggaagttttcttcaccggcaccattggggggctttgcgtttattgctgcttgggccagcctcctcttctgattaaattgtgcttttccaagaaaacaaaaaaagtcataaacctctctatatggtgttttatcaggttgtgaaaaatatacttgtaaagtgtatacagtggacagtatgcgcctctgtttaataattcaatctgtgattcctatgtttctattctatgatatgcttgctgctcatgatatgttttcagttggacatgccagtgaaattgcgcctctggttaataattcaagctgtatgatgtttatgtaacggccgaggttcaaggcagaccctttgcttgcctaaaagttaatggccacatgttcgctacttgatgcacaaatatgagaatctctctttgctttgaatgaacaatgcgatggtggaacaacacaatataaaactacactcgataaggtcggcaaagttaaagatggttcctttctttatgatgcccccttgacaaggcaggaatctgatttctttccttgtcttgtctttccacaccatcttcagtattgcaacatgtggcatctgacttcataaagcatattgctccttagccatgtacatctgaattccccttccatgattaaggcaacctttgtctttgcgcttctctctttcatctacactccaccatcccctcctaagcatgagtgataggataatcatgataacatcaccatctaagagggatgatgccagagatattggagatattgatttgcagtcctacatggacttggagaacatcgcgttctaccaggttccagcaaatttggaatcagccttgtccatggaaagtgagagatcactaggaattcatgtctgcatggacaacagtggtgtcaacttcctgcacaggtttcttcgtcatcttgtggagtataaagagaattacatgaatttgagaaacatcctattccatggtattgaatggcaggttcaagggttgcaacttctctgttcacttttaggccctggctcaagcgtgaagcaggtggaattcaagaagaatgttttcagcacaaaaccaggacatgcttttgttccactttcggagatgcttcaccagaacaacaccatcaaagcagttgttttttctgaatgtagaattggatcaactggagccacgttgcttgcttcagctttggcaaacaacagaagtgtggaggatttccaaatatgggaggactccataggatccaagggggcagaagaactctccaagatgattgaggtgaactttatgctgaagaagttgatcatccttgacaacagctccattacagtggctccacttatctctgctgtactcgcacgcaaccgtagagtggaggttcacatatggggacacggttgtggtacaaaaggtggcacgaacagctgtaaaattgttgaattcctgcctgagactgggagcatgaagatctacagcagcattagctcaacagggctgcaacgggttgcttgtgctctgccatggaataccacagtgacaacactggacatgtcaagtgtcccactaaagtccaaatggaccaaagagcttagaggagtccttgaacggaacaggagcctgaaaactgtgaagctcagcaagtgttcccttggggacaaagcagtggtgtatatagctgcagggctttttaagaacagctatttagagaacttgactttggatggaaatagatttggtggagtaggggtggagcatttgctatgccctcttagcaccttttctccacttcagagacaagccaataccacattgaaggttttgagttttggaggagagcgagcgaatataagcaagtttggtgtacctgctatcttgcagatgttggagacaaaccagagcctaattcagctggcaatatgcaatgatgcaagtttgaagccaaatgatgttgtcaaaatctttactagtttagagaggaatgccactcttcgtagcttgtctttgagaggctgtaagggagttgagggggaggcaatcctgcagaccattatgagcactttagaagtcaacccttggattgaagaaattgacctccacggaacacctttgcatgttgctggtaaaacggaccaaatttatgagaagctctgtcaaaatgagagtcttgttctgccaaacgattttcttgatttgccactaagtgctcctacttgctgccgggtttttctatgtggtcaggaatcagcagtgtaactatagttctcacccattatgacaaggtagctcatctgccagaagggctacagccaattgccacacttgtacaaaggctcagagaagaattccattcatatgcagaaatttaccccactgtttttgccgtggatgcaagatcattggtttcagtaagtagactcacccatcacttgaggatgacaattaagacaatcctccagcaagtacctcaagtttatgaagtatgcaatgatttggttagagttttgcatgactggaggttgaagaataataaagctgtaatcaaatggtctgagttccgtgagatatgtcagctcaacattccagagctaagattgagatcaaggcgtgataatgtagagaaagtggacacaagaagacgtacggttgcaaaatcactgcataacttgggtgaaatcatattttttgaggatcttggagtactgatcttggattgcgactggttctgtcgatatgtccttaaccaactggctacactgaaatcaatcaagacagaaagaagtggttttatccgcaaacaagagcttgagaagattctacaagagaagctgtgcaaccaaattcaagggtcaaactggagagccggtgcatctttccagggcaatgatgtcataaatttgctgttgaagcttgaattgtgttatgaacaggaacctggaaacccagacacattacttctagtgccatcaattcttgaggaaagcaaagaaggtgctcagcagtggcacttggccatgccagagtgcagatatgttggaaggtgtcttaaatgcacagatatacatatgtttttgacaggcgatttctttccaaggcttcaggttcgtttgcagaacaagatcatgtgcatgggacaacaacagggtgcactctacatcttggagaaaaatcttatttatacagtggtcaatagtatccatgtcagagtggtgctgggaagtacattagagtcatccgtcgatgtgcttgcatgctccagcaaaagtgttactgacatggtgaggatattccacaagttaataatcccaaccatactaaacctgtcttcaagtttgatgttcgaggaaagcattatcaggccagactgtgtaaaatatctcataccgcataggttcctccaaacacagcagctgcctctgaagagaatgaagcaaattcttttgtcattgcctgcagaaagcatgtatgattacgagcatacatggagtgccattgaaagcaataaaaggatcatcttacaatcaggatcagatcatgccagagaattgctatcagatgatgatttccatgaggttcttcaccgtagatactatgatctacagcacctcgcaactgaacttgctgtcaaccctgacaatcagcagcaacatgaaatcatccccgaaacagatgtggttgatccttccatattaggcattgcaaaaggtgttgagatggttctacaaagattgaagagagtggaacaaggaataagggacctcaaggaggaaatcgcaagcttgaggtactatgagtatcaccttttgactgaactccacaggaaaatggactacatgatgaattacaacacccagttggaggagaggaaagtgccacagatgttttatcttgttagcctggacaaccggtccaaacagctggtcacaagaatactgcctgggatgcggtccttacgggtgcatatgctatgtgaattccgtagagagatgcatgtagtggaagatcagctcggctgtgacctgattcaagtggacaaccagacggtgaaatccttgctaccttacatgagtaagttcatgaagctgctgacctttgctctgaagatcggcgcgcatttcatcgttgggatgggagagatgatacctgacctgagcagggaggtggtgcgcctgctggactcctcggccttgtacggcacaactgcatctgccatgtccgtgggggctctgggcgcggcagcactgtatggcaagtcaaggaatggtagcacgagcgacatgggagaggatatgacagcagccaggcaatggcttgtggatttcttgaaagggcaaggggttctgacggggatggacatagcacagagatttggcctgtggcgtgttcgatacagagatgacggccacattgcatggatctgcaggaaacacatcgcagcaagggaagaggaaatcttcgagctgccactttgagcatccagaggc

SEQ ID NO: 5297 - DNA, 2958 bp, Zea Mays
cggacagtgagtgtcagacatccccttccccgtttcaatcgcgaccacgcgctcgcagccgcaatcgactcgacccggcccgaccgagctccccgtgcccaacaaaccctcacaattaccagttccccatcgccgacgccgtacaccggagctcgaccgctccgcgtggtgtccgattctacttcgtcgaagactacaagcggcctcctagagttccacctcaactgcgcaggggaagggaggctcccaacgcatccccgccgacctcaacgccgacggtcctttcctaacccgcagccgccggccgcagtctctctcttctggtccagtgggggctgctatcttccaggaatattggagatgtgccttcaacactctagggctcgattgtctccagatgagcaacttgctgcagaaaaaagttttgccttgtattgcaagccagttgaattgtacaatattatccagaggcgagctattaaaaatccaccttttgttcaaagatcccttctttataagatacaggcaaggagaaaaaagaggattcagataactgtatcactttctgcaagtacaaatacacaagcacagaatatctttcccctttatgtacttttagctagacctaccagtaatatttcgcttgaggggcattctccgatatatcgattcagtagggcttgtttgcttacaaattttagtgaatttggaaataaagacaaaactgaagccacattcatcatccctgatgtgaagaatttatcaacctcccgtgcttgcaaccttaacattatatttattagccgtgggcaagtaggacaaattattggtgaagatagctgttccgggaatgatgtggaaggatcttccctccaaaagcttgaagggaaatgttcctggggtaaaatgccgactaatttacttgcgccctctttggagaaatgtgtgactttaagtacaggaaatgctgtggatttgacttctacagttacaatgaacccaagcttcttagagccaaaatttctggaacaagacagttgcttgacattttgctctcataaggttgatgctacgggttcataccaattacaagtatgcatatccgcagaagaggctggcgcaagagaattacttttatctccttattattgcaattactcatataataatgtcccaccttctctattaccagaaatcataaggttgagagctggaaatgtactttttaattacaagtactacaacaatacaatgcaaaagactgaagttactgaagatttttcctgcccattttgcttggtaccatgtggaagcttcaagggcctaggatgccacttaaattcatcacatgacctgttccactatgagttgtggatatctgaagagtgccaggctgtgaatgttagtctgaaggctgatgcctggaaaactgaggtaaattggtgatatgatataggactgttacaatgaaatatatcgatatacaaattctactttgcatgtgtctaaacgaccccttagtgttcttctacccgtgtctttactacctctgtgctgttcttagctttgtggtttctttgttgagtacaaaatcaaatggtgcatgaacaatcgattagtacttcacattagaaaattaactacatttcccaaaaatgtcttcaaataatatactgtatgcattgctggattttctgttggataaggttctacaaacttggcaagttggcattagggtactcatgcatggtggatactatttatttctttaatctgaagaatttcacatttttaaactaatgggccagttatatctagtttgtggcagagggagttgatccaaggcatcaaacattttcctactgctcgaggtttaagaagcgtagaaggttggaaaccacagctgagaaattcaggcatgttcacccacatattatggaatcaggatcacatgaagatgcccaggcagggtctgaagatgactatgtgcaaagggaaaatgggctttctgtagcaaatacttcagttgaccctagtcagcctgtacatgggagcaatctttcaccaccaacagtgctacagtttggaaagtcaagaaaactatctgccgagcgatctgaccccagaaaccgacaactgttgcaaaagcgtcagttcttccattcacacagggcacagccaatgccattggaacaagtcctctcagatcatgatagcgaagacgaggttgatgatgacattgccgactttgaggatagacggatgctcgacgattttgttgatgttacaaaagatgagaagcttattatgcatatgtggaattcatttgttcgaaagcaaagggtgctagccgatggtcatataccgtgggcatgcgaggcgttctccagatgccatggacaacagcttgtacaaaaccctgccctgctgtggggctggcgtttcttcatgattaaactctggaaccacagccttcttgacgcccgcgccatgaatgcttgcaacacaatccttcaaggctaccaagacggaagtgcggaccccaagtaaatctacaatccagagaaatcgttggccagcgtgtgtaagatctgccggttccggcggttatttctgaaccccaaaacagctatgtgaagaactggaatggggccatagcggcatttgttttaaggtttagggttactccatttttccaagggaggaaactaatttcccttggaaaaatgaaaatccattgggaaaaatgagtttcccaaactagccattaaaagggtagcttcctcccacctagggggaaaaaaactaggagggaaaagctggatccttggccgagacaatcatcattgcttcattcgtgattcggttgtatttatcggtaccagttgttgttggcatgtggagtttgtatggatgataatgataaatgaagtgattcactgcagcccttgtatagtt

SEQ ID NO: 5298 - DNA, 3296 bp, Zea Mays
gtgagtgtcagacatccccttccccgtttcaatcgcgaccacgcgctcgcagccgcaatcgactcgacccggcccgaccgagctccccgtgcccaacaaaccctcacaattaccagttccccatcgccgacgccgtacaccggagctcgaccgctccgcgtggtgtccgattctacttcgtcgaagactacaagcggcctcctagagttccacctcaactgcgcaggggaagggaggctcccaacgcatccccgccgacctcaacgccgacggtcctttcctaacccgcagccgccggccgcagtctctctcttctggtccagtgggggctgctatcttccaggaatattggagatgtgccttcaacactctagggctcgattgtctccagatgagcaacttgctgcagaaaaaagttttgccttgtattgcaagccagttgaattgtacaatattatccagaggcgagctattaaaaatccaccttttgttcaaagatcccttctttataagatacaggcaaggagaaaaaagaggattcagataactgtatcactttctgcaagtacaaatacacaagcacagaatatctttcccctttatgtacttttagctagacctaccagtaatatttcgcttgaggggcattctccgatatatcgattcagtagggcttgtttgcttacaaattttagtgaatttggaaataaagacaaaactgaagccacattcatcatccctgatgtgaagaatttatcaacctcccgtgcttgcaaccttaacattatatttattagccgtgggcaagtaggacaaattattggtgaagatagctgttccgggaatgatgtggaaggatcttccctccaaaagcttgaagggaaatgttcctggggtaaaatgccgactaatttacttgcgccctctttggagaaatgtgtgactttaagtacaggaaatgctgtggatttgacttctacagttacaatgaacccaagcttcttagagccaaaatttctggaacaagacagttgcttgacattttgctctcataaggttgatgctacgggttcataccaattacaagtatgcatatccgcagaagaggctggcgcaagagaattacttttatctccttattattgcaattactcatataataatgtcccaccttctctattaccagaaatcataaggttgagagctggaaatgtactttttaattacaagtactacaacaatacaatgcaaaagactgaaggtcatctctctctctcccttttcgctccctctctccttcccccgtctgcctcggttgcatccactttagctgttgccaggctgcatcatgcattctcttatttctagtttcatgtatttattccttgtactgtcttatccactatacctgtgtgctaagaatgacagagagaaatagcttactttactgttcattctacagttattaggatgtacgaacacacagactaaaaattgttcaatgcttgggacatctatcggtggacagactttcttattgcttcttctttcttgcttttatgcttcacttttttcttatacattcccttgatatgtttttaccagttactgaagatttttcctgcccattttgcttggtaccatgtggaagcttcaagggcctaggatgccacttaaattcatcacatgacctgttccactatgagttgtggatatctgaagagtgccaggctgtgaatgttagtctgaaggctgatgcctggaaaactgaggtaaattggtgatatgatataggactgttacaatgaaatatatcgatatacaaattctactttgcatgtgtctaaacgaccccttagtgttcttctacccgtgtctttactacctctgtgctgttcttagctttgtggtttctttgttgagtacaaaatcaaatggtgcatgaacaatcgattagtacttcacattagaaaattaactacatttcccaaaaatgtcttcaaataatatactgtatgcattgctggattttctgttggataaggttctacaaacttggcaagttggcattagggtactcatgcatggtggatactatttatttctttaatctgaagaatttcacatttttaaactaatgggccagttatatctagtttgtggcagagggagttgatccaaggcatcaaacattttcctactgctcgaggtttaagaagcgtagaaggttggaaaccacagctgagaaattcaggcatgttcacccacatattatggaatcaggatcacatgaagatgcccaggcagggtctgaagatgactatgtgcaaagggaaaatgggctttctgtagcaaatacttcagttgaccctagtcagcctgtacatgggagcaatctttcaccaccaacagtgctacagtttggaaagtcaagaaaactatctgccgagcgatctgaccccagaaaccgacaactgttgcaaaagcgtcagttcttccattcacacagggcacagccaatgccattggaacaagtcctctcagatcatgatagcgaagacgaggttgatgatgacattgccgactttgaggatagacggatgctcgacgattttgttgatgttacaaaagatgagaagcttattatgcatatgtggaattcatttgttcgaaagcaaagggtgctagccgatggtcatataccgtgggcatgcgaggcgttctccagatgccatggacaacagcttgtacaaaaccctgccctgctgtggggctggcgtttcttcatgattaaactctggaaccacagccttcttgacgcccgcgccatgaatgcttgcaacacaatccttcaaggctaccaagacggaagtgcggaccccaagtaaatctacaatccagagaaatcgttggccagcgtgtgtaagatctgccggttccggcggttatttctgaaccccaaaacagctatgtgaagaactggaatggggccatagcggcatttgttttaaggtttagggttactccatttttccaagggaggaaactaatttcccttggaaaaatgaaaatccattgggaaaaatgagtttcccaaactagccattaaaagggtagcttcctcccacctagggggaaaaaaactaggagggaaaagctggatccttggccgagacaatcatcattgcttcattcgtgattcggttgtatttatcggtaccagttgttgttggcatgtggagtttgtatggatgataatgataaatgaagtgattcactgcagcccttgtatagtt

SEQ ID NO: 5299 - DNA, 2935 bp, Zea Mays
gtgagtgtcagacatccccttccccgtttcaatcgcgaccacgcgctcgcagccgcaatcgactcgacccggcccgaccgagctccccgtgcccaacaaaccctcacaattaccagttccccatcgccgacgccgtacaccggagctcgaccgctccgcgtggtgtccgattctacttcgtcgaagactacaagcggcctcctagagttccacctcaactgcgcaggggaagggaggctcccaacgcatccccgccgacctcaacgccgacggtcctttcctaacccgcagccgccggccgcagtctctctcttctggtccagtgggggctgctatcttccaggaatattggagatgtgccttcaacactctagggctcgattgtctccagatgagcaacttgctgcagaaaaaagttttgccttgtattgcaagccagttgaattgtacaatattatccagaggcgagctattaaaaatccaccttttgttcaaagatcccttctttataagatacaggattcagataactgtatcactttctgcaagtacaaatacacaagcacagaatatctttcccctttatgtacttttagctagacctaccagtaatatttcgcttgaggggcattctccgatatatcgattcagtagggcttgtttgcttacaaattttagtgaatttggaaataaagacaaaactgaagccacattcatcatccctgatgtgaagaatttatcaacctcccgtgcttgcaaccttaacattatatttattagccgtgggcaagtaggacaaattattggtgaagatagctgttccgggaatgatgtggaaggatcttccctccaaaagcttgaagggaaatgttcctggggtaaaatgccgactaatttacttgcgccctctttggagaaatgtgtgactttaagtacaggaaatgctgtggatttgacttctacagttacaatgaacccaagcttcttagagccaaaatttctggaacaagacagttgcttgacattttgctctcataaggttgatgctacgggttcataccaattacaagtatgcatatccgcagaagaggctggcgcaagagaattacttttatctccttattattgcaattactcatataataatgtcccaccttctctattaccagaaatcataaggttgagagctggaaatgtactttttaattacaagtactacaacaatacaatgcaaaagactgaagttactgaagatttttcctgcccattttgcttggtaccatgtggaagcttcaagggcctaggatgccacttaaattcatcacatgacctgttccactatgagttgtggatatctgaagagtgccaggctgtgaatgttagtctgaaggctgatgcctggaaaactgaggtaaattggtgatatgatataggactgttacaatgaaatatatcgatatacaaattctactttgcatgtgtctaaacgaccccttagtgttcttctacccgtgtctttactacctctgtgctgttcttagctttgtggtttctttgttgagtacaaaatcaaatggtgcatgaacaatcgattagtacttcacattagaaaattaactacatttcccaaaaatgtcttcaaataatatactgtatgcattgctggattttctgttggataaggttctacaaacttggcaagttggcattagggtactcatgcatggtggatactatttatttctttaatctgaagaatttcacatttttaaactaatgggccagttatatctagtttgtggcagagggagttgatccaaggcatcaaacattttcctactgctcgaggtttaagaagcgtagaaggttggaaaccacagctgagaaattcaggcatgttcacccacatattatggaatcaggatcacatgaagatgcccaggcagggtctgaagatgactatgtgcaaagggaaaatgggctttctgtagcaaatacttcagttgaccctagtcagcctgtacatgggagcaatctttcaccaccaacagtgctacagtttggaaagtcaagaaaactatctgccgagcgatctgaccccagaaaccgacaactgttgcaaaagcgtcagttcttccattcacacagggcacagccaatgccattggaacaagtcctctcagatcatgatagcgaagacgaggttgatgatgacattgccgactttgaggatagacggatgctcgacgattttgttgatgttacaaaagatgagaagcttattatgcatatgtggaattcatttgttcgaaagcaaagggtgctagccgatggtcatataccgtgggcatgcgaggcgttctccagatgccatggacaacagcttgtacaaaaccctgccctgctgtggggctggcgtttcttcatgattaaactctggaaccacagccttcttgacgcccgcgccatgaatgcttgcaacacaatccttcaaggctaccaagacggaagtgcggaccccaagtaaatctacaatccagagaaatcgttggccagcgtgtgtaagatctgccggttccggcggttatttctgaaccccaaaacagctatgtgaagaactggaatggggccatagcggcatttgttttaaggtttagggttactccatttttccaagggaggaaactaatttcccttggaaaaatgaaaatccattgggaaaaatgagtttcccaaactagccattaaaagggtagcttcctcccacctagggggaaaaaaactaggagggaaaagctggatccttggccgagacaatcatcattgcttcattcgtgattcggttgtatttatcggtaccagttgttgttggcatgtggagtttgtatggatgataatgataaatgaagtgattcactgcagcccttgtatagtt

SEQ ID NO: 5300 - DNA, 2966 bp, Zea Mays
gtgagtgtcagacatccccttccccgtttcaatcgcgaccacgcgctcgcagccgcaatcgactcgacccggcccgaccgagctccccgtgcccaacaaaccctcacaattaccagttccccatcgccgacgccgtacaccggagctcgaccgctccgcgtggtgtccgattctacttcgtcgaagactacaagcggcctcctagagttccacctcaactgcgcaggggaagggaggctcccaacgcatccccgccgacctcaacgccgacggtcctttcctaacccgcagccgccggccgcagtctctctcttctggtccagtgggggctgctatcttccaggaatattggagatgtgccttcaacactctagggctcgattgtctccagatgagcaacttgctgcagaaaaaagttttgccttgtattgcaagccagttgaattgtacaatattatccagaggcgagctattaaaaatccaccttttgttcaaagatcccttctttataagatacaggcaaggagaaaaaagaggattcagataactgtatcactttctgcaagtacaaatacacaagcacagaatatctttcccctttatgtacttttagctagacctaccagtaatatttcgcttgaggggcattctccgatatatcgattcagtagggcttgtttgcttacaaattttagtgaatttggaaataaagacaaaactgaagccacattcatcatccctgatgtgaagaatttatcaacctcccgtgcttgcaaccttaacattatatttattagccgtgggcaagtaggacaaattattggtgaagatagctgttccgggaatgatgtggaaggatcttccctccaaaagcttgaagggaaatgttcctggggtaaaatgccgactaatttacttgcgccctctttggagaaatgtgtgactttaagtacaggaaatgctgtggatttgacttctacagttacaatgaacccaagcttcttagagccaaaatttctggaacaagacagttgcttgacattttgctctcataaggttgatgctacgggttcataccaattacaagtatgcatatccgcagaagaggctggcgcaagagaattacttttatctccttattattgcaattactcatataataatgtcccaccttctctattaccagaaatcataaggttgagagctggaaatgtactttttaattacaagtactacaacaatacaatgcaaaagactgaagttactgaagatttttcctgcccattttgcttggtaccatgtggaagcttcaagggcctaggatgccacttaaattcatcacatgacctgttccactatgagttgtggatatctgaagagtgccaggctgtgaatgttagtctgaaggctgatgcctggaaaactgaggtaaattggtgatatgatataggactgttacaatgaaatatatcgatatacaaattctactttgcatgtgtctaaacgaccccttagtgttcttctacccgtgtctttactacctctgtgctgttcttagctttgtggtttctttgttgagtacaaaatcaaatggtgcatgaacaatcgattagtacttcacattagaaaattaactacatttcccaaaaatgtcttcaaataatatactgtatgcattgctggattttctgttggataaggttctacaaacttggcaagttggcattagggtactcatgcatggtggatactatttatttctttaatctgaagaatttcacatttttaaactaatgggccagttatatctagtttgtggcagagggagttgatccaaggcatcaaacattttcctactgctcgaggtttaagaagcgtagaaggttggaaaccacagctgagaaattcaggcatgttcacccacatattatggaatcaggatcacatgaagatgcccaggcagggtctgaagatgactatgtgcaaagggaaaatgggctttctgtagcaaatacttcagttgaccctagtcagcctgtacatgggagcaatctttcaccaccaacagtgctacagtttggaaagtcaagaaaactatctgccgagcgatctgaccccagaaagtaacgtttttttgccgacaactgttgcaaaagcgtcagttcttccattcacacagggcacagccaatgccattggaacaagtcctctcagatcatgatagcgaagacgaggttgatgatgacattgccgactttgaggatagacggatgctcgacgattttgttgatgttacaaaagatgagaagcttattatgcatatgtggaattcatttgttcgaaagcaaagggtgctagccgatggtcatataccgtgggcatgcgaggcgttctccagatgccatggacaacagcttgtacaaaaccctgccctgctgtggggctggcgtttcttcatgattaaactctggaaccacagccttcttgacgcccgcgccatgaatgcttgcaacacaatccttcaaggctaccaagacggaagtgcggaccccaagtaaatctacaatccagagaaatcgttggccagcgtgtgtaagatctgccggttccggcggttatttctgaaccccaaaacagctatgtgaagaactggaatggggccatagcggcatttgttttaaggtttagggttactccatttttccaagggaggaaactaatttcccttggaaaaatgaaaatccattgggaaaaatgagtttcccaaactagccattaaaagggtagcttcctcccacctagggggaaaaaaactaggagggaaaagctggatccttggccgagacaatcatcattgcttcattcgtgattcggttgtatttatcggtaccagttgttgttggcatgtggagtttgtatggatgataatgataaatgaagtgattcactgcagcccttgtatagtt

SEQ ID NO: 5301 - DNA, 2578 bp, Zea Mays
gtgagtgtcagacatccccttccccgtttcaatcgcgaccacgcgctcgcagccgcaatcgactcgacccggcccgaccgagctccccgtgcccaacaaaccctcacaattaccagttccccatcgccgacgccgtacaccggagctcgaccgctccgcgtggtgtccgattctacttcgtcgaagactacaagcggcctcctagagttccacctcaactgcgcaggggaagggaggctcccaacgcatccccgccgacctcaacgccgacggtcctttcctaacccgcagccgccggccgcagtctctctcttctggtccagtgggggctgctatcttccaggaatattggagatgtgccttcaacactctagggctcgattgtctccagatgagcaacttgctgcagaaaaaagttttgccttgtattgcaagccagttgaattgtacaatattatccagaggcgagctattaaaaatccaccttttgttcaaagatcccttctttataagatacaggcaaggagaaaaaagaggattcagataactgtatcactttctgcaagtacaaatacacaagcacagaatatctttcccctttatgtacttttagctagacctaccagtaatatttcgcttgaggggcattctccgatatatcgattcagtagggcttgtttgcttacaaattttagtgaatttggaaataaagacaaaactgaagccacattcatcatccctgatgtgaagaatttatcaacctcccgtgcttgcaaccttaacattatatttattagccgtgggcaagtaggacaaattattggtgaagatagctgttccgggaatgatgtggaaggatcttccctccaaaagcttgaagggaaatgttcctggggtaaaatgccgactaatttacttgcgccctctttggagaaatgtgtgactttaagtacaggaaatgctgtggatttgacttctacagttacaatgaacccaagcttcttagagccaaaatttctggaacaagacagttgcttgacattttgctctcataaggttgatgctacgggttcataccaattacaagtatgcatatccgcagaagaggctggcgcaagagaattacttttatctccttattattgcaattactcatataataatgtcccaccttctctattaccagaaatcataaggttgagagctggaaatgtactttttaattacaagtactacaacaatacaatgcaaaagactgaagttactgaagatttttcctgcccattttgcttggtaccatgtggaagcttcaagggcctaggatgccacttaaattcatcacatgacctgttccactatgagttgtggatatctgaagagtgccaggctgtgaatgttagtctgaaggctgatgcctggaaaactgagttatatctagtttgtggcagagggagttgatccaaggcatcaaacattttcctactgctcgaggtttaagaagcgtagaaggttggaaaccacagctgagaaattcaggcatgttcacccacatattatggaatcaggatcacatgaagatgcccaggcagggtctgaagatgactatgtgcaaagggaaaatgggctttctgtagcaaatacttcagttgaccctagtcagcctgtacatgggagcaatctttcaccaccaacagtgctacagtttggaaagtcaagaaaactatctgccgagcgatctgaccccagaaaccgacaactgttgcaaaagcgtcagttcttccattcacacagggcacagccaatgccattggaacaagtcctctcagatcatgatagcgaagacgaggttgatgatgacattgccgactttgaggatagacggatgctcgacgattttgttgatgttacaaaagatgagaagcttattatgcatatgtggaattcatttgttcgaaagcaaagggtgctagccgatggtcatataccgtgggcatgcgaggcgttctccagatgccatggacaacagcttgtacaaaaccctgccctgctgtggggctggcgtttcttcatgattaaactctggaaccacagccttcttgacgcccgcgccatgaatgcttgcaacacaatccttcaaggctaccaagacggaagtgcggaccccaagtaaatctacaatccagagaaatcgttggccagcgtgtgtaagatctgccggttccggcggttatttctgaaccccaaaacagctatgtgaagaactggaatggggccatagcggcatttgttttaaggtttagggttactccatttttccaagggaggaaactaatttcccttggaaaaatgaaaatccattgggaaaaatgagtttcccaaactagccattaaaagggtagcttcctcccacctagggggaaaaaaactaggagggaaaagctggatccttggccgagacaatcatcattgcttcattcgtgattcggttgtatttatcggtaccagttgttgttggcatgtggagtttgtatggatgataatgataaatgaagtgattcactgcagcccttgtatagtt

SEQ ID NO: 5302 - DNA, 2596 bp, Zea Mays
gtgagtgtcagacatccccttccccgtttcaatcgcgaccacgcgctcgcagccgcaatcgactcgacccggcccgaccgagctccccgtgcccaacaaaccctcacaattaccagttccccatcgccgacgccgtacaccggagctcgaccgctccgcgtggtgtccgattctacttcgtcgaagactacaagcggcctcctagagttccacctcaactgcgcaggggaagggaggctcccaacgcatccccgccgacctcaacgccgacggtcctttcctaacccgcagccgccggccgcagtctctctcttctggtccagtgggggctgctatcttccaggaatattggagatgtgccttcaacactctagggctcgattgtctccagatgagcaacttgctgcagaaaaaagttttgccttgtattgcaagccagttgaattgtacaatattatccagaggcgagctattaaaaatccaccttttgttcaaagatcccttctttataagatacaggcaaggagaaaaaagaggattcagataactgtatcactttctgcaagtacaaatacacaagcacagaatatctttcccctttatgtacttttagctagacctaccagtaatatttcgcttgaggggcattctccgatatatcgattcagtagggcttgtttgcttacaaattttagtgaatttggaaataaagacaaaactgaagccacattcatcatccctgatgtgaagaatttatcaacctcccgtgcttgcaaccttaacattatatttattagccgtggtaagatgtgcattttatggcaagtaggacaaattattggtgaagatagctgttccgggaatgatgtggaaggatcttccctccaaaagcttgaagggaaatgttcctggggtaaaatgccgactaatttacttgcgccctctttggagaaatgtgtgactttaagtacaggaaatgctgtggatttgacttctacagttacaatgaacccaagcttcttagagccaaaatttctggaacaagacagttgcttgacattttgctctcataaggttgatgctacgggttcataccaattacaagtatgcatatccgcagaagaggctggcgcaagagaattacttttatctccttattattgcaattactcatataataatgtcccaccttctctattaccagaaatcataaggttgagagctggaaatgtactttttaattacaagtactacaacaatacaatgcaaaagactgaagttactgaagatttttcctgcccattttgcttggtaccatgtggaagcttcaagggcctaggatgccacttaaattcatcacatgacctgttccactatgagttgtggatatctgaagagtgccaggctgtgaatgttagtctgaaggctgatgcctggaaaactgagttatatctagtttgtggcagagggagttgatccaaggcatcaaacattttcctactgctcgaggtttaagaagcgtagaaggttggaaaccacagctgagaaattcaggcatgttcacccacatattatggaatcaggatcacatgaagatgcccaggcagggtctgaagatgactatgtgcaaagggaaaatgggctttctgtagcaaatacttcagttgaccctagtcagcctgtacatgggagcaatctttcaccaccaacagtgctacagtttggaaagtcaagaaaactatctgccgagcgatctgaccccagaaaccgacaactgttgcaaaagcgtcagttcttccattcacacagggcacagccaatgccattggaacaagtcctctcagatcatgatagcgaagacgaggttgatgatgacattgccgactttgaggatagacggatgctcgacgattttgttgatgttacaaaagatgagaagcttattatgcatatgtggaattcatttgttcgaaagcaaagggtgctagccgatggtcatataccgtgggcatgcgaggcgttctccagatgccatggacaacagcttgtacaaaaccctgccctgctgtggggctggcgtttcttcatgattaaactctggaaccacagccttcttgacgcccgcgccatgaatgcttgcaacacaatccttcaaggctaccaagacggaagtgcggaccccaagtaaatctacaatccagagaaatcgttggccagcgtgtgtaagatctgccggttccggcggttatttctgaaccccaaaacagctatgtgaagaactggaatggggccatagcggcatttgttttaaggtttagggttactccatttttccaagggaggaaactaatttcccttggaaaaatgaaaatccattgggaaaaatgagtttcccaaactagccattaaaagggtagcttcctcccacctagggggaaaaaaactaggagggaaaagctggatccttggccgagacaatcatcattgcttcattcgtgattcggttgtatttatcggtaccagttgttgttggcatgtggagtttgtatggatgataatgataaatgaagtgattcactgcagcccttgtatagtt

SEQ ID NO: 5303 - DNA, 1777 bp, Zea Mays
ctcaattgtttccaatccaacgtaacacaggcccagcgacggatcccagacccaaccaaaccggccttcggcggcccatcacagcagcctatcacggccaaaaccgccaaaccctagttgtgcatggatagcccctcacgccagccgccaatgccccaatcccgtaatcgcagcctcgccccgctcgcatcttcctctccctctcagcactggtgctcaatctacaggttgtcccgctccctacacacccgccctccggtgtgaacctccatgacgtccacaaccactctccgatctgctgtcgtgacctcatccagccgtgctgtggcagtggatcgaagttcgctccagctctgattgggggaaaatgactagggtatcaagtggaaaaacataatggtccaggttctactgcggcacctctttcaggctaagcatctaaacaacaatatgtaaattatccttttccaataaaatacatgcttaaatcgtggctgctaggcgaatggtcctactttggtcatcaaatgcaggaattccactactatatgtgccacttgaagttgttatgtcaaaataatatggtgaaaacgagcgtctattgggatctattttttatcttgcaaatgatcttcctgaaggagattgatatgtcaagatacgcttgtttcatttgagctcaatgttatctgaaaatatatagactgccttcgtccccttcatcactgctaatgaccgtgacttggagacccgacagcggccctcgacgttgtcgccgccgagcccatgctggttccaccagtggtccaccacccggatgtggtccgccaagacgagcagtaacggtggcagcgaggcgaggtggtagatccagcaccgcttctgcacgaccatccattcctccacccagagcatgtacccaggcttgcctctcctcggggaacatgccgaggtcgtccgactggagcagaaggcgacatcgctcaacaagctggtcgaggagcagtgcgagagcataaacgatctcaagtccaagagccatccgattctgggcccagaacactttgccaaacaaaaagttatcgctcttcatccttgataggctacagaaagggaagctgaaccttgttcttctgccatcatctagcatgcggcttacctttgtttgtgatgatggttatccagagcaactagctctcttgagcaacgactttgaattttcggaagttatgattgaagaaatatcagctgataattctggacgctctttcctaatcagaatttcagaatctaaagtgttttactactggtgtgctgagaagtcgaaggaagattgaatggaacttcttgcaaaggtcttcaagggagaagcggcttaaaatgtgtgagcaggtattttcggactcgtaccagaaagggaaaagctacaaaggttgacacagcgccgaagctgtgaagcaggaaagcttcggcatgttcgcagaaaagggaaccgacttaaagatgaaaaggccatttagacctcgatagagtgctatagaattatcaccaaatgtaaagggcatgtatgtaattttgtatgggttgtaccccgtgcctataaataggtgaacagtacccccgtactgttcacgttgacttggcatttgcttttgcgtcacacttgtattttcatctccttccaaaccgaaggtacatttataatttgatattgtctctatttctctataatgatataataaagttaaatgaatgatgttatatgattattcgtgct

SEQ ID NO: 5304 - DNA, 1702 bp, Zea Mays
ctcaattgtttccaatccaacgtaacacaggcccagcgacggatcccagacccaaccaaaccggccttcggcggcccatcacagcagcctatcacggccaaaaccgccaaaccctagttgtgcatggatagcccctcacgccagccgccaatgccccaatcccgtaatcgcagcctcgccccgctcgcatcttcctctccctctcagcactggtgctcaatctacaggttgtcccgctccctacacacccgccctccggtgtgaacctccatgacgtccacaaccactctccgatctgctgtcgtgacctcatccagccgtgctgtggcagtggatcgaagttcgctccagctctgattgggggaaaatgactagggtatcaagtggaaaaacataatggtccaggttctactgcggcacctctttcaggctaagcatctaaacaacaatatgtaaattatccttttccaataaaatacatgcttaaatcgtggctgctaggcgaatggtcctactttggtcatcaaatgcaggaattccactactatatgtgccacttgaagttgttatgtcaaaataatatggtgaaaacgagcgtctattgggatctattttttatcttgcaaatgatcttcctgaaggagattgatatgtcaagatacgcttgtttcatttgagctcaatgttatctgaaaatatatagactgccttcgtccccttcatcactgctaatgaccgtgacttggagacccgacagcggccctcgacgttgtcgccgccgagcccatgctggttccaccagtggtccaccacccggatgtggtccgccaagacgagcagtaacggtggcagcgaggcgaggtggtagatccagcaccgcttctgcacgaccatccattcctccacccagagcatgtacccaggcttgcctctcctcggggaacatgccgaggtcgtccgactggagcagaaggcgacatcgctcaacaagctggtcgaggagcagtgcgagagcataaacgatctcaagtccaagagggaagctgaaccttgttcttctgccatcatctagcatgcggcttacctttgtttgtgatgatggttatccagagcaactagctctcttgagcaacgactttgaattttcggaagttatgattgaagaaatatcagctgataattctggacgctctttcctaatcagaatttcagaatctaaagtgttttactactggtgtgctgagaagtcgaaggaagattgaatggaacttcttgcaaaggtcttcaagggagaagcggcttaaaatgtgtgagcaggtattttcggactcgtaccagaaagggaaaagctacaaaggttgacacagcgccgaagctgtgaagcaggaaagcttcggcatgttcgcagaaaagggaaccgacttaaagatgaaaaggccatttagacctcgatagagtgctatagaattatcaccaaatgtaaagggcatgtatgtaattttgtatgggttgtaccccgtgcctataaataggtgaacagtacccccgtactgttcacgttgacttggcatttgcttttgcgtcacacttgtattttcatctccttccaaaccgaaggtacatttataatttgatattgtctctatttctctataatgatataataaagttaaatgaatgatgttatatgattattcgtgct

SEQ ID NO: 5305 - DNA, 1743 bp, Zea Mays
aaaaccgccaaaccctagttgtgcatggatagcccctcacgccagccgccaatgccccaatcccgtaatcgcagcctcgccccgctcgcatcttcctctccctctcagcactggtgctcaatctacaggttgtcccgctccctacacacccgccctccggtgtgaacctccatgacgtccacaaccactctccgatctgctgtcgtgacctcatccagccgtgctgtggcagtggatcgaagttcgctccagctctgattgggggaaaatgactagggtatcaagtggaaaaacataatggtccaggttctactgcggcacctctttcaggctaagcatctaaacaacaatatgtaaattatccttttccaataaaatacatgcttaaatcgtggctgctaggcgaatggtcctactttggtcatcaaatgcaggttagcttaactttttctaatgcattattatttgtggtttccatcaaatgtacgttagcttatcttttagcaaatttgtagctgatgtcaattaactttttagtggaattttatctgctcattcttatattcaggaattccactactatatgtgccacttgaagttgttatgtcaaaataatatggtgaaaacgagcgtctattgggatctattttttatcttgcaaatgatcttcctgaaggaggtaatatattcttagatgaggtatatatcgtaatacttatagcataaacactcaagccactacaaactgccttcgtccccttcatcactgctaatgaccgtgacttggagacccgacagcggccctcgacgttgtcgccgccgagcccatgctggttccaccagtggtccaccacccggatgtggtccgccaagacgagcagtaacggtggcagcgaggcgaggtggtagatccagcaccgcttctgcacgaccatccattcctccacccagagcatgtacccaggcttgcctctcctcggggaacatgccgaggtcgtccgactggagcagaaggcgacatcgctcaacaagctggtcgaggagcagtgcgagagcataaacgatctcaagtccaagagggaagctgaaccttgttcttctgccatcatctagcatgcggcttacctttgtttgtgatgatggttatccagagcaactagctctcttgagcaacgactttgaattttcggaagttatgattgaagaaatatcagctgataattctggacgctctttcctaatcagaatttcagaatctaaagtgttttactactggtgtgctgagaagtcgaaggaagattgaatggaacttcttgcaaaggtcttcaagggagaagcggcttaaaatgtgtgagcaggtattttcggactcgtaccagaaagggaaaagctacaaaggttgacacagcgccgaagctgtgaagcaggaaagcttcggcatgttcgcagaaaagggaaccgacttaaagatgaaaaggccatttagacctcgatagagtgctatagaattatcaccaaatgtaaagggcatgtatgtaattttgtatgggttgtaccccgtgcctataaataggtgaacagtacccccgtactgttcacgttgacttggcatttgcttttgcgtcacacttgtattttcatctccttccaaaccgaaggtacatttataatttgatattgtctctatttctctataatgatataataaagttaaatgaatgatgttatatgattattcgtgct

SEQ ID NO: 5306 - DNA, 1857 bp, Zea Mays
ccaaaccctagttgtgcatggatagcccctcacgccagccgccaatgccccaatcccgtaatcgcagcctcgccccgctcgcatcttcctctccctctcagcactggtgctcaatctacaggttgtcccgctccctacacacccgccctccggtgtgaacctccatgacgtccacaaccactctccgatctgctgtcgtgacctcatccagccgtgctgtggcagtggatcgaagttcgctccagctctgattgggggaaaatgactagggtatcaagtggaaaaacataatggtccaggttctactgcggcacctctttcaggctaagcatctaaacaacaatatgtaaattatccttttccaataaaatacatgcttaaatcgtggctgctaggcgaatggtcctactttggtcatcaaatgcaggttagcttaactttttctaatgcattattatttgtggtttccatcaaatgtacgttagcttatcttttagcaaatttgtagctgatgtcaattaactttttagtggaattttatctgctcattcttatattcaggaattccactactatatgtgccacttgaagttgttatgtcaaaataatatggtgaaaacgagcgtctattgggatctattttttatcttgcaaatgatcttcctgaaggaggtaatatattcttagatgaggtatatatcgtaatacttatagcataaacactcaagccactacaaactgccttcgtccccttcatcactgctaatgaccgtgacttggagacccgacagcggccctcgacgttgtcgccgccgagcccatgctggttccaccagtggtccaccacccggatgtggtccgccaagacgagcagtaacggtggcagcgaggcgaggtggtagatccagcaccgcttctgcacgaccatccattcctccacccagagcatgtacccaggcttgcctctcctcggggaacatgccgaggtcgtccgactggagcagaaggcgacatcgctcaacaagctggtcgaggagcagtgcgagagcataaacgatctcaagtccaagagccatccgattctgggcccagaacactttgccaaacaaaaagttatcgctcttcatccttgataggctacagaagaaggatacatatgctgtattttcgtagcctgttgatcctgaagagagggaagctgaaccttgttcttctgccatcatctagcatgcggcttacctttgtttgtgatgatggttatccagagcaactagctctcttgagcaacgactttgaattttcggaagttatgattgaagaaatatcagctgataattctggacgctctttcctaatcagaatttcagaatctaaagtgttttactactggtgtgctgagaagtcgaaggaagattgaatggaacttcttgcaaaggtcttcaagggagaagcggcttaaaatgtgtgagcaggtattttcggactcgtaccagaaagggaaaagctacaaaggttgacacagcgccgaagctgtgaagcaggaaagcttcggcatgttcgcagaaaagggaaccgacttaaagatgaaaaggccatttagacctcgatagagtgctatagaattatcaccaaatgtaaagggcatgtatgtaattttgtatgggttgtaccccgtgcctataaataggtgaacagtacccccgtactgttcacgttgacttggcatttgcttttgcgtcacacttgtattttcatctccttccaaaccgaaggtacatttataatttgatattgtctctatttctctataatgatataataaagttaaatgaatgatgttatatgattattcgtgct

SEQ ID NO: 5307 - DNA, 1702 bp, Zea Mays
gcatggatagcccctcacgccagccgccaatgccccaatcccgtaatcgcagcctcgccccgctcgcatcttcctctccctctcagcactggtgctcaatctacaggttgtcccgctccctacacacccgccctccggtgtgaacctccatgacgtccacaaccactctccgatctgctgtcgtgacctcatccagccgtgctgtggcagtggatcgaagttcgctccagctctgattgggggaaaatgactagggtatcaagtggaaaaacataatggtccaggttctactgcggcacctctttcaggctaagcatctaaacaacaatatgtaaattatccttttccaataaaatacatgcttaaatcgtggctgctaggcgaatggtcctactttggtcatcaaatgcaggaattccactactatatgtgccacttgaagttgttatgtcaaaataatatggtgaaaacgagcgtctattgggatctattttttatcttgcaaatgatcttcctgaaggagattgatatgtcaagatacgcttgtttcatttgagctcaatgttatctgaaaatatatagactgccttcgtccccttcatcactgctaatgaccgtgacttggagacccgacagcggccctcgacgttgtcgccgccgagcccatgctggttccaccagtggtccaccacccggatgtggtccgccaagacgagcagtaacggtggcagcgaggcgaggtggtagatccagcaccgcttctgcacgaccatccattcctccacccagagcatgtacccaggcttgcctctcctcggggaacatgccgaggtcgtccgactggagcagaaggcgacatcgctcaacaagctggtcgaggagcagtgcgagagcataaacgatctcaagtccaagagccatccgattctgggcccagaacactttgccaaacaaaaagttatcgctcttcatccttgataggctacagaagaaggatacatatgctgtattttcgtagcctgttgatcctgaagagagggaagctgaaccttgttcttctgccatcatctagcatgcggcttacctttgtttgtgatgatggttatccagagcaactagctctcttgagcaacgactttgaattttcggaagttatgattgaagaaatatcagctgataattctggacgctctttcctaatcagaatttcagaatctaaagtgttttactactggtgtgctgagaagtcgaaggaagattgaatggaacttcttgcaaaggtcttcaagggagaagcggcttaaaatgtgtgagcaggtattttcggactcgtaccagaaagggaaaagctacaaaggttgacacagcgccgaagctgtgaagcaggaaagcttcggcatgttcgcagaaaagggaaccgacttaaagatgaaaaggccatttagacctcgatagagtgctatagaattatcaccaaatgtaaagggcatgtatgtaattttgtatgggttgtaccccgtgcctataaataggtgaacagtacccccgtactgttcacgttgacttggcatttgcttttgcgtcacacttgtattttcatctccttccaaaccgaaggtacatttataatttgatattgtctctatttctctataatgatataataaagttaaatgaatgatgttatatgattattcgtgct

SEQ ID NO: 5308 - DNA, 1729 bp, Zea Mays
atagcccctcacgccagccgccaatgccccaatcccgtaatcgcagcctcgccccgctcgcatcttcctctccctctcagcactggtgctcaatctacaggttgtcccgctccctacacacccgccctccggtgtgaacctccatgacgtccacaaccactctccggtatgaatcccgcgtgcgcttacacgaagattgatctgctgtcgtgacctcatccagccgtgctgtggcagtggatcgaagttcgctccagctctgattgggggaaaatgactagggtatcaagtggaaaaacataatggtccaggttctactgcggcacctctttcaggctaagcatctaaacaacaatatgtaaattatccttttccaataaaatacatgcttaaatcgtggctgctaggcgaatggtcctactttggtcatcaaatgcaggaattccactactatatgtgccacttgaagttgttatgtcaaaataatatggtgaaaacgagcgtctattgggatctattttttatcttgcaaatgatcttcctgaaggagattgatatgtcaagatacgcttgtttcatttgagctcaatgttatctgaaaatatatagactgccttcgtccccttcatcactgctaatgaccgtgacttggagacccgacagcggccctcgacgttgtcgccgccgagcccatgctggttccaccagtggtccaccacccggatgtggtccgccaagacgagcagtaacggtggcagcgaggcgaggtggtagatccagcaccgcttctgcacgaccatccattcctccacccagagcatgtacccaggcttgcctctcctcggggaacatgccgaggtcgtccgactggagcagaaggcgacatcgctcaacaagctggtcgaggagcagtgcgagagcataaacgatctcaagtccaagagccatccgattctgggcccagaacactttgccaaacaaaaagttatcgctcttcatccttgataggctacagaagaaggatacatatgctgtattttcgtagcctgttgatcctgaagagagggaagctgaaccttgttcttctgccatcatctagcatgcggcttacctttgtttgtgatgatggttatccagagcaactagctctcttgagcaacgactttgaattttcggaagttatgattgaagaaatatcagctgataattctggacgctctttcctaatcagaatttcagaatctaaagtgttttactactggtgtgctgagaagtcgaaggaagattgaatggaacttcttgcaaaggtcttcaagggagaagcggcttaaaatgtgtgagcaggtattttcggactcgtaccagaaagggaaaagctacaaaggttgacacagcgccgaagctgtgaagcaggaaagcttcggcatgttcgcagaaaagggaaccgacttaaagatgaaaaggccatttagacctcgatagagtgctatagaattatcaccaaatgtaaagggcatgtatgtaattttgtatgggttgtaccccgtgcctataaataggtgaacagtacccccgtactgttcacgttgacttggcatttgcttttgcgtcacacttgtattttcatctccttccaaaccgaaggtacatttataatttgatattgtctctatttctctataatgatataataaagttaaatgaatgatgttatatgattattcgtgct

SEQ ID NO: 5309 - DNA, 1656 bp, Zea Mays
atagcccctcacgccagccgccaatgccccaatcccgtaatcgcagcctcgccccgctcgcatcttcctctccctctcagcactggtgctcaatctacaggttgtcccgctccctacacacccgccctccggtgtgaacctccatgacgtccacaaccactctccgatctgctgtcgtgacctcatccagccgtgctgtggcagtggatcgaagttcgctccagctctgattgggggaaaatgactagggtatcaagtggaaaaacataatggtccaggttctactgcggcacctctttcaggctaagcatctaaacaacaatatgtaaattatccttttccaataaaatacatgcttaaatcgtggctgctaggcgaatggtcctactttggtcatcaaatgcaggaattccactactatatgtgccacttgaagttgttatgtcaaaataatatggtgaaaacgagcgtctattgggatctattttttatcttgcaaatgatcttcctgaaggaggtaatatattcttagatgaggtatatatcgtaatacttatagcataaacactcaagccactacaaactgccttcgtccccttcatcactgctaatgaccgtgacttggagacccgacagcggccctcgacgttgtcgccgccgagcccatgctggttccaccagtggtccaccacccggatgtggtccgccaagacgagcagtaacggtggcagcgaggcgaggtggtagatccagcaccgcttctgcacgaccatccattcctccacccagagcatgtacccaggcttgcctctcctcggggaacatgccgaggtcgtccgactggagcagaaggcgacatcgctcaacaagctggtcgaggagcagtgcgagagcataaacgatctcaagtccaagagccatccgattctgggcccagaacactttgccaaacaaaaagttatcgctcttcatccttgataggctacagaaagggaagctgaaccttgttcttctgccatcatctagcatgcggcttacctttgtttgtgatgatggttatccagagcaactagctctcttgagcaacgactttgaattttcggaagttatgattgaagaaatatcagctgataattctggacgctctttcctaatcagaatttcagaatctaaagtgttttactactggtgtgctgagaagtcgaaggaagattgaatggaacttcttgcaaaggtcttcaagggagaagcggcttaaaatgtgtgagcaggtattttcggactcgtaccagaaagggaaaagctacaaaggttgacacagcgccgaagctgtgaagcaggaaagcttcggcatgttcgcagaaaagggaaccgacttaaagatgaaaaggccatttagacctcgatagagtgctatagaattatcaccaaatgtaaagggcatgtatgtaattttgtatgggttgtaccccgtgcctataaataggtgaacagtacccccgtactgttcacgttgacttggcatttgcttttgcgtcacacttgtattttcatctccttccaaaccgaaggtacatttataatttgatattgtctctatttctctataatgatataataaagttaaatgaatgatgttatatgattattcgtgct

SEQ ID NO: 5310 - DNA, 2306 bp, Zea Mays
atagcccctcacgccagccgccaatgccccaatcccgtaatcgcagcctcgccccgctcgcatcttcctctccctctcagcactggtgctcaatctacaggttgtcccgctccctacacacccgccctccggtgtgaacctccatgacgtccacaaccactctccggtatgaatcccgcgtgcgcttacacgaagattggtaatagtggcgacccagtcgcagccgtggaccttctcctcctcatcgcttgctcgttgtcgtcttttgcctacgtctgcacccgacgctgctacccttcgctcacctgttcatcatcctttcagatctgctgtcgtgacctcatccagccgtgctgtggcagtggatcgaagttcgctccagctctgattgggggaaaatgactagggtatcaagtggaaaaacataatggtccaggttctactgcggcacctctttcaggctaagcatctaaacaacaatatgtaaattatccttttccaataaaatacatgcttaaatcgtggctgctaggcgaatggtcctactttggtcatcaaatgcaggaattccactactatatgtgccacttgaagttgttatgtcaaaataatatggtgaaaacgagcgtctattgggatctattttttatcttgcaaatgatcttcctgaaggaggtaatatattcttagatgaggtatatatcgtaatacttatagcataaacactcaagccactacaaactgccttcgtccccttcatcactgctaatgaccgtgacttggagacccgacagcggccctcgacgttgtcgccgccgagcccatgctggttccaccagtggtccaccacccggatgtggtccgccaagacgagcagtaacggtggcagcgaggcgaggtggtagatccagcaccgcttctgcacgaccatccattcctccacccagagcatgtacccaggcttgcctctcctcggggaacatgccgaggtcgtccgactggagcagaaggcgacatcgctcaacaagctggtcgaggagcagtgcgagagcataaacgatctcaagtccaaggctagtgctgatctccttccctgatttatgaactgcattgagtcgcgtgcgagtttattttatttatgattttttcgtggtggtaactagtgttggtaaacaaaagtttacccccacctttctgctgcttttttctacctcagggaggtttttgatgctcgtaaatattttaacttcgtatgttatttatttaatttttttatcttaactgttgggagaaaagatgaggaaaagcgagagatgggcgtgaatgttggtgctccttgctctgtgctattaactcttcaggtttccgtaggcaaaaaatatacctggacaaatatgcataagggtgtcatttttaattctgttactgttatatgcattccatatttctcgtatatataattaatgatcgtgcctctgttttccctgtgcctcatggcttcgatttgttcattcgacagagccatccgattctgggcccagaacactttgccaaacaaaaagttatcgctcttcatccttgataggctacagaagaaggatacatatgctgtattttcgtagcctgttgatcctgaagagagggaagctgaaccttgttcttctgccatcatctagcatgcggcttacctttgtttgtgatgatggttatccagagcaactagctctcttgagcaacgactttgaattttcggaagttatgattgaagaaatatcagctgataattctggacgctctttcctaatcagaatttcagaatctaaagtgttttactactggtgtgctgagaagtcgaaggaagattgaatggaacttcttgcaaaggtcttcaagggagaagcggcttaaaatgtgtgagcaggtattttcggactcgtaccagaaagggaaaagctacaaaggttgacacagcgccgaagctgtgaagcaggaaagcttcggcatgttcgcagaaaagggaaccgacttaaagatgaaaaggccatttagacctcgatagagtgctatagaattatcaccaaatgtaaagggcatgtatgtaattttgtatgggttgtaccccgtgcctataaataggtgaacagtacccccgtactgttcacgttgacttggcatttgcttttgcgtcacacttgtattttcatctccttccaaaccgaaggtacatttataatttgatattgtctctatttctctataatgatataataaagttaaatgaatgatgttatatgattattcgtgct

SEQ ID NO: 5311 - DNA, 1689 bp, Zea Mays
atagcccctcacgccagccgccaatgccccaatcccgtaatcgcagcctcgccccgctcgcatcttcctctccctctcagcactggtgctcaatctacaggttgtcccgctccctacacacccgccctccggtgtgaacctccatgacgtccacaaccactctccggtatgaatcccgcgtgcgcttacacgaagattgatctgctgtcgtgacctcatccagccgtgctgtggcagtggatcgaagttcgctccagctctgattgggggaaaatgactagggtatcaagtggaaaaacataatggtccaggttctactgcggcacctctttcaggctaagcatctaaacaacaatatgtaaattatccttttccaataaaatacatgcttaaatcgtggctgctaggcgaatggtcctactttggtcatcaaatgcaggaattccactactatatgtgccacttgaagttgttatgtcaaaataatatggtgaaaacgagcgtctattgggatctattttttatcttgcaaatgatcttcctgaaggaggtaatatattcttagatgaggtatatatcgtaatacttatagcataaacactcaagccactacaaactgccttcgtccccttcatcactgctaatgaccgtgacttggagacccgacagcggccctcgacgttgtcgccgccgagcccatgctggttccaccagtggtccaccacccggatgtggtccgccaagacgagcagtaacggtggcagcgaggcgaggtggtagatccagcaccgcttctgcacgaccatccattcctccacccagagcatgtacccaggcttgcctctcctcggggaacatgccgaggtcgtccgactggagcagaaggcgacatcgctcaacaagctggtcgaggagcagtgcgagagcataaacgatctcaagtccaagagccatccgattctgggcccagaacactttgccaaacaaaaagttatcgctcttcatccttgataggctacagaaagggaagctgaaccttgttcttctgccatcatctagcatgcggcttacctttgtttgtgatgatggttatccagagcaactagctctcttgagcaacgactttgaattttcggaagttatgattgaagaaatatcagctgataattctggacgctctttcctaatcagaatttcagaatctaaagtgttttactactggtgtgctgagaagtcgaaggaagattgaatggaacttcttgcaaaggtcttcaagggagaagcggcttaaaatgtgtgagcaggtattttcggactcgtaccagaaagggaaaagctacaaaggttgacacagcgccgaagctgtgaagcaggaaagcttcggcatgttcgcagaaaagggaaccgacttaaagatgaaaaggccatttagacctcgatagagtgctatagaattatcaccaaatgtaaagggcatgtatgtaattttgtatgggttgtaccccgtgcctataaataggtgaacagtacccccgtactgttcacgttgacttggcatttgcttttgcgtcacacttgtattttcatctccttccaaaccgaaggtacatttataatttgatattgtctctatttctctataatgatataataaagttaaatgaatgatgttatatgattattcgtgct

SEQ ID NO: 5312 - DNA, 2712 bp, Zea Mays
atagcccctcacgccagccgccaatgccccaatcccgtaatcgcagcctcgccccgctcgcatcttcctctccctctcagcactggtgctcaatctacaggttgtcccgctccctacacacccgccctccggtgtgaacctccatgacgtccacaaccactctccgatctgctgtcgtgacctcatccagccgtgctgtggcagtggatcgaagttcgctccagctctgattgggggaaaatgactagggtatcaagtggaaaaacataatggtccaggttctactgcggcacctctttcaggctaagcatctaaacaacaatatgtaaattatccttttccaataaaatacatgcttaaatcgtggctgctaggcgaatggtcctactttggtcatcaaatgcaggaattccactactatatgtgccacttgaagttgttatgtcaaaataatatggtgaaaacgagcgtctattgggatctattttttatcttgcaaatgatcttcctgaaggagattgatatgtcaagatacgcttgtttcatttgagctcaatgttatctgaaaatatatagactgccttcgtccccttcatcactgctaatgaccgtgacttggagacccgacagcggccctcgacgttgtcgccgccgagcccatgctggttccaccagtggtccaccacccggatgtggtccgccaagacgagcagtaacggtggcagcgaggcgaggtggtagatccagcaccgcttctgcacgaccatccattcctccacccagagcatgtacccaggcttgcctctcctcggggaacatgccgaggtcgtccgactggagcagaaggcgacatcgctcaacaagctggtcgaggagcagtgcgagagcataaacgatctcaagtccaaggctagtgctgatctccttccctgatttatgaactgcattgagtcgcgtgcgagtttattttatttatgattttttcgtggtggtaactagtgttggtaaacaaaagtttacccccacctttctgctgcttttttctacctcagggaggtttttgatgctcgtaaatattttaacttcgtatgttatttatttaatttttttatcttaactgttgggagaaaagatgaggaaaagcgagagatgggcgtgaatgttggtgctccttgctctgtgctattaactcttcaggtttccgtaggcaaaaaatatacctggacaaatatgcataagggtgtcatttttaattctgttactgttatatgcattccatatttctcgtatatataattaatgatcgtgcctctgttttccctgtgcctcatggcttcgatttgttcattcgacagagccatccgattctgggcccagaacactttgccaaacaaaaagttatcgctcttcatccttgataggctacagaagtgagttgtcgtgttcgttgcttgtacggctcccattctcagctctaggacctctcatctttgtgtgtcctgcactccttgtttcttgtaggaaggatacatatgctgtattttcgtagcctgttgatcctgaagaggtttgtttcaatgcacgatcacattaattggtacatgtattcttatcattataaaaaagggactgtataaacaaccttcaactaggagaaattcgctgaattttgaatatccaatccatgttgttatccagtccacagtaaagtacacatgtgaacctagagttgttttatttttaagaacctacaataattgtttagtcttgggacgctattattttcttgctaaagtctgtagaagagtctgtcatgttttatatgatatctaggattcatctttcttccaactaatcgctaatacaccagtttcagcaactgaactttagcaggatgtgtttacatagatgacatttgtatgcctcactctgcattgctttgcttggcctgacatcaagatacactgtttaatcaccttatcagtcttcttattttttataacaatatgttctgggatctcatgtatgtacatttcctatgtgcagagggaagctgaaccttgttcttctgccatcatctagcatgcggcttacctttgtttgtgatgatggttatccagagcaactagctctcttgagcaacgactttgaattttcggaagttatgattgaagaaatatcagctgataattctggacgctctttcctaatcagaatttcagaatctaaagtgttttactactggtgtgctgagaagtcgaaggaagattgaatggaacttcttgcaaaggtcttcaagggagaagcggcttaaaatgtgtgagcaggtattttcggactcgtaccagaaagggaaaagctacaaaggttgacacagcgccgaagctgtgaagcaggaaagcttcggcatgttcgcagaaaagggaaccgacttaaagatgaaaaggccatttagacctcgatagagtgctatagaattatcaccaaatgtaaagggcatgtatgtaattttgtatgggttgtaccccgtgcctataaataggtgaacagtacccccgtactgttcacgttgacttggcatttgcttttgcgtcacacttgtattttcatctccttccaaaccgaaggtacatttataatttgatattgtctctatttctctataatgatataataaagttaaatgaatgatgttatatgattattcgtgct

SEQ ID NO: 5313 - DNA, 1593 bp, Zea Mays
atagcccctcacgccagccgccaatgccccaatcccgtaatcgcagcctcgccccgctcgcatcttcctctccctctcagcactggtgctcaatctacaggttgtcccgctccctacacacccgccctccggtgtgaacctccatgacgtccacaaccactctccggtatgaatcccgcgtgcgcttacacgaagattggtaatagtggcgacccagtcgcagccgtggaccttctcctcctcatcgcttgctcgttgtcgtcttttgcctacgtctgcacccgacgctgctacccttcgctcacctgttcatcatcctttcagatctgctgtcgtgacctcatccagccgtgctgtggcagtggatcgaagttcgctccagctctgattgggggaaaatgactagggtatcaagtggaaaaacataatggtccaggttctactgcggcacctctttcaggctaagcatctaaacaacaatatgaattccactactatatgtgccacttgaagttgttatgtcaaaataatatggtgaaaacgagcgtctattgggatctattttttatcttgcaaatgatcttcctgaaggagactgccttcgtccccttcatcactgctaatgaccgtgacttggagacccgacagcggccctcgacgttgtcgccgccgagcccatgctggttccaccagtggtccaccacccggatgtggtccgccaagacgagcagtaacggtggcagcgaggcgaggtggtagatccagcaccgcttctgcacgaccatccattcctccacccagagcatgtacccaggcttgcctctcctcggggaacatgccgaggtcgtccgactggagcagaaggcgacatcgctcaacaagctggtcgaggagcagtgcgagagcataaacgatctcaagtccaagagggaagctgaaccttgttcttctgccatcatctagcatgcggcttacctttgtttgtgatgatggttatccagagcaactagctctcttgagcaacgactttgaattttcggaagttatgattgaagaaatatcagctgataattctggacgctctttcctaatcagaatttcagaatctaaagtgttttactactggtgtgctgagaagtcgaaggaagattgaatggaacttcttgcaaaggtcttcaagggagaagcggcttaaaatgtgtgagcaggtattttcggactcgtaccagaaagggaaaagctacaaaggttgacacagcgccgaagctgtgaagcaggaaagcttcggcatgttcgcagaaaagggaaccgacttaaagatgaaaaggccatttagacctcgatagagtgctatagaattatcaccaaatgtaaagggcatgtatgtaattttgtatgggttgtaccccgtgcctataaataggtgaacagtacccccgtactgttcacgttgacttggcatttgcttttgcgtcacacttgtattttcatctccttccaaaccgaaggtacatttataatttgatattgtctctatttctctataatgatataataaagttaaatgaatgatgttatatgattattcgtgct

SEQ ID NO: 5314 - DNA, 2260 bp, Zea Mays
atagcccctcacgccagccgccaatgccccaatcccgtaatcgcagcctcgccccgctcgcatcttcctctccctctcagcactggtgctcaatctacaggttgtcccgctccctacacacccgccctccggtgtgaacctccatgacgtccacaaccactctccggtatgaatcccgcgtgcgcttacacgaagattggtaatagtggcgacccagtcgcagccgtggaccttctcctcctcatcgcttgctcgttgtcgtcttttgcctacgtctgcacccgacgctgctacccttcgctcacctgttcatcatcctttcagatctgctgtcgtgacctcatccagccgtgctgtggcagtggatcgaagttcgctccagctctgattgggggaaaatgactagggtatcaagtggaaaaacataatggtccaggttctactgcggcacctctttcaggctaagcatctaaacaacaatatgtaaattatccttttccaataaaatacatgcttaaatcgtggctgctaggcgaatggtcctactttggtcatcaaatgcaggaattccactactatatgtgccacttgaagttgttatgtcaaaataatatggtgaaaacgagcgtctattgggatctattttttatcttgcaaatgatcttcctgaaggaggtaatatattcttagatgaggtatatatcgtaatacttatagcataaacactcaagccactacaaactgccttcgtccccttcatcactgctaatgaccgtgacttggagacccgacagcggccctcgacgttgtcgccgccgagcccatgctggttccaccagtggtccaccacccggatgtggtccgccaagacgagcagtaacggtggcagcgaggcgaggtggtagatccagcaccgcttctgcacgaccatccattcctccacccagagcatgtacccaggcttgcctctcctcggggaacatgccgaggtcgtccgactggagcagaaggcgacatcgctcaacaagctggtcgaggagcagtgcgagagcataaacgatctcaagtccaaggctagtgctgatctccttccctgatttatgaactgcattgagtcgcgtgcgagtttattttatttatgattttttcgtggtggtaactagtgttggtaaacaaaagtttacccccacctttctgctgcttttttctacctcagggaggtttttgatgctcgtaaatattttaacttcgtatgttatttatttaatttttttatcttaactgttgggagaaaagatgaggaaaagcgagagatgggcgtgaatgttggtgctccttgctctgtgctattaactcttcaggtttccgtaggcaaaaaatatacctggacaaatatgcataagggtgtcatttttaattctgttactgttatatgcattccatatttctcgtatatataattaatgatcgtgcctctgttttccctgtgcctcatggcttcgatttgttcattcgacagagccatccgattctgggcccagaacactttgccaaacaaaaagttatcgctcttcatccttgataggctacagaaagggaagctgaaccttgttcttctgccatcatctagcatgcggcttacctttgtttgtgatgatggttatccagagcaactagctctcttgagcaacgactttgaattttcggaagttatgattgaagaaatatcagctgataattctggacgctctttcctaatcagaatttcagaatctaaagtgttttactactggtgtgctgagaagtcgaaggaagattgaatggaacttcttgcaaaggtcttcaagggagaagcggcttaaaatgtgtgagcaggtattttcggactcgtaccagaaagggaaaagctacaaaggttgacacagcgccgaagctgtgaagcaggaaagcttcggcatgttcgcagaaaagggaaccgacttaaagatgaaaaggccatttagacctcgatagagtgctatagaattatcaccaaatgtaaagggcatgtatgtaattttgtatgggttgtaccccgtgcctataaataggtgaacagtacccccgtactgttcacgttgacttggcatttgcttttgcgtcacacttgtattttcatctccttccaaaccgaaggtacatttataatttgatattgtctctatttctctataatgatataataaagttaaatgaatgatgttatatgattattcgtgct

SEQ ID NO: 5315 - DNA, 1828 bp, Zea Mays
atagcccctcacgccagccgccaatgccccaatcccgtaatcgcagcctcgccccgctcgcatcttcctctccctctcagcactggtgctcaatctacaggttgtcccgctccctacacacccgccctccggtgtgaacctccatgacgtccacaaccactctccggtatgaatcccgcgtgcgcttacacgaagattggtaatagtggcgacccagtcgcagccgtggaccttctcctcctcatcgcttgctcgttgtcgtcttttgcctacgtctgcacccgacgctgctacccttcgctcacctgttcatcatcctttcagatctgctgtcgtgacctcatccagccgtgctgtggcagtggatcgaagttcgctccagctctgattgggggaaaatgactagggtatcaagtggaaaaacataatggtccaggttctactgcggcacctctttcaggctaagcatctaaacaacaatatgtaaattatccttttccaataaaatacatgcttaaatcgtggctgctaggcgaatggtcctactttggtcatcaaatgcaggaattccactactatatgtgccacttgaagttgttatgtcaaaataatatggtgaaaacgagcgtctattgggatctattttttatcttgcaaatgatcttcctgaaggaggtaatatattcttagatgagattgatatgtcaagatacgcttgtttcatttgagctcaatgttatctgaaaatatatagactgccttcgtccccttcatcactgctaatgaccgtgacttggagacccgacagcggccctcgacgttgtcgccgccgagcccatgctggttccaccagtggtccaccacccggatgtggtccgccaagacgagcagtaacggtggcagcgaggcgaggtggtagatccagcaccgcttctgcacgaccatccattcctccacccagagcatgtacccaggcttgcctctcctcggggaacatgccgaggtcgtccgactggagcagaaggcgacatcgctcaacaagctggtcgaggagcagtgcgagagcataaacgatctcaagtccaagagccatccgattctgggcccagaacactttgccaaacaaaaagttatcgctcttcatccttgataggctacagaaagggaagctgaaccttgttcttctgccatcatctagcatgcggcttacctttgtttgtgatgatggttatccagagcaactagctctcttgagcaacgactttgaattttcggaagttatgattgaagaaatatcagctgataattctggacgctctttcctaatcagaatttcagaatctaaagtgttttactactggtgtgctgagaagtcgaaggaagattgaatggaacttcttgcaaaggtcttcaagggagaagcggcttaaaatgtgtgagcaggtattttcggactcgtaccagaaagggaaaagctacaaaggttgacacagcgccgaagctgtgaagcaggaaagcttcggcatgttcgcagaaaagggaaccgacttaaagatgaaaaggccatttagacctcgatagagtgctatagaattatcaccaaatgtaaagggcatgtatgtaattttgtatgggttgtaccccgtgcctataaataggtgaacagtacccccgtactgttcacgttgacttggcatttgcttttgcgtcacacttgtattttcatctccttccaaaccgaaggtacatttataatttgatattgtctctatttctctataatgatataataaagttaaatgaatgatgttatatgattattcgtgct

SEQ ID NO: 5316 - DNA, 1569 bp, Zea Mays
atagcccctcacgccagccgccaatgccccaatcccgtaatcgcagcctcgccccgctcgcatcttcctctccctctcagcactggtgctcaatctacaggttgtcccgctccctacacacccgccctccggtgtgaacctccatgacgtccacaaccactctccgatctgctgtcgtgacctcatccagccgtgctgtggcagtggatcgaagttcgctccagctctgattgggggaaaatgactagggtatcaagtggaaaaacataatggtccaggttctactgcggcacctctttcaggctaagcatctaaacaacaatatgaattccactactatatgtgccacttgaagttgttatgtcaaaataatatggtgaaaacgagcgtctattgggatctattttttatcttgcaaatgatcttcctgaaggagattgatatgtcaagatacgcttgtttcatttgagctcaatgttatctgaaaatatatagactgccttcgtccccttcatcactgctaatgaccgtgacttggagacccgacagcggccctcgacgttgtcgccgccgagcccatgctggttccaccagtggtccaccacccggatgtggtccgccaagacgagcagtaacggtggcagcgaggcgaggtggtagatccagcaccgcttctgcacgaccatccattcctccacccagagcatgtacccaggcttgcctctcctcggggaacatgccgaggtcgtccgactggagcagaaggcgacatcgctcaacaagctggtcgaggagcagtgcgagagcataaacgatctcaagtccaagagccatccgattctgggcccagaacactttgccaaacaaaaagttatcgctcttcatccttgataggctacagaaagggaagctgaaccttgttcttctgccatcatctagcatgcggcttacctttgtttgtgatgatggttatccagagcaactagctctcttgagcaacgactttgaattttcggaagttatgattgaagaaatatcagctgataattctggacgctctttcctaatcagaatttcagaatctaaagtgttttactactggtgtgctgagaagtcgaaggaagattgaatggaacttcttgcaaaggtcttcaagggagaagcggcttaaaatgtgtgagcaggtattttcggactcgtaccagaaagggaaaagctacaaaggttgacacagcgccgaagctgtgaagcaggaaagcttcggcatgttcgcagaaaagggaaccgacttaaagatgaaaaggccatttagacctcgatagagtgctatagaattatcaccaaatgtaaagggcatgtatgtaattttgtatgggttgtaccccgtgcctataaataggtgaacagtacccccgtactgttcacgttgacttggcatttgcttttgcgtcacacttgtattttcatctccttccaaaccgaaggtacatttataatttgatattgtctctatttctctataatgatataataaagttaaatgaatgatgttatatgattattcgtgct

SEQ ID NO: 5317 - DNA, 1549 bp, Zea Mays
atagcccctcacgccagccgccaatgccccaatcccgtaatcgcagcctcgccccgctcgcatcttcctctccctctcagcactggtgctcaatctacaggttgtcccgctccctacacacccgccctccggtgtgaacctccatgacgtccacaaccactctccggtatgaatcccgcgtgcgcttacacgaagattgatctgctgtcgtgacctcatccagccgtgctgtggcagtggatcgaagttcgctccagctctgattgggggaaaatgactagggtatcaagtggaaaaacataatggtccaggttctactgcggcacctctttcaggctaagcatctaaacaacaatatgtaaattatccttttccaataaaatacatgcttaaatcgtggctgctaggcgaatggtcctactttggtcatcaaatgcaggaattccactactatatgtgccacttgaagttgttatgtcaaaataatatggtgaaaacgagcgtctattgggatctattttttatcttgcaaatgatcttcctgaaggagactgccttcgtccccttcatcactgctaatgaccgtgacttggagacccgacagcggccctcgacgttgtcgccgccgagcccatgctggttccaccagtggtccaccacccggatgtggtccgccaagacgagcagtaacggtggcagcgaggcgaggtggtagatccagcaccgcttctgcacgaccatccattcctccacccagagcatgtacccaggcttgcctctcctcggggaacatgccgaggtcgtccgactggagcagaaggcgacatcgctcaacaagctggtcgaggagcagtgcgagagcataaacgatctcaagtccaagagggaagctgaaccttgttcttctgccatcatctagcatgcggcttacctttgtttgtgatgatggttatccagagcaactagctctcttgagcaacgactttgaattttcggaagttatgattgaagaaatatcagctgataattctggacgctctttcctaatcagaatttcagaatctaaagtgttttactactggtgtgctgagaagtcgaaggaagattgaatggaacttcttgcaaaggtcttcaagggagaagcggcttaaaatgtgtgagcaggtattttcggactcgtaccagaaagggaaaagctacaaaggttgacacagcgccgaagctgtgaagcaggaaagcttcggcatgttcgcagaaaagggaaccgacttaaagatgaaaaggccatttagacctcgatagagtgctatagaattatcaccaaatgtaaagggcatgtatgtaattttgtatgggttgtaccccgtgcctataaataggtgaacagtacccccgtactgttcacgttgacttggcatttgcttttgcgtcacacttgtattttcatctccttccaaaccgaaggtacatttataatttgatattgtctctatttctctataatgatataataaagttaaatgaatgatgttatatgattattcgtgct

SEQ ID NO: 5318 - DNA, 2175 bp, Zea Mays
atagcccctcacgccagccgccaatgccccaatcccgtaatcgcagcctcgccccgctcgcatcttcctctccctctcagcactggtgctcaatctacaggttgtcccgctccctacacacccgccctccggtgtgaacctccatgacgtccacaaccactctccgatctgctgtcgtgacctcatccagccgtgctgtggcagtggatcgaagttcgctccagctctgattgggggaaaatgactagggtatcaagtggaaaaacataatggtccaggttctactgcggcacctctttcaggctaagcatctaaacaacaatatgtaaattatccttttccaataaaatacatgcttaaatcgtggctgctaggcgaatggtcctactttggtcatcaaatgcaggaattccactactatatgtgccacttgaagttgttatgtcaaaataatatggtgaaaacgagcgtctattgggatctattttttatcttgcaaatgatcttcctgaaggagattgatatgtcaagatacgcttgtttcatttgagctcaatgttatctgaaaatatatagactgccttcgtccccttcatcactgctaatgaccgtgacttggagacccgacagcggccctcgacgttgtcgccgccgagcccatgctggttccaccagtggtccaccacccggatgtggtccgccaagacgagcagtaacggtggcagcgaggcgaggtggtagatccagcaccgcttctgcacgaccatccattcctccacccagagcatgtacccaggcttgcctctcctcggggaacatgccgaggtcgtccgactggagcagaaggcgacatcgctcaacaagctggtcgaggagcagtgcgagagcataaacgatctcaagtccaagagccatccgattctgggcccagaacactttgccaaacaaaaagttatcgctcttcatccttgataggctacagaagaaggatacatatgctgtattttcgtagcctgttgatcctgaagaggtttgtttcaatgcacgatcacattaattggtacatgtattcttatcattataaaaaagggactgtataaacaaccttcaactaggagaaattcgctgaattttgaatatccaatccatgttgttatccagtccacagtaaagtacacatgtgaacctagagttgttttatttttaagaacctacaataattgtttagtcttgggacgctattattttcttgctaaagtctgtagaagagtctgtcatgttttatatgatatctaggattcatctttcttccaactaatcgctaatacaccagtttcagcaactgaactttagcaggatgtgtttacatagatgacatttgtatgcctcactctgcattgctttgcttggcctgacatcaagatacactgtttaatcaccttatcagtcttcttattttttataacaatatgttctgggatctcatgtatgtacatttcctatgtgcagagggaagctgaaccttgttcttctgccatcatctagcatgcggcttacctttgtttgtgatgatggttatccagagcaactagctctcttgagcaacgactttgaattttcggaagttatgattgaagaaatatcagctgataattctggacgctctttcctaatcagaatttcagaatctaaagtgttttactactggtgtgctgagaagtcgaaggaagattgaatggaacttcttgcaaaggtcttcaagggagaagcggcttaaaatgtgtgagcaggtattttcggactcgtaccagaaagggaaaagctacaaaggttgacacagcgccgaagctgtgaagcaggaaagcttcggcatgttcgcagaaaagggaaccgacttaaagatgaaaaggccatttagacctcgatagagtgctatagaattatcaccaaatgtaaagggcatgtatgtaattttgtatgggttgtaccccgtgcctataaataggtgaacagtacccccgtactgttcacgttgacttggcatttgcttttgcgtcacacttgtattttcatctccttccaaaccgaaggtacatttataatttgatattgtctctatttctctataatgatataataaagttaaatgaatgatgttatatgattattcgtgct

SEQ ID NO: 5319 - DNA, 1494 bp, Zea Mays
atagcccctcacgccagccgccaatgccccaatcccgtaatcgcagcctcgccccgctcgcatcttcctctccctctcagcactggtgctcaatctacaggttgtcccgctccctacacacccgccctccggtgtgaacctccatgacgtccacaaccactctccgatctgctgtcgtgacctcatccagccgtgctgtggcagtggatcgaagttcgctccagctctgattgggggaaaatgactagggtatcaagtggaaaaacataatggtccaggttctactgcggcacctctttcaggctaagcatctaaacaacaatatgaattccactactatatgtgccacttgaagttgttatgtcaaaataatatggtgaaaacgagcgtctattgggatctattttttatcttgcaaatgatcttcctgaaggagattgatatgtcaagatacgcttgtttcatttgagctcaatgttatctgaaaatatatagactgccttcgtccccttcatcactgctaatgaccgtgacttggagacccgacagcggccctcgacgttgtcgccgccgagcccatgctggttccaccagtggtccaccacccggatgtggtccgccaagacgagcagtaacggtggcagcgaggcgaggtggtagatccagcaccgcttctgcacgaccatccattcctccacccagagcatgtacccaggcttgcctctcctcggggaacatgccgaggtcgtccgactggagcagaaggcgacatcgctcaacaagctggtcgaggagcagtgcgagagcataaacgatctcaagtccaagagggaagctgaaccttgttcttctgccatcatctagcatgcggcttacctttgtttgtgatgatggttatccagagcaactagctctcttgagcaacgactttgaattttcggaagttatgattgaagaaatatcagctgataattctggacgctctttcctaatcagaatttcagaatctaaagtgttttactactggtgtgctgagaagtcgaaggaagattgaatggaacttcttgcaaaggtcttcaagggagaagcggcttaaaatgtgtgagcaggtattttcggactcgtaccagaaagggaaaagctacaaaggttgacacagcgccgaagctgtgaagcaggaaagcttcggcatgttcgcagaaaagggaaccgacttaaagatgaaaaggccatttagacctcgatagagtgctatagaattatcaccaaatgtaaagggcatgtatgtaattttgtatgggttgtaccccgtgcctataaataggtgaacagtacccccgtactgttcacgttgacttggcatttgcttttgcgtcacacttgtattttcatctccttccaaaccgaaggtacatttataatttgatattgtctctatttctctataatgatataataaagttaaatgaatgatgttatatgattattcgtgct

SEQ ID NO: 5320 - DNA, 1869 bp, Zea Mays
atagcccctcacgccagccgccaatgccccaatcccgtaatcgcagcctcgccccgctcgcatcttcctctccctctcagcactggtgctcaatctacaggttgtcccgctccctacacacccgccctccggtgtgaacctccatgacgtccacaaccactctccggtatgaatcccgcgtgcgcttacacgaagattgatctgctgtcgtgacctcatccagccgtgctgtggcagtggatcgaagttcgctccagctctgattgggggaaaatgactagggtatcaagtggaaaaacataatggtccaggttctactgcggcacctctttcaggctaagcatctaaacaacaatatgtaaattatccttttccaataaaatacatgcttaaatcgtggctgctaggcgaatggtcctactttggtcatcaaatgcaggttagcttaactttttctaatgcattattatttgtggtttccatcaaatgtacgttagcttatcttttagcaaatttgtagctgatgtcaattaactttttagtggaattttatctgctcattcttatattcaggaattccactactatatgtgccacttgaagttgttatgtcaaaataatatggtgaaaacgagcgtctattgggatctattttttatcttgcaaatgatcttcctgaaggaggtaatatattcttagatgaggtatatatcgtaatacttatagcataaacactcaagccactacaaactgccttcgtccccttcatcactgctaatgaccgtgacttggagacccgacagcggccctcgacgttgtcgccgccgagcccatgctggttccaccagtggtccaccacccggatgtggtccgccaagacgagcagtaacggtggcagcgaggcgaggtggtagatccagcaccgcttctgcacgaccatccattcctccacccagagcatgtacccaggcttgcctctcctcggggaacatgccgaggtcgtccgactggagcagaaggcgacatcgctcaacaagctggtcgaggagcagtgcgagagcataaacgatctcaagtccaagagccatccgattctgggcccagaacactttgccaaacaaaaagttatcgctcttcatccttgataggctacagaagaaggatacatatgctgtattttcgtagcctgttgatcctgaagagagggaagctgaaccttgttcttctgccatcatctagcatgcggcttacctttgtttgtgatgatggttatccagagcaactagctctcttgagcaacgactttgaattttcggaagttatgattgaagaaatatcagctgataattctggacgctctttcctaatcagaatttcagaatctaaagtgttttactactggtgtgctgagaagtcgaaggaagattgaatggaacttcttgcaaaggtcttcaagggagaagcggcttaaaatgtgtgagcaggtattttcggactcgtaccagaaagggaaaagctacaaaggttgacacagcgccgaagctgtgaagcaggaaagcttcggcatgttcgcagaaaagggaaccgacttaaagatgaaaaggccatttagacctcgatagagtgctatagaattatcaccaaatgtaaagggcatgtatgtaattttgtatgggttgtaccccgtgcctataaataggtgaacagtacccccgtactgttcacgttgacttggcatttgcttttgcgtcacacttgtattttcatctccttccaaaccgaaggtacatttataatttgatattgtctctatttctctataatgatataataaagttaaatgaatgatgttatatgattattcgtgct

SEQ ID NO: 5321 - DNA, 1714 bp, Zea Mays
atagcccctcacgccagccgccaatgccccaatcccgtaatcgcagcctcgccccgctcgcatcttcctctccctctcagcactggtgctcaatctacaggttgtcccgctccctacacacccgccctccggtgtgaacctccatgacgtccacaaccactctccggtatgaatcccgcgtgcgcttacacgaagattggtaatagtggcgacccagtcgcagccgtggaccttctcctcctcatcgcttgctcgttgtcgtcttttgcctacgtctgcacccgacgctgctacccttcgctcacctgttcatcatcctttcagatctgctgtcgtgacctcatccagccgtgctgtggcagtggatcgaagttcgctccagctctgattgggggaaaatgactagggtatcaagtggaaaaacataatggtccaggttctactgcggcacctctttcaggctaagcatctaaacaacaatatgaattccactactatatgtgccacttgaagttgttatgtcaaaataatatggtgaaaacgagcgtctattgggatctattttttatcttgcaaatgatcttcctgaaggagactgccttcgtccccttcatcactgctaatgaccgtgacttggagacccgacagcggccctcgacgttgtcgccgccgagcccatgctggttccaccagtggtccaccacccggatgtggtccgccaagacgagcagtaacggtggcagcgaggcgaggtggtagatccagcaccgcttctgcacgaccatccattcctccacccagagcatgtacccaggcttgcctctcctcggggaacatgccgaggtcgtccgactggagcagaaggcgacatcgctcaacaagctggtcgaggagcagtgcgagagcataaacgatctcaagtccaagagccatccgattctgggcccagaacactttgccaaacaaaaagttatcgctcttcatccttgataggctacagaagaaggatacatatgctgtattttcgtagcctgttgatcctgaagagagggaagctgaaccttgttcttctgccatcatctagcatgcggcttacctttgtttgtgatgatggttatccagagcaactagctctcttgagcaacgactttgaattttcggaagttatgattgaagaaatatcagctgataattctggacgctctttcctaatcagaatttcagaatctaaagtgttttactactggtgtgctgagaagtcgaaggaagattgaatggaacttcttgcaaaggtcttcaagggagaagcggcttaaaatgtgtgagcaggtattttcggactcgtaccagaaagggaaaagctacaaaggttgacacagcgccgaagctgtgaagcaggaaagcttcggcatgttcgcagaaaagggaaccgacttaaagatgaaaaggccatttagacctcgatagagtgctatagaattatcaccaaatgtaaagggcatgtatgtaattttgtatgggttgtaccccgtgcctataaataggtgaacagtacccccgtactgttcacgttgacttggcatttgcttttgcgtcacacttgtattttcatctccttccaaaccgaaggtacatttataatttgatattgtctctatttctctataatgatataataaagttaaatgaatgatgttatatgattattcgtgct

SEQ ID NO: 5322 - DNA, 1753 bp, Zea Mays
atagcccctcacgccagccgccaatgccccaatcccgtaatcgcagcctcgccccgctcgcatcttcctctccctctcagcactggtgctcaatctacaggttgtcccgctccctacacacccgccctccggtgtgaacctccatgacgtccacaaccactctccggtatgaatcccgcgtgcgcttacacgaagattggtaatagtggcgacccagtcgcagccgtggaccttctcctcctcatcgcttgctcgttgtcgtcttttgcctacgtctgcacccgacgctgctacccttcgctcacctgttcatcatcctttcagatctgctgtcgtgacctcatccagccgtgctgtggcagtggatcgaagttcgctccagctctgattgggggaaaatgactagggtatcaagtggaaaaacataatggtccaggttctactgcggcacctctttcaggctaagcatctaaacaacaatatgtaaattatccttttccaataaaatacatgcttaaatcgtggctgctaggcgaatggtcctactttggtcatcaaatgcaggaattccactactatatgtgccacttgaagttgttatgtcaaaataatatggtgaaaacgagcgtctattgggatctattttttatcttgcaaatgatcttcctgaaggaggtaatatattcttagatgagattgatatgtcaagatacgcttgtttcatttgagctcaatgttatctgaaaatatatagactgccttcgtccccttcatcactgctaatgaccgtgacttggagacccgacagcggccctcgacgttgtcgccgccgagcccatgctggttccaccagtggtccaccacccggatgtggtccgccaagacgagcagtaacggtggcagcgaggcgaggtggtagatccagcaccgcttctgcacgaccatccattcctccacccagagcatgtacccaggcttgcctctcctcggggaacatgccgaggtcgtccgactggagcagaaggcgacatcgctcaacaagctggtcgaggagcagtgcgagagcataaacgatctcaagtccaagagggaagctgaaccttgttcttctgccatcatctagcatgcggcttacctttgtttgtgatgatggttatccagagcaactagctctcttgagcaacgactttgaattttcggaagttatgattgaagaaatatcagctgataattctggacgctctttcctaatcagaatttcagaatctaaagtgttttactactggtgtgctgagaagtcgaaggaagattgaatggaacttcttgcaaaggtcttcaagggagaagcggcttaaaatgtgtgagcaggtattttcggactcgtaccagaaagggaaaagctacaaaggttgacacagcgccgaagctgtgaagcaggaaagcttcggcatgttcgcagaaaagggaaccgacttaaagatgaaaaggccatttagacctcgatagagtgctatagaattatcaccaaatgtaaagggcatgtatgtaattttgtatgggttgtaccccgtgcctataaataggtgaacagtacccccgtactgttcacgttgacttggcatttgcttttgcgtcacacttgtattttcatctccttccaaaccgaaggtacatttataatttgatattgtctctatttctctataatgatataataaagttaaatgaatgatgttatatgattattcgtgct

SEQ ID NO: 5323 - DNA, 2947 bp, Zea Mays
cacgtactggtgtattgtgtcagcggtgtaacgtacatgtataaggctagctaaagagatttaaggtttgtttggttcgtggctaaccgtgtcacactttgtctaaggttagtcgtccgaattgaagaactaatcttaggcataaaagttaaaatgtgacaatttaggcagcaaatcaaacatgacactgtgcgcaccaggtacgtttccctctaacttttaagaaagaaactaccaatatgaatggagtttttctccaacttctcgtcggtccgcttcttctcatggatccgtccgcccaggcctccgccgcctagccgcagtcgggctcctcctctgttccaccgcaagctcctcgtccacgcgctccattcgtcccgccgtttctcctccctgcgccgacgccgggcccaccttcgcacgcggctgtggggcccgcctcctccagccaccgccgtcggggtcgtcttcctcgccatcaactgcgccgcgccggtcatctcgtcttgttgcgtctgggtgtcgcggcagctgctggacggcggcggctacctcatcttggtcctcgtcgttctcttcttcctcaacgggaaggacaaagcggcggcggatttggggtcttgtctcccaaattcaattcctccccgaatctaaccgccgacgtcgctaccacggatcaccgtggaaccctgagtctgtcgcgggttttggcatgctatagccgccagcctgcagcagcgatcgtctcggtcttgggcccccgggctagccatgtcgtggggacggttcagcttcactcctcagcaggggcccacgctgacgcggcgaacgcgggtgttccctgcgcacaagcccgcacctcgcaacgtggtggtcatcgatgaggacgatgatggtgatgttatcattatggagcgcgcagctgcgcgaggttcaccttctgcggcggcggcaccaggatctgaagcgaggaaagggggcggcttctctggtgatgtgatcaacatagatgatgatgaagatgagaaagatggtaccagaggggataaagcaggtcctagcatgtcctgtgcctctgggtctccagtagcgatgaccccaggccggggttctcccaggaaccgatatgggtttgattgctcgtatgacagctctgagagcaatttgaccaaaggatgggactctgacactgatgacggctctgattgtgagattttggatgacacggctggtacagcccgtgagatgtgggagacggctgcttccagaaaaaagccacctcatggtgtcgacgagtgtgaggatggtggtgctactgcattcgcgtcatgtgctgggttggagacacaaccaggtaaatactctgagcatctctttggtgctgaacgccatccagacgagagtatgtcttggttttacagtgctgcaagcaagtatggctctcaaaatagtagtgacagtacaaaagaaagccctgggcatgctcaaagcagttctggcactgaaaagggtgtccatggcccttctgtgccaaatactgaagaatgctctaatggagatttttccagtataaatggtagagaaagcgcacaaaatcgaaatggcagtggaaaggatatccctactgaatgccatctcaatgataacatatctcaaagttttagcgatgcccgtaaggaaggtcttcaaaataataccggcaggtcaaaggatcaccatgaccagttttcagcaccaaatgtcaaagaatgttcaatggttggttctgaaaaagcttcaagaggggttcaattacctcgccctgatgaaagctctgcctataacttcgctcctgcaaataggtttttttctggaatctggtcagtggataggaacgatggaagtcctccaatttttgtcagtactcctgaaaaggttgatgagacaatacctgatgatgtatattcacaaaagtatccatcaccacctgaagcttcctacaacacaattttttattctgctcaagataatggtctggccaagggtaaggatttgcttcaggatcctgaggaattagggcggtttgcttcagtgatcggtgaacgtgaaaaacacaaagaatctgttgagtacaagcgagcagcagaggaggaatgggcttcaagacatcggcaattacaaatacaggccgaggaagcaaagaaattgcgaaagagaaagaaagctgaagctcaacgattgcttgacatggagaagagacaaaagcaaagattgcaagaagtccgtgaatcgcagagaaagaatgaagaagctatacaactgaaggagcggtatcgggcaacggtcggaaaggagctggaagatatagaaaggagacattgtgatatgacttcaatactgcatgcgctaggcatctcagttgaaggtggtgaggttaaagccttcaagcaagctcttctgaaattccatcccgacagggtatcaaggaatgatatttatcaacaagtaaaagcagaggagacatttaagttcatttcgcggctgaaggagaagctacctcggctatcctaatagccatcccactcttttttccacatgccttggcgcatcctccattcacctgtagggtcaaggtacagaattcagaggatgtttattggcgttatttacaagtaactagggctttagcttgttaaatgtgtttttgtgtgtgtgtgtgtgtgttgggggttgggttgggtaggcattcgtgtcagctatgacatgggatggtaaccacttcgatttgtgatggcgaaatggttgtacatcaccgatggcagaaagatcattttttaagaccatctttattagtttattcgacagaataccacggtgtcgtcctctggttttcatacatctgcattttgtactaaaaggtgtctaggagacatcagaacatcgcaattaaatcagatgtagccctttc

SEQ ID NO: 5324 - DNA, 2753 bp, Zea Mays
cacgtactggtgtattgtgtcagcggtgtaacgtacatgtataaggctagctaaagagatttaaggtttgtttggttcgtggctaaccgtgtcacactttgtctaaggttagtcgtccgaattgaagaactaatcttaggcataaaagttaaaatgtgacaatttaggcagcaaatcaaacatgacactgtgcgcaccaggtacgtttccctctaacttttaagaaagaaactaccaatatgaatggagtttttctccaacttctcgtcggtccgcttcttctcatggatccgtccgcccaggcctccgccgcctagccgcagtcgggctcctcctctgttccaccgcaagctcctcgtccacgcgctccattcgtcccgccgtttctcctccctgcgccgacgccgggcccaccttcgcacgcggctgtggggcccgcctcctccagccaccgccgtcggggtcgtcttcctcgccatcaactgcgccgcgccggtcatctcgtcttgttgcgtctgggtgtcgcggcagctgctggacggcggcggctacctcatcttggtcctcgtcgttctcttcttcctcaacgggaaggacaaagcggcggcggatttggggtcttgtctcccaaattcaattcctccccgaatctaaccgccgacgtcgctaccacggatcaccgtggaaccctgagtctgtcgcgggttttggcatgctatagccgccagcctgcagcagcgatcgtctcggtcttgggcccccgggctagccatgtcgtggggacggttcagcttcactcctcagcaggggcccacgctgacgcggcgaacgcgggtgttccctgcgcacaagcccgcacctcgcaacgtggtggtcatcgatgaggacgatgatggtgatgttatcattatggagcgcgcagctgcgcgaggttcaccttctgcggcggcggcaccaggatctgaagcgaggaaagggggcggcttctctggtgatgtgatcaacatagatgatgatgaagatgagaaagatggtaccagaggggataaagcaggtcctagcatgtcctgtgcctctgggtctccagtagcgatgaccccaggccggggttctcccaggaaccgatatgggtttgattgctcgtatgacagctctgagagcaatttgaccaaaggatgggactctgacactgatgacggctctgattgtgagattttggatgacacggctggtacagcccgtgagatgtgggagacggctgcttccagaaaaaagccacctcatggtgtcgacgagtgtgaggatggtggtgctactgcattcgcgtcatgtgctgggttggagacacaaccaggtaaatactctgagcatctctttggtgctgaacgccatccagacgagagtatgtcttggttttacagtgctgcaagcaagtatggctctcaaaatagtagtgacagtacaaaagaaagccctgggcatgctcaaagcagttctggcactgaaaagggtgtccatggcccttctgtgccaaatactgaagaatgctctaatggagatttttccagtataaatggtagagaaagcgcacaaaatcgaaatggcagtggaaaggatatccctactgaatgccatctcaatgataacatatctcaaagttttagcgatgcccgtaaggaaggtcttcaaaataataccggcaggtcaaaggatcaccatgaccagttttcagcaccaaatgtcaaagaatgttcaatggttggttctgaaaaagcttcaagaggggttcaattacctcgccctgatgaaagctctgcctataacttcgctcctgcaaataggtttttttctggaatctggtcagtggataggaacgatggaagtcctccaatttttgtcagtactcctgaaaaggttgatgagacaatacctgatgatgtatattcacaaaagtatccatcaccacctgaagcttcctacaacacaattttttattctgctcaagataatggtctggccaagggtaaggatttgcttcaggatcctgaggaattagggcggtttgcttcagtgatcggtgaacgtgaaaaacacaaagaatctgttgagtacaagcgagcagcagaggaggaatgggcttcaagacatcggcaattacaaatacaggccgaggaagcaaagaaattgcgaaagagaaagaaagctgaagctcaacgattgcttgacatggagaagagacaaaagcaaagattgcaagaagtccgtgaatcgcagagaaagaatgaagaagctatacaactgaaggagcggtatcgggcaacggtcggaaaggagctggaagatatagaaaggagacattgtgatatgacttcaatactgcatgcgctaggcatctcagttgaaggtggtgaggttaaagccttcaagcaagctcttctgaaattccatcccgacagggtatcaaggaatgatatttatcaacaagtaaaagcagaggagacatttaagttcatttcgcggctgaaggagaagctacctcggctatcctaatagccatcccactcttttttccacatgccttggcgcatcctccattcacctgtagggtcaaggaacattgtgggtcaactgccaacattgctcatgctggtctacaagagtatattttgaaaatgcacaagtgtatttttgaaatgggattcagctaagcccaagcacactcaaatctttacccgaaaatgaggtcacatcac

SEQ ID NO: 5325 - DNA, 353 bp, Zea Mays
gccgtgagagcaaaatagccctagcaagtaccctgtatcccaccccgcgcctccaacttgttcttccgctgcaagacagcagtcccgagctgtatgcctaggggagccgcgagggggcggagatgccgacgctgacgaagctgtacagcatggaggaggctgccctccacaacacgcccgacgactgctgggtcatcgtcgacggcaagatttatgatgtgaccaagtatttggaagaccatcctgggggtgccgatgttctgctcgaagcaaccggtaaggatgctaccgtacaatttgacgatgcagggcacagcaagagtgccaaggataacgaatcaagctgattcatc

SEQ ID NO: 5326 - DNA, 684 bp, Zea Mays
taccctgtatcccaccccgcgcctccaacttgttcttccgctgcaagacagcagtcccgagctgtatgcctaggggagccgcgagggggcggagatgccgacgctgacgaagctgtacagcatggaggaggctgccctccacaacacgcccgacgactgctgggtcatcgtcgacggcaagatttatgatgtgaccaagtatttggaagaccatcctgggggtgccgatgttctgctcgaagcaaccggaaggagcaggacacgggatttgccagcaagcttaaggacaacgtggtgcagtactgggcaatcccagcagctgtaattgggatatcagctgttgttgctatattgtatgcgcgaaggaagtgaaagttaatgtgccatgcttgggcagatgatccttttaggctttgttcgtttcatccctaatccatggggattgagggggattggggtggattgagggggattttgacttgtagtggattcaatccctctcaatccccatgggtttgataaaaacgaacagggcattagagggatcaacccatggtgcatggatgggtatatgtactcctgtcccaaattacactatgatgttcgattcttagacacacttaggcaaacatttgcctgattaatgacactattttatcgatatgacaatcaattgatggattt

SEQ ID NO: 5327 - DNA, 1907 bp, Zea Mays
gaggcttgagcagcagaaccatcaaggcctgatatttttcttcgtggttgatggttaggaacaatttgatcctgcatccaatctaaggtaagttgcttctatgaattcgttcgttgttattgtaatgtagttgcagcaatatagtattcattgttgaggttatgtttttagttttaatggatctagttgctctggtttgatcgattattgaatctgctgttctgcagttattttacctctagactagaacttcagtatcaaatgtaaaaaatctgtgatctagtttcattgaaggatatatgttatgtgcttcatcaaaaaggttagattatgtagcacccgtcatgacactttccgaaaaggcagtagtgctagcgcaaaacaatcaggaaaacatcatttttgaggctgagttggccttttgaattgtctcttttgttttcaacgttttattgcttcttgatagtttagtttttttttcggatgaagggtacttagttataataatggatggttacgtgcaaaactcttgcagaggccagaatataagtgctgctccgtaagctgttatatcttgtgtatacgaaacgcgcaggtctcttccgttctcgtctatcagtgggccattatctcacagatgtgagaaacgatacaaactcaacatgacataaagccacaaacagtgtatcgctcccatataataccatctcgttaattgaaggatgacatgcgactgagtgagctattaataaagagggtcgagctcatttttaactcatatatttcttgaccttttgactaagataaagtgtaatatactaatatttgttcttatccgtttaatatatggtatgtggatcatttgctcattttaatattaaatttatttttaggggtattttttgtggggaagtctaccgtactagcttactaagtcgttcatctgttgcactgctggtagaacatggtccatcccaatcaataccatcaaatataattgtcaccagtttcatgcgtcgtgtgtaggtttgtttctctatcctgtttctcgcctatcagtagacttgttacccacagatggatcgtgagaaaccattcaagtccaacataatagaaagttgcacgcaacacaacgctttcacatagtaccaccctactagcttactagaccctcgtgtgtcgttcagccgttactactggtaggacatggtccatcccaaccaataccatcaaatataattgtgtgccaccagtttcacacgtcgtgtgtaggtttgtttctctatcccgcttctcgcttataagtggaccgttaccccatagatgtgttgtgggaaaacacccaagcctaacataatagaaagtcatatgcaacacagcaacacaacactttcatatagtaccaccctactagctaaaggaggaagagcgagctataataaagggctcgggttccttttcaagtttcaactcatacttttcttgaccttttgtttaagataattttaatatttattcttgtcggtttaatatatgatatattgactctatgttcattttaatattaaatttatttttatggttatttttaagatggtccactatactagcttattaatttattttttatggttattttttaagatggcccaccatactagcttattaatttatttttatggttatttttaagatggtccaccatactccatactagcttattaaggtccttacatgtcattcagccgttgcactgttggggtagggtctagccactaaatcaataccatcaaatatgattgtgtgtgtcaaaacacacgatcattgtactagtaatgttattatatgacatcatgtaaccaattaggctcctagagttctcaagccatctaggatttatgtcatat

SEQ ID NO: 5328 - DNA, 1941 bp, Zea Mays
cgcggcgacgccctccaacaaaaccgaagaggcgaggaaggaacacatgctctctccgctgttcttgctgagttgttgtggacaaaaagagcacgaaagtgggtagagaaaacggggggcaagccaaccacactcgcagccagcctgcccgctcgcccgcccgccattcttgccgattcgagtcgacgtcacgcctccggcgcccccttcggttgtcacctcgggggtcgcggattggtggaggggaggatttgagcggcgcggccatggatacaacatctagggccgccaagatcccgtcgctccaccagacggagatcaactgggataacctcgacaagaccaagctctacgtggtgggcgcaggcatgttcagcggggtcaccgtggcgctgtaccctgtctcggtggtcaagacccggatgcaggttgcctctggggacgccatggggaggaacgcactggctaccttcaagaacatccttaaggtggacggcgtgccagggctgtaccgggggtttcctactgttatcattggggctgtaccaactaggatcatcttcctcacggcgcttgagacaaccaaagcagcctctctcaagcttgttgagcccttcaagctgtcagagccggtgcaggctgcctttgccaatggccttgccggtctgtcggcatctacatgttcgcaggctatttttgtcccaattgatgtggtatgcctctcatttgcctccgacatgatgttgtacagacaaaagttatcttacagtaagttgctgttaaatgttaattagaattctagactactgtgctcactgttttgtgcattggaatgtttcagatcagccagaaattgatggttcaagggtattctggtaatgtcagatacaaaggtggaatagatgttgctcgcaaggtcataaaggctgatggcattagggggctctacagaggatttggactctctgttatgacctatgcaccatcgagtgctgtgtggtgggcgagttatggttctagccagcgcataatttggagtgcccttggccatttgcataacaaagaagaggctcctagccaattgaaaatagttggtgttcaagcatcaggggggatttttgctggtgctgtgacctcttttgttacgactcccatagatacaatcaagaccaggctgcagctgttccttctgctgacaaaccaggaccagtttgtcatggtttctgttataaggttatggataatgaaaataagccaaaagctggggaagttgttaaaagattgattgctgaagatggatggaaaggtttgtacagagggttgggtccaagatttttcagctcatcagcttggggtacctcaatgatagtatgctacgagtacctgaagcgcttgtgtgctaaagttgaagaggtctgacttctgttcttactatcctggaagttttgtattagcagaagtgaaataatgctgtatgtcgacaacattgacaccaccggaagcttcagttcttgctgacgtaggtgaaagcattcaacatggatgtttgatggtgtacttcatttgatgctagacaatagtctttacaaactttgcttctctgggctatattctcaaaaaaatggaggggcctatatttttttgctcatatgatgaatatgggttaggcggattattttaggtgagtataaacgatatcagatgtacacacttctcattcttttatacatgaaggctgttttagcgaggctgtatgattatgaccagtctggatgattgagaccagttgtaatgacacggaacgatgtttccgggagatgctgttttgaccttttttttttcctcatgcggtttcagttatctttttgatctgcccttggaatgcaaaaatgctgaacacgttgctgcacccatattttgagaagcaaatcgtaagcaaac

SEQ ID NO: 5329 - DNA, 2412 bp, Zea Mays
cgcggcgacgccctccaacaaaaccgaagaggcgaggaaggaacacatgctctctccgctgttcttgctgagttgttgtggacaaaaagagcacgaaagtgggtagagaaaacggggggcaagccaaccacactcgcagccagcctgcccgctcgcccgcccgccattcttgccgattcgagtcgacgtcacgcctccggcgcccccttcggttgtcacctcgggggtcgcggattggtggaggggaggatttgagcggcgcggccatggatacaacatctagggccgccaagatcccgtcgctccaccagacggagatcaactgggataacctcgacaagaccaagctctacgtggtgggcgcaggcatgttcagcggggtcaccgtggcgctgtaccctgtctcggtggtcaagacccggatgcaggttgcctctggggacgccatggggaggaacgcactggctaccttcaagaacatccttaaggtggacggcgtgccagggctgtaccgggggtttcctactgttatcattggggctgtaccaactaggatcatcttcctcacggcgcttgagacaaccaaagcagcctctctcaagcttgttgagcccttcaagctgtcagagccggtgcaggctgcctttgccaatggccttgccggtctgtcggcatctacatgttcgcaggctatttttgtcccaattgatgtgatcagccagaaattgatggttcaagggtattctggtaatgtcagatacaaaggtggaatagatgttgctcgcaaggtcataaaggctgatggcattagggggctctacagaggatttggactctctgttatgacctatgcaccatcgagtgctgtgtggtgggcgagttatggttctagccagcgcataatttggagtgcccttggccatttgcataacaaagaagaggctcctagccaattgaaaatagttggtgttcaagcatcaggggggatttttgctggtgctgtgacctcttttgttacgactcccatagatacaatcaagaccaggctgcaggtactgtgtgacattctgtttgctgattagtcttgtaatttgatttgtgaggcttaccttatgataatgattcttgtctttacatttatgctgctcatttgtctataatttgattccttatcaatgcaatgccactaagtttaggggaatggatattttgtttcgggagtaatactcagatgtcagatttgaagacctaaatgattttttatactgatatttcctccaatggtggggtattgaggtggtaaactggaataatgtctatattaaacaatatatacttttatgtttacagctgttccttctgctgacaaaccaggaccagtttgtcatggtttctgttataaggtaaaaaaaaggaaacttccatttggaaaacttgatatctatgacatcattatttatagtaacaaaagttagcacattcagactgagtaaagtatgccaggaatatgtcatgcatttttatgacaaatttcacatatctccaaatgttacatgttaagtttgtagcggtaaactgataatataactaccaaccctgaaagttctcacaaggcacaactctatattttgacagttgtgctttctctccctctgcatttgttactacagatgattacattgaattttgtttcttttcatttaggttatggataatgaaaataagccaaaagctggggaagttgttaaaagattgattgctgaagatggatggaaaggtttgtacagagggttgggtccaagatttttcagctcatcagcttggggtacctcaatgatagtatgctacgagtacctgaagcgcttgtgtgctaaagttgaagaggtctgacttctgttcttactatcctggaagttttgtattagcagaagtgaaataatgctgtatgtcgacaacattgacaccaccggaagcttcagttcttgctgacgtaggtgaaagcattcaacatggatgtttgatggtgtacttcatttgatgctagacaatagtctttacaaactttgcttctctgggctatattctcaaaaaaatggaggggcctatatttttttgctcatatgatgaatatgggttaggcggattattttaggtgagtataaacgatatcagatgtacacacttctcattcttttatacatgaaggctgttttagcgaggctgtatgattatgaccagtctggatgattgagaccagttgtaatgacacggaacgatgtttccgggagatgctgttttgaccttttttttttcctcatgcggtttcagttatctttttgatctgcccttggaatgcaaaaatgctgaacacgttgctgcacccatattttgagaagcaaatcgtaagcaaac

SEQ ID NO: 5330 - DNA, 1378 bp, Zea Mays
cgcggcgacgccctccaacaaaaccgaagaggcgaggaaggaacacatgctctctccgctgttcttgctgagttgttgtggacaaaaagagcacgaaagtgggtagagaaaacggggggcaagccaaccacactcgcagccagcctgcccgctcgcccgcccgccattcttgccgattcgagtcgacgtcacgcctccggcgcccccttcggttgtcacctcgggggtcgcggattggtggaggggaggatttgagcggcgcggccatggatacaacatctagggccgccaagatcccgtcgctccaccagacggagatcaactgggataaatcagccagaaattgatggttcaagggtattctggtaatgtcagatacaaaggtggaatagatgttgctcgcaaggtcataaaggctgatggcattagggggctctacagaggatttggactctctgttatgacctatgcaccatcgagtgctgtgtggtgggcgagttatggttctagccagcgcataatttggagtgcccttggccatttgcataacaaagaagaggctcctagccaattgaaaatagttggtgttcaagcatcaggggggatttttgctggtgctgtgacctcttttgttacgactcccatagatacaatcaagaccaggctgcaggttatggataatgaaaataagccaaaagctggggaagttgttaaaagattgattgctgaagatggatggaaaggtttgtacagagggttgggtccaagatttttcagctcatcagcttggggtacctcaatgatagtatgctacgagtacctgaagcgcttgtgtgctaaagttgaagaggtctgacttctgttcttactatcctggaagttttgtattagcagaagtgaaataatgctgtatgtcgacaacattgacaccaccggaagcttcagttcttgctgacgtaggtgaaagcattcaacatggatgtttgatggtgtacttcatttgatgctagacaatagtctttacaaactttgcttctctgggctatattctcaaaaaaatggaggggcctatatttttttgctcatatgatgaatatgggttaggcggattattttaggtgagtataaacgatatcagatgtacacacttctcattcttttatacatgaaggctgttttagcgaggctgtatgattatgaccagtctggatgattgagaccagttgtaatgacacggaacgatgtttccgggagatgctgttttgaccttttttttttcctcatgcggtttcagttatctttttgatctgcccttggaatgcaaaaatgctgaacacgttgctgcacccatattttgagaagcaaatcgtaagcaaac

SEQ ID NO: 5331 - DNA, 1490 bp, Zea Mays
gttcatgctctgtgatgacccaaggtggtgcgtcggcgagtatggtggaattgatcagcagcctcgacaagaccaagctctacgtggtgggcgcaggcatgttcagcggggtcaccgtggcgctgtaccctgtctcggtggtcaagacccggatgcaggttgcctctggggacgccatggggaggaacgcactggctaccttcaagaacatccttaaggtggacggcgtgccagggctgtaccgggggtttcctactgttatcattggggctgtaccaactaggatcatcttcctcacggcgcttgagacaaccaaagcagcctctctcaagcttgttgagcccttcaagctgtcagagccggtgcaggctgcctttgccaatggccttgccggtctgtcggcatctacatgttcgcaggctatttttgtcccaattgatgtgatcagccagaaattgatggttcaagggtattctggtaatgtcagatacaaaggtggaatagatgttgctcgcaaggtcataaaggctgatggcattagggggctctacagaggatttggactctctgttatgacctatgcaccatcgagtgctgtgtggtgggcgagttatggttctagccagcgcataatttggagtgcccttggccatttgcataacaaagaagaggctcctagccaattgaaaatagttggtgttcaagcatcaggggggatttttgctggtgctgtgacctcttttgttacgactcccatagatacaatcaagaccaggctgcaggttatggataatgaaaataagccaaaagctggggaagttgttaaaagattgattgctgaagatggatggaaaggtttgtacagagggttgggtccaagatttttcagctcatcagcttggggtacctcaatgatagtatgctacgagtacctgaagcgcttgtgtgctaaagttgaagaggtctgacttctgttcttactatcctggaagttttgtattagcagaagtgaaataatgctgtatgtcgacaacattgacaccaccggaagcttcagttcttgctgacgtaggtgaaagcattcaacatggatgtttgatggtgtacttcatttgatgctagacaatagtctttacaaactttgcttctctgggctatattctcaaaaaaatggaggggcctatatttttttgctcatatgatgaatatgggttaggcggattattttaggtgagtataaacgatatcagatgtacacacttctcattcttttatacatgaaggctgttttagcgaggctgtatgattatgaccagtctggatgattgagaccagttgtaatgacacggaacgatgtttccgggagatgctgttttgaccttttttttttcctcatgcggtttcagttatctttttgatctgcccttggaatgcaaaaatgctgaacacgttgctgcacccatattttgagaagcaaatcgtaagcaaac

SEQ ID NO: 5332 - DNA, 614 bp, Zea Mays
gttaattttaagtattcaggcacttctcatttagaatttagtttatatggtgtcattcagagcgcttgtgtgctaaagttgaagaggtctgacttctgttcttactatcctggaagttttgtattagcagaagtgaaataatgctgtatgtcgacaacattgacaccaccggaagcttcagttcttgctgacgtaggtgaaagcattcaacatggatgtttgatggtgtacttcatttgatgctagacaatagtctttacaaactttgcttctctgggctatattctcaaaaaaatggaggggcctatatttttttgctcatatgatgaatatgggttaggcggattattttaggtgagtataaacgatatcagatgtacacacttctcattcttttatacatgaaggctgttttagcgaggctgtatgattatgaccagtctggatgattgagaccagttgtaatgacacggaacgatgtttccgggagatgctgttttgaccttttttttttcctcatgcggtttcagttatctttttgatctgcccttggaatgcaaaaatgctgaacacgttgctgcacccatattttgagaagcaaatcgtaagcaaac

SEQ ID NO: 5333 - DNA, 1048 bp, Zea Mays
acgagcgagaactgttgtcatttcatgagacgttactcgggatgcacttgtaacgggatagtgtagtagcaagcataggagtaaggagttttgctagtcttcttcagcttcagtagttcagtccaatcacagatcgcagtacaactgaacccgcctcccgcacaaggcatccaggatttgttcggccttcggacttcggagggtagagaatcgaagcgacgagaacaaagcaatgaacgaggcggtgcaggaggcgaagctgctgcggcaggtgaacgcgctcatcgtggcacacctccgtagccagaacctcgggcaggccgcagccgccgtcgccgccgccaccatgacccccatctccgctgccgaatccgtccccgccaatcacctcctgcgtctcgtggccaagggcctcgccgcggagcacggaggaggtgacgccgcttccgcattcgactccgccgggttcggtgtggcggtgcagccgcccggctccagtgccgtggatttcagtattcaggatgtcaagggctcatccaaaagcttccccaagcacgaggtgaagcatgtctctgaccataagaacgctgcccggtgtgtgaaatttagtcctgatggaaagtattttgcaactgggagtgctgatacatccattaagttttttgaggttgctaagattaagcagactatggtaggagactctaaagatggccctgccaggcctgtggtacggacattttatgatcacacacaggccatcaatgatctggattttcatcctgagagtccaatactgatatcagctgcaaaagacagtacaataagattctttgacttttcaaaaaccaatgcgaggaaagcgttcagagttattcaggatactcataatgttagatctgtatgttttcatccttgtggggattaccttttagcaggcttaagaatttggatttcattcctggattaacagtttctatctcttgggcatttgaaaaagattgcgatcatatcttatggatttttcttctttcatatagtcaaatatttc

SEQ ID NO: 5334 - DNA, 1843 bp, Zea Mays
acgagcgagaactgttgtcatttcatgagacgttactcgggatgcacttgtaacgggatagtgtagtagcaagcataggagtaaggagttttgctagtcttcttcagcttcagtagttcagtccaatcacagatcgcagtacaactgaacccgcctcccgcacaaggcatccaggatttgttcggccttcggacttcggagggtagagaatcgaagcgacgagaacaaagcaatgaacgaggcggtgcaggaggcgaagctgctgcggcaggtgaacgcgctcatcgtggcacacctccgtagccagaacctcgggcaggccgcagccgccgtcgccgccgccaccatgacccccatctccgctgccgaatccgtccccgccaatcacctcctgcgtctcgtggccaagggcctcgccgcggagcacggaggaggtgacgccgcttccgcattcgactccgccgggttcggtgtggcggtgcagccgcccggctccagtgccgtggatttcagtattcaggatgtcaagggctcatccaaaagcttccccaagcacgaggtgaagcatgtctctgaccataagaacgctgcccggtgtgtgaaatttagtcctgatggaaagtattttgcaactgggagtgctgatacatccattaagttttttgaggttgctaagattaagcagactatggtaggagactctaaagatggccctgccaggcctgtggtacggacattttatgatcacacacaggccatcaatgatctggattttcatcctgagagtccaatactgatatcagctgcaaaagacagtacaataagattctttgacttttcaaaaaccaatgcgaggaaagcgttcagagttattcaggatactcataatgttagatctgtatgttttcatccttgtggggattaccttttagcagggactgatcacccagttgctcatttatatgatataaatacttttacatgctacttatcagcaaatgcacaggattctagttctcccattaaccaggtacgctactcttgtactgggagcttgtatgtgactgcttctaaagatggttctctgcgcatttgggatggagtatctgctgaatgtgttcgacctattattggagcacatggatcatcagaagctattagcgcgattttcaccaaagatgagaggtaagtgagctaccagtatgtctaaggtgttcttccctcaagatataagatccagctattgtttggtttgaagaacagagagaaagacatatgctgcatgtttgactcaagacagtaactacctcaaaccctgtttggaatgtgggaatcttgtagtaattctgaatgatttgtaacatgtcatgcagaatctcgtgtgtttcagacaggtcttaactctatgacacgaatagcaactaacatctctttctccttttctctaatgtttctccactaaactaatctgcctataagcacttttgaggcttcttctaaaaggcctagtttttaatgttatgaattgcactatattcaatatgagagcactagtcccgaatacatacactagagatcgtgtggaacaaggacctccacatattagagtgaacaagatcaaaaggatgttgagaaacaaactcactagaacggtaaggaggttgtatctacttttctaactgacaaccctaacactgatgtaaagacctacaacctaaaacagagcctaaaaaaccatgactaatcgaagtggtaatggagagccacaaatatggcctagatgatgatgccactgaacaaaagacgaaatcaacatagtcaaaacgaccctagcaagactgac

SEQ ID NO: 5335 - DNA, 1700 bp, Zea Mays
acgagcgagaactgttgtcatttcatgagacgttactcgggatgcacttgtaacgggatagtgtagtagcaagcataggagtaaggagttttgctagtcttcttcagcttcagtagttcagtccaatcacagatcgcagtacaactgaacccgcctcccgcacaaggcatccaggatttgttcggccttcggacttcggagggtagagaatcgaagcgacgagaacaaagcaatgaacgaggcggtgcaggaggcgaagctgctgcggcaggtgaacgcgctcatcgtggcacacctccgtagccagaacctcgggcaggccgcagccgccgtcgccgccgccaccatgacccccatctccgctgccgaatccgtccccgccaatcacctcctgcgtctcgtggccaagggcctcgccgcggagcacggaggaggtgacgccgcttccgcattcgactccgccgggttcggtgtggcggtgcagccgcccggctccagtgccgtggatttcagtattcaggatgtcaagggctcatccaaaagcttccccaagcacgaggtgaagcatgtctctgaccataagaacgctgcccggtgtgtgaaatttagtcctgatggaaagtattttgcaactgggagtgctgatacatccattaagttttttgaggttgctaagattaagcagactatggtaggagactctaaagatggccctgccaggcctgtggtacggacattttatgatcacacacaggccatcaatgatctggattttcatcctgagagtccaatactgatatcagctgcaaaagacagtacaataagattctttgacttttcaaaaaccaatgcgaggaaagcgttcagagttattcagggactgatcacccagttgctcatttatatgatataaatacttttacatgctacttatcagcaaatgcacaggattctagttctcccattaaccaggtacgctactcttgtactgggagcttgtatgtgactgcttctaaagatggttctctgcgcatttgggatggagtatctgctgaatgtgttcgacctattattggagcacatggatcatcagaagctattagcgcgattttcaccaaagatgagaggtacgtcctatcttgtgggaaagattctcgtgtcaagttatgggaagttggcactggacgacttgtgaagcaatatgcaggagcaattcgcagacaatttcgttgtcaggctgtcttcaatgaaaccgaggaatttgtgctatcagttgatgaacaaaacaatgaggttgtcgtctgggatgcacttactgctgaaaaggttacaagattgccttctggcagcactggtgctcctagatggctcgaccattccccagttgagccagtttttgttagttgtggaaacgatagatcgatcaaattctggaaacaaaccgtataagcttgtagattcaaccacgcaaatcaaaagagtatgttttcagtattactgtttcaggaggaatgtgctagtgtaactttagttgtatatgggagaaatttgcataagcgatttttttttgaaactgcataagcaattgtttgacctaatagcaaatcccaatcagatgtttttttttggttctgcagatgccagttatatgaaccattgacctgatttttattggtcagcctcctttcgatgttctgtta

SEQ ID NO: 5336 - DNA, 1601 bp, Zea Mays
acgagcgagaactgttgtcatttcatgagacgttactcgggatgcacttgtaacgggatagtgtagtagcaagcataggagtaaggagttttgctagtcttcttcagcttcagtagttcagtccaatcacagatcgcagtacaactgaacccgcctcccgcacaaggcatccaggatttgttcggccttcggacttcggagggtagagaatcgaagcgacgagaacaaagcaatgaacgaggcggtgcaggaggcgaagctgctgcggcaggtgaacgcgctcatcgtggcacacctccgtagccagaacctcgggcaggccgcagccgccgtcgccgccgccaccatgacccccatctccgctgccgaatccgtccccgccaatcacctcctgcgtctcgtggccaagggcctcgccgcggagcacggaggaggtgacgccgcttccgcattcgactccgccgggttcggtgtggcggtgcagccgcccggctccagtgccgtggatttcagtattcaggatgtcaagggctcatccaaaagcttccccaagcacgaggtgaagcatgtctctgaccataagaacgctgcccggtgtgtgaaatttagtcctgatggaaagtattttgcaactgggagtgctgatacatccattaagttttttgaggttgctaagattaagcagactatggtaggagactctaaagatggccctgccaggcctgtggtacggacattttatgatcacacacaggccatcaatgatctggattttcatcctgagagtccaatactgatatcagctgcaaaagacagtacaataagattctttgacttttcaaaaaccaatgcgaggaaagcgttcagagttattcaggatactcataatgttagatctgtatgttttcatccttgtggggattaccttttagcagggactgatcacccagttgctcatttatatgatataaatacttttacatgctacttatcagcaaatgcacaggattctagttctcccattaaccaggtacgctactcttgtactgggagcttgtatgtgactgcttctaaagatggttctctgcgcatttgggatggagtatctgctgaatgtgttcgacctattattggagcacatggatcatcagaagctattagcgcgattttcaccaaagatgagaggtacgtcctatcttgtgggaaagattctcgtgtcaagttatgggaagttggcactggacgacttgtgaagcaatatgcaggagcaattcgcagacaatttcgttgtcaggctgtcttcaatgaaaccgaggaatttgtgctatcagttgatgaacaaaacaatgaggttgtcgtctgggatgcacttactgctgaaaaggttacaagattgccttctggcagcactggtgctcctagatggctcgaccattccccagttgagccagtttttgttagttgtggaaacgatagatcgatcaaattctggaaacaaaccgtataagcttgtagattcaaccacgcaaatcaaaagaatgccagttatatgaaccattgacctgatttttattggtcagcctcctttcgatgttctgtta

SEQ ID NO: 5337 - DNA, 3595 bp, Zea Mays
gttttttttttcaaaatgatctcgtgtgcaaccgtacaaatgcaactgagaggagggaaatgcgagacccttcagtcctcgaagctctctggactgtgggtgattgggtgtggtcgtgtgggcctaaaatgggatggcccatccaagcccgacccgtatttgccagattcgagtgaactggatccaactaaacaaacaattttccccatttgccattcccgacgagcaccttcaccgtctcctcccagtcccacctcgcgtggcacgccatggctttctccccgcgctcgccgtggtcgcgtgccaagaaaaccgacgtctactcaaccttcgttgtccacggcgatgacgatgaagacgacgcccgcggcggcaggggcccctccacgcgggcggaggaagacgaggaggaagacccctcctcgctgcctccgcttcttcagcggctccccaaggactttggcggcgcctcgttcgacgacgacgaggacccctactcctccgaccctgacgatgcttccctctctgccacggcggccttcaagagcggcgtcccggcctccggtcgatctccgttcctggatctgcggcgctcaagcccccgcgctaccgatgacgacccgtactctaccttcgtcgttcattccaccacacgctcggggagaacctcctccagccctcgcgggtccgcctccggcacattcatccgtcgctcgggtggctcgtctagccctcgcgagtccgtctctggcacattcatccgccggaccggcagcccgtcgagccccgggaagtcagcctccggcacattcatccgccggccagggagcccgtcgagcccccgcgggtcgttctctggcaccttcattcgccacaccagcgggggctccagttcccatgaatctgcctctggcggcggcgggggtttcgggtcctctttctggactccagcggtggagcagtcagaggagctccggcagccatcgcctctgatgcagcaacaacagcaacaacattcaaggcggaagccatcggtcagctcggtgccagacagtgttaccagggaggatccttccaccaagtacgagctgctccatgagcttgggaaaggttcatatggtgcagtgtacaaagcaagggatctcagaacgcaggagcttgtggctgtcaagatcatctcattaacagaaggggaagaaggctatgaagacatacggggagaaattgagatgctgcagcaatgcagccatccaaatgttgtccgctactttggaagctaccaaggagaggagtacctatggataattatggaatactgtggtggtggaagtgttgctgacttgataggcatcacagaggagcctcttgatgaatcccaaatagcttacatttgtagagaagcactaaagggccttgcttacctgcactccatttttaaagttcacagagatattaaggggggcaacatccttctaactgagcaaggcgaggtgaagttgggtgattttggtgtagctgcccagctgacaagaaccatgtcaaagcgcaacacgttcattggtactccacattggatggcaccagaggtcattcaagaaagtcgttatgatggaaaggtagacgtttgggcattaggtgtatctgcaatcgagatggcagagggcatgccaccaagatccactgtgcatccaatgagagtaagcggtgcttctcaatgcgttgtcagtatctgcagttaatgaggctaataggctgtaacctgtaacagaataaactgctctatctttggtgcagtgtacttgtctctttaatttcatttctgatgcatttgttttaacttcatcttgctaactatttggtatacatatcaatctattatttcattttcgtttagattgatagactggctaacggtctctcttccccctgcctatctcaggttatcttcatgatatctagtgaaccagcacctatgctggaggataaagagaaatggtctctcctcttccatgattttattgcaaagtgtcttactaaagaccccagacttcggcctgctgcaattgagatgctgaagcacaaatttattgagaagtgcaatagtggagcttcgaaaatgttggcaaagatcaaggtagcgaagaagattagagccacactagctgtgcaaaatgagctgtctgaccctgacaatacaacgcaagatgtgccttttcgaataaatgaggactatggggaaactgtccctacaagttctcagcaacacatgaaacatggcacatataatgattgtcaggcaggtgattttggtactatgattgttcatactgaagatggggacgaagtgacagaatcacccattttcccaagaacagaattcatacccggccttggtagcatcaattctttcacacatgatccaaagagagcagaacttatttcaagtttttgggcggagaacataggtgatagtgatgccaataaagaccgagatacagattatggtcctgacatgcaggaatcaaaagtgatctcacctttaactggaacagtgaagaagaatattggtgcagaagggactataaggtgccatgataatcaaattaacttgtcaccaggacttgcaaacacaacaactaaattgaacaacagcccaagccgtaaagcgttttcagttcaggataagctctggtcaatttatgctgccggcaacactgtaccaataccatttcttaaggcaattgacatttcaccactagctctagtatcagaaaatgaatcaggaaatggcctggctgggtcaagtacaaatgatgctttggaggcagttagggagctgttcagtggtgatgggcaggcaaagaaaggacggaaagggcaaaacgaagtccctcttcctccgggtgtgcatcacaggctgacgacaagccccacattgatgaacctggcccaagctctagcttatcataaaacgtgctatgaggacatgccgctacaagattcacaagcgacgcaagagcagcaaacgatacaaaatctttgtgacacacttcgcacaatactgaggttgtagatctgcaagagtgaaggctgcaacctttggagttccgaagcctgcatggagccaagggtgaacgtggcactgatcctgctcgtggtggagaactgaggatcgaaggaacgcatgacatgtgcctaccgtggagcaggcctaatggcttctgcgttttagcctgtggacgctttggtcactggaagctgggttgacacaggaatctctacggaagtggaaatttctgtccctgttaatagcctcttggagtttcactatgtagagacggcatcaaattttgctaatcagattttgtggcactaacgcatattgtagcctggttttgtatcgttgtcaatgcatttgttctccaaataaagagaaatagttaagcagaaataaacgaaaagttatttatgttggctattcgaaatcatgggaggcgtgatttctgctgtcttgaccccgtattccttgtgtctggccattgtacgccatgcttcgtgttgttaagtgtcagttttttttagcgcgcgtgtgaat

SEQ ID NO: 5338 - DNA, 3219 bp, Zea Mays
gctctctggactgtgggtgattgggtgtggtcgtgtgggcctaaaatgggatggcccatccaagcccgacccgtatttgccagattcgagtgaactggatccaactaaacaaacaattttccccatttgccattcccgacgagcaccttcaccgtctcctcccagtcccacctcgcgtggcacgccatggctttctccccgcgctcgccgtggtcgcgtgccaagaaaaccgacgtctactcaaccttcgttgtccacggcgatgacgatgaagacgacgcccgcggcggcaggggcccctccacgcgggcggaggaagacgaggaggaagacccctcctcgctgcctccgcttcttcagcggctccccaaggactttggcggcgcctcgttcgacgacgacgaggacccctactcctccgaccctgacgatgcttccctctctgccacggcggccttcaagagcggcgtcccggcctccggtcgatctccgttcctggatctgcggcgctcaagcccccgcgctaccgatgacgacccgtactctaccttcgtcgttcattccaccacacgctcggggagaacctcctccagccctcgcgggtccgcctccggcacattcatccgtcgctcgggtggctcgtctagccctcgcgagtccgtctctggcacattcatccgccggaccggcagcccgtcgagccccgggaagtcagcctccggcacattcatccgccggccagggagcccgtcgagcccccgcgggtcgttctctggcaccttcattcgccacaccagcgggggctccagttcccatgaatctgcctctggcggcggcgggggtttcgggtcctctttctggactccagcggtggagcagtcagaggagctccggcagccatcgcctctgatgcagcaacaacagcaacaacattcaaggcggaagccatcggtcagctcggtgccagacagtgttaccagggaggatccttccaccaagtacgagctgctccatgagcttgggaaaggttcatatggtgcagtgtacaaagcaagggatctcagaacgcaggagcttgtggctgtcaagatcatctcattaacagaaggggaagaaggctatgaagacatacggggagaaattgagatgctgcagcaatgcagccatccaaatgttgtccgctactttggaagctaccaaggagaggagtacctatggataattatggaatactgtggtggtggaagtgttgctgacttgataggcatcacagaggagcctcttgatgaatcccaaatagcttacatttgtagagaagcactaaagggccttgcttacctgcactccatttttaaagttcacagagatattaaggggggcaacatccttctaactgagcaaggcgaggtgaagttgggtgattttggtgtagctgcccagctgacaagaaccatgtcaaagcgcaacacgttcattggtactccacattggatggcaccagaggtcattcaagaaagtcgttatgatggaaaggtagacgtttgggcattaggtgtatctgcaatcgagatggcagagggcatgccaccaagatccactgtgcatccaatgagagttatcttcatgatatctagtgaaccagcacctatgctggaggataaagagaaatggtctctcctcttccatgattttattgcaaagtgtcttactaaagaccccagacttcggcctgctgcaattgagatgctgaagcacaaatttattgagaagtgcaatagtggagcttcgaaaatgttggcaaagatcaaggtagcgaagaagattagagccacactagctgtgcaaaatgagctgtctgaccctgacaatacaacgcaagatgtgccttttcgaataaatgaggactatggggaaactgtccctacaagttctcagcaacacatgaaacatggcacatataatgattgtcaggtgattttggtactatgattgttcatactgaagatggggacgaagtgacagaatcacccattttcccaagaacagaattcatacccggccttggtagcatcaattctttcacacatgatccaaagagagcagaacttatttcaagtttttgtttcttgatagggcggagaacataggtgatagtgatgccaataaagaccgagatacagattatggtcctgacatgcaggaatcaaaagtgatctcacctttaactggaacagtgaagaagaatattggtgcagaagggactataaggtgccatgataatcaaattaacttgtcaccaggacttgcaaacacaacaactaaattgaacaacagcccaagccgtaaagcgttttcagttcaggataaggtatatccttcatggtttagacatcagctatttcccccctatgtctgaactaggccaaagtattttagtttttgctactgctcgccactttaagccccatgtctaattttccaacgtttctatgattttctctttgtagctctggtcaatttatgctgccggcaacactgtaccaataccatttcttaaggcaattgacatttcaccactagctctagtatcagaaaatgaatcaggaaatggcctggctgggtcaagtacaaatgatgctttggaggcagttagggagctgttcagtggtgatgggcaggcaaagaaaggacggaaagggcaaaacgaagtccctcttcctccgggtgtgcatcacaggctgacgacaagccccacattgatgaacctggcccaagctctagcttatcataaaacgtgctatgaggacatgccgctacaagattcacaagcgacgcaagagcagcaaacgatacaaaatctttgtgacacacttcgcacaatactgggttgacacaggaatctctacggaagtggaaatttctgtccctgttaatagcctcttggagtttcactatgtagagacggcatcaaattttgctaatcagattttgtggcactaacgcatattgtagcctggttttgtatcgttgtcaatgcatttgttctccaaataaagagaaatagttaagcagaaataaacgaaaagttatttatgttggctattcgaaatcatgggaggcgtgatttctgctgtcttgaccccgtattccttgtgtctggccattgtacgccatgcttcgtgttgttaagtgtcagttttttttagcgcgcgtgtgaat

SEQ ID NO: 5339 - DNA, 3506 bp, Zea Mays
atccaagcccgacccgtatttgccagattcgagtgaactggatccaactaaacaaacaattttccccatttgccattcccgacgagcaccttcaccgtctcctcccagtcccacctcgcgtggcacgccatggctttctccccgcgctcgccgtggtcgcgtgccaagaaaaccgacgtctactcaaccttcgttgtccacggcgatgacgatgaagacgacgcccgcggcggcaggggcccctccacgcgggcggaggaagacgaggaggaagacccctcctcgctgcctccgcttcttcagcggctccccaaggactttggcggcgcctcgttcgacgacgacgaggacccctactcctccgaccctgacgatgcttccctctctgccacggcggccttcaagagcggcgtcccggcctccggtcgatctccgttcctggatctgcggcgctcaagcccccgcgctaccgatgacgacccgtactctaccttcgtcgttcattccaccacacgctcggggagaacctcctccagccctcgcgggtccgcctccggcacattcatccgtcgctcgggtggctcgtctagccctcgcgagtccgtctctggcacattcatccgccggaccggcagcccgtcgagccccgggaagtcagcctccggcacattcatccgccggccagggagcccgtcgagcccccgcgggtcgttctctggcaccttcattcgccacaccagcgggggctccagttcccatgaatctgcctctggcggcggcgggggtttcgggtcctctttctggactccagcggtggagcagtcagaggagctccggcagccatcgcctctgatgcagcaacaacagcaacaacattcaaggcggaagccatcggtcagctcggtgccagacagtgttaccagggaggatccttccaccaagtacgagctgctccatgagcttgggaaaggttcatatggtgcagtgtacaaagcaagggatctcagaacgcaggagcttgtggctgtcaagatcatctcattaacagaaggggaagaaggctatgaagacatacggggagaaattgagatgctgcagcaatgcagccatccaaatgttgtccgctactttggaagctaccaaggagaggagtacctatggataattatggaatactgtggtggtggaagtgttgctgacttgataggcatcacagaggagcctcttgatgaatcccaaatagcttacatttgtagagaagcactaaagggccttgcttacctgcactccatttttaaagttcacagagatattaaggggggcaacatccttctaactgagcaaggcgaggtgaagttgggtgattttggtgtagctgcccagctgacaagaaccatgtcaaagcgcaacacgttcattggtactccacattggatggcaccagaggtcattcaagaaagtcgttatgatggaaaggtagacgtttgggcattaggtgtatctgcaatcgagatggcagagggcatgccaccaagatccactgtgcatccaatgagagttatcttcatgatatctagtgaaccagcacctatgctggaggataaagagaaatggtctctcctcttccatgattttattgcaaagtgtcttactaaagaccccagacttcggcctgctgcaattgagatgctgaagcacaaatttattgagaagtgcaatagtggagcttcgaaaatgttggcaaagatcaaggtagcgaagaagattagagccacactagctgtgcaaaatgagctgtctgaccctgacaatacaacgcaagatgtgccttttcgaataaatgaggactatggggaaactgtccctacaagttctcagcaacacatgaaacatggcacatataatgattgtcaggcaggtgattttggtactatgattgttcatactgaagatggggacgaagtgacagaatcacccattttcccaagaacagaattcatacccggccttggtagcatcaattctttcacacatgatccaaagagagcagaacttatttcaagtttttgggcggagaacataggtgatagtgatgccaataaagaccgagatacagattatggtcctgacatgcaggaatcaaaagtgatctcacctttaactggaacagtgaagaagaatattggtgcagaagggactataaggtgccatgataatcaaattaacttgtcaccaggacttgcaaacacaacaactaaattgaacaacagcccaagccgtaaagcgttttcagttcaggataagctctggtcaatttatgctgccggcaacactgtaccaataccatttcttaaggcaattgacatttcaccactagctctagtatcagaaaatgaatcaggaaatggcctggctgggtcaagtacaaatgatgctttggaggcagttagggagctgttcagtggtgatgggcaggcaaagaaaggacggaaagggcaaaacgaagtatgcggcagattcttttctttaactcttgcagagtaacttatcttttaatgattgcagagggaaacttaggccgttcttagtgggagtttcattctcattaaatgacataccacctaagcaaacaggatgacatggcatgcaattcaatgaagggggatatgagtttcatactttcatgaggatgtatctagacctagacaaatgttgacttgacagctttggaaacagtgcgatggaactatccattgagaatgaccttaggccaatttcagtggggagttctctaacacagttgccgggactgccacgccaacttttgtgtctgtgccaacgggtttcatccgataaaactccctctatctctctccatagttaacctggcaagtcatcaaaattgctgatgtgtaatagcattaaatgcaaatgaaactcagatgaaactcccagtgagatcgaccttagtctaatactgcatttggtgcattaggtccctcttcctccgggtgtgcatcacaggctgacgacaagccccacattgatgaacctggcccaagctctagcttatcataaaacgtgctatgaggacatgccgctacaagattcacaagcgacgcaagagcagcaaacgatacaaaatctttgtgacacacttcgcacaatactgggttgacacaggaatctctacggaagtggaaatttctgtccctgttaatagcctcttggagtttcactatgtagagacggcatcaaattttgctaatcagattttgtggcactaacgcatattgtagcctggttttgtatcgttgtcaatgcatttgttctccaaataaagagaaatagttaagcagaaataaacgaaaagttatttatgttggctattcgaaatcatgggaggcgtgatttctgctgtcttgaccccgtattccttgtgtctggccattgtacgccatgcttcgtgttgttaagtgtcagttttttttagcgcgcgtgtgaat

SEQ ID NO: 5340 - DNA, 3441 bp, Zea Mays
caattttccccatttgccattcccgacgagcaccttcaccgtctcctcccagtcccacctcgcgtggcacgccatggctttctccccgcgctcgccgtggtcgcgtgccaagaaaaccgacgtctactcaaccttcgttgtccacggcgatgacgatgaagacgacgcccgcggcggcaggggcccctccacgcgggcggaggaagacgaggaggaagacccctcctcgctgcctccgcttcttcagcggctccccaaggactttggcggcgcctcgttcgacgacgacgaggacccctactcctccgaccctgacgatgcttccctctctgccacggcggccttcaagagcggcgtcccggcctccggtcgatctccgttcctggatctgcggcgctcaagcccccgcgctaccgatgacgacccgtactctaccttcgtcgttcattccaccacacgctcggggagaacctcctccagccctcgcgggtccgcctccggcacattcatccgtcgctcgggtggctcgtctagccctcgcgagtccgtctctggcacattcatccgccggaccggcagcccgtcgagccccgggaagtcagcctccggcacattcatccgccggccagggagcccgtcgagcccccgcgggtcgttctctggcaccttcattcgccacaccagcgggggctccagttcccatgaatctgcctctggcggcggcgggggtttcgggtcctctttctggactccagcggtggagcagtcagaggagctccggcagccatcgcctctgatgcagcaacaacagcaacaacattcaaggcggaagccatcggtcagctcggtgccagacagtgttaccagggaggatccttccaccaagtacgagctgctccatgagcttgggaaaggttcatatggtgcagtgtacaaagcaagggatctcagaacgcaggagcttgtggctgtcaagatcatctcattaacagaaggggaagaaggctatgaagacatacggggagaaattgagatgctgcagcaatgcagccatccaaatgttgtccgctactttggaagctaccaaggagaggagtacctatggataattatggaatactgtggtggtggaagtgttgctgacttgataggcatcacagaggagcctcttgatgaatcccaaatagcttacatttgtagagaagcactaaaggttctaacaccacatttgtggggcaattaaatgtcttcggatatttaacttttgtgtgcttattttcttctccagggccttgcttacctgcactccatttttaaagttcacagagatattaaggggggcaacatccttctaactgagcaaggcgaggtgaagttgggtgattttggtgtagctgcccagctgacaagaaccatgtcaaagcgcaacacgttcattggtactccacattggatggcaccagaggtcattcaagaaagtcgttatgatggaaaggtagacgtttgggcattaggtgtatctgcaatcgagatggcagagggcatgccaccaagatccactgtgcatccaatgagagtaagcggtgcttctcaatgcgttgtcagtatctgcagttaatgaggctaataggctgtaacctgtaacagaataaactgctctatctttggtgcagtgtacttgtctctttaatttcatttctgatgcatttgttttaacttcatcttgctaactatttggtatacatatcaatctattatttcattttcgtttagattgatagactggctaacggtctctcttccccctgcctatctcaggttatcttcatgatatctagtgaaccagcacctatgctggaggataaagagaaatggtctctcctcttccatgattttattgcaaagtgtcttactaaagaccccagacttcggcctgctgcaattgagatgctgaagcacaaatttattgagaagtgcaatagtggagcttcgaaaatgttggcaaagatcaaggtagcgaagaagattagagccacactagctgtgcaaaatgagctgtctgaccctgacaatacaacgcaagatgtgccttttcgaataaatgaggactatggggaaactgtccctacaagttctcagcaacacatgaaacatggcacatataatgattgtcaggcagatggggacgaagtgacagaatcacccattttcccaagaacagaattcatacccggccttggtagcatcaattctttcacacatgatccaaagagagcagaacttatttcaagtttttgggcggagaacataggtgatagtgatgccaataaagaccgagatacagattatggtcctgacatgcaggaatcaaaagtgatctcacctttaactggaacagtgaagaagaatattggtgcagaagggactataaggtgccatgataatcaaattaacttgtcaccaggacttgcaaacacaacaactaaattgaacaacagcccaagccgtaaagcgttttcagttcaggataagctctggtcaatttatgctgccggcaacactgtaccaataccatttcttaaggcaattgacatttcaccactagctctagtatcagaaaatgaatcaggaaatggcctggctgggtcaagtacaaatgatgctttggaggcagttagggagctgttcagtggtgatgggcaggcaaagaaaggacggaaagggcaaaacgaagtccctcttcctccgggtgtgcatcacaggctgacgacaagccccacattgatgaacctggcccaagctctagcttatcataaaacgtgctatgaggacatgccgctacaagattcacaagcgacgcaagagcagcaaacgatacaaaatctttgtgacacacttcgcacaatactgaggttgtagatctgcaagagtgaaggctgcaacctttggagttccgaagcctgcatggagccaagggtgaacgtggcactgatcctgctcgtggtggagaactgaggatcgaaggaacgcatgacatgtgcctaccgtggagcaggcctaatggcttctgcgttttagcctgtggacgctttggtcactggaagctgggttgacacaggaatctctacggaagtggaaatttctgtccctgttaatagcctcttggagtttcactatgtagagacggcatcaaattttgctaatcagattttgtggcactaacgcatattgtagcctggttttgtatcgttgtcaatgcatttgttctccaaataaagagaaatagttaagcagaaataaacgaaaagttatttatgttggctattcgaaatcatgggaggcgtgatttctgctgtcttgaccccgtattccttgtgtctggccattgtacgccatgcttcgtgttgttaagtgtcagttttttttagcgcgcgtgtgaat

SEQ ID NO: 5341 - DNA, 3696 bp, Zea Mays
caattttccccatttgccattcccgacgagcaccttcaccgtctcctcccagtcccacctcgcgtggcacgccatggctttctccccgcgctcgccgtggtcgcgtgccaagaaaaccgacgtctactcaaccttcgttgtccacggcgatgacgatgaagacgacgcccgcggcggcaggggcccctccacgcgggcggaggaagacgaggaggaagacccctcctcgctgcctccgcttcttcagcggctccccaaggactttggcggcgcctcgttcgacgacgacgaggacccctactcctccgaccctgacgatgcttccctctctgccacggcggccttcaagagcggcgtcccggcctccggtcgatctccgttcctggatctgcggcgctcaagcccccgcgctaccgatgacgacccgtactctaccttcgtcgttcattccaccacacgctcggggagaacctcctccagccctcgcgggtccgcctccggcacattcatccgtcgctcgggtggctcgtctagccctcgcgagtccgtctctggcacattcatccgccggaccggcagcccgtcgagccccgggaagtcagcctccggcacattcatccgccggccagggagcccgtcgagcccccgcgggtcgttctctggcaccttcattcgccacaccagcgggggctccagttcccatgaatctgcctctggcggcggcgggggtttcgggtcctctttctggactccagcggtggagcagtcagaggagctccggcagccatcgcctctgatgcagcaacaacagcaacaacattcaaggcggaagccatcggtcagctcggtgccagacagtgttaccagggaggatccttccaccaagtacgagctgctccatgagcttgggaaaggttcatatggtgcagtgtacaaagcaagggatctcagaacgcaggagcttgtggctgtcaagatcatctcattaacagaaggggaagaaggctatgaagacatacggggagaaattgagatgctgcagcaatgcagccatccaaatgttgtccgctactttggaagctaccaaggagaggagtacctatggataattatggaatactgtggtggtggaagtgttgctgacttgataggcatcacagaggagcctcttgatgaatcccaaatagcttacatttgtagagaagcactaaagggccttgcttacctgcactccatttttaaagttcacagagatattaaggggggcaacatccttctaactgagcaaggcgaggtgaagttgggtgattttggtgtagctgcccagctgacaagaaccatgtcaaagcgcaacacgttcattggtactccacattggatggcaccagaggtcattcaagaaagtcgttatgatggaaaggtagacgtttgggcattaggtgtatctgcaatcgagatggcagagggcatgccaccaagatccactgtgcatccaatgagagtaagcggtgcttctcaatgcgttgtcagtatctgcagttaatgaggctaataggctgtaacctgtaacagaataaactgctctatctttggtgcagtgtacttgtctctttaatttcatttctgatgcatttgttttaacttcatcttgctaactatttggtatacatatcaatctattatttcattttcgtttagattgatagactggctaacggtctctcttccccctgcctatctcaggttatcttcatgatatctagtgaaccagcacctatgctggaggataaagagaaatggtctctcctcttccatgattttattgcaaagtgtcttactaaagaccccagacttcggcctgctgcaattgagatgctgaagcacaaatttattgagaagtgcaatagtggagcttcgaaaatgttggcaaagatcaaggtagcgaagaagattagagccacactagctgtgcaaaatgagctgtctgaccctgacaatacaacgcaagatgtgccttttcgaataaatgaggactatggggaaactgtccctacaagttctcagcaacacatgaaacatggcacatataatgattgtcaggcaggtgattttggtactatgattgttcatactgaagatggggacgaagtgacagaatcacccattttcccaagaacagaattcatacccggccttggtagcatcaattctttcacacatgatccaaagagagcagaacttatttcaagtttttggtatgagaaacataaatttatcttattgtttgtgttgtcagtcattgaaagcagcttaacaagaaggttttatttatcccatcacaaatcttatgcacagtttcttgatagggcggagaacataggtgatagtgatgccaataaagaccgagatacagattatggtcctgacatgcaggaatcaaaagtgatctcacctttaactggaacagtgaagaagaatattggtgcagaagggactataaggtgccatgataatcaaattaacttgtcaccaggacttgcaaacacaacaactaaattgaacaacagcccaagccgtaaagcgttttcagttcaggataagctctggtcaatttatgctgccggcaacactgtaccaataccatttcttaaggcaattgacatttcaccactagctctagtatcagaaaatgaatcaggaaatggcctggctgggtcaagtacaaatgatgctttggaggcagttagggagctgttcagtggtgatgggcaggcaaagaaaggacggaaagggcaaaacgaagtatgcggcagattcttttctttaactcttgcagagtaacttatcttttaatgattgcagagggaaacttaggccgttcttagtgggagtttcattctcattaaatgacataccacctaagcaaacaggatgacatggcatgcaattcaatgaagggggatatgagtttcatactttcatgaggatgtatctagacctagacaaatgttgacttgacagctttggaaacagtgcgatggaactatccattgagaatgaccttaggccaatttcagtggggagttctctaacacagttgccgggactgccacgccaacttttgtgtctgtgccaacgggtttcatccgataaaactccctctatctctctccatagttaacctggtccctcttcctccgggtgtgcatcacaggctgacgacaagccccacattgatgaacctggcccaagctctagcttatcataaaacgtgctatgaggacatgccgctacaagattcacaagcgacgcaagagcagcaaacgatacaaaatctttgtgacacacttcgcacaatactgggttgacacaggaatctctacggaagtggaaatttctgtccctgttaatagcctcttggagtttcactatgtagagacggcatcaaattttgctaatcagattttgtggcactaacgcatattgtagcctggttttgtatcgttgtcaatgcatttgttctccaaataaagagaaatagttaagcagaaataaacgaaaagttatttatgttggctattcgaaatcatgggaggcgtgatttctgctgtcttgaccccgtattccttgtgtctggccattgtacgccatgcttcgtgttgttaagtgtcagttttttttagcgcgcgtgtgaat

SEQ ID NO: 5342 - DNA, 3149 bp, Zea Mays
caattttccccatttgccattcccgacgagcaccttcaccgtctcctcccagtcccacctcgcgtggcacgccatggctttctccccgcgctcgccgtggtcgcgtgccaagaaaaccgacgtctactcaaccttcgttgtccacggcgatgacgatgaagacgacgcccgcggcggcaggggcccctccacgcgggcggaggaagacgaggaggaagacccctcctcgctgcctccgcttcttcagcggctccccaaggactttggcggcgcctcgttcgacgacgacgaggacccctactcctccgaccctgacgatgcttccctctctgccacggcggccttcaagagcggcgtcccggcctccggtcgatctccgttcctggatctgcggcgctcaagcccccgcgctaccgatgacgacccgtactctaccttcgtcgttcattccaccacacgctcggggagaacctcctccagccctcgcgggtccgcctccggcacattcatccgtcgctcgggtggctcgtctagccctcgcgagtccgtctctggcacattcatccgccggaccggcagcccgtcgagccccgggaagtcagcctccggcacattcatccgccggccagggagcccgtcgagcccccgcgggtcgttctctggcaccttcattcgccacaccagcgggggctccagttcccatgaatctgcctctggcggcggcgggggtttcgggtcctctttctggactccagcggtggagcagtcagaggagctccggcagccatcgcctctgatgcagcaacaacagcaacaacattcaaggcggaagccatcggtcagctcggtgccagacagtgttaccagggaggatccttccaccaagtacgagctgctccatgagcttgggaaaggttcatatggtgcagtgtacaaagcaagggatctcagaacgcaggagcttgtggctgtcaagatcatctcattaacagaaggggaagaaggctatgaagacatacggggagaaattgagatgctgcagcaatgcagccatccaaatgttgtccgctactttggaagctaccaaggagaggagtacctatggataattatggaatactgtggtggtggaagtgttgctgacttgataggcatcacagaggagcctcttgatgaatcccaaatagcttacatttgtagagaagcactaaagggccttgcttacctgcactccatttttaaagttcacagagatattaaggggggcaacatccttctaactgagcaaggcgaggtgaagttgggtgattttggtgtagctgcccagctgacaagaaccatgtcaaagcgcaacacgttcattggtactccacattggatggcaccagaggtcattcaagaaagtcgttatgatggaaagacgtttgggcattaggtgtatctgcaatcgagatggcagagggcatgccaccaagatccactgtgcatccaatgagagttatcttcatgatatctagtgaaccagcacctatgctggaggataaagagaaatggtctctcctcttccatgattttattgcaaagtgtcttactaaagaccccagacttcggcctgctgcaattgagatgctgaagcacaaatttattgagaagtgcaatagtggagcttcgaaaatgttggcaaagatcaaggtagcgaagaagattagagccacactagctgtgcaaaatgagctgtctgaccctgacaatacaacgcaagatgtgccttttcgaataaatgaggactatggggaaactgtccctacaagttctcagcaacacatgaaacatggcacatataatgattgtcaggtgattttggtactatgattgttcatactgaagatggggacgaagtgacagaatcacccattttcccaagaacagaattcatacccggccttggtagcatcaattctttcacacatgatccaaagagagcagaacttatttcaagtttttgggcggagaacataggtgatagtgatgccaataaagaccgagatacagattatggtcctgacatgcaggaatcaaaagtgatctcacctttaactggaacagtgaagaagaatattggtgcagaagggactataaggtgccatgataatcaaattaacttgtcaccaggacttgcaaacacaacaactaaattgaacaacagcccaagccgtaaagcgttttcagttcaggataagctctggtcaatttatgctgccggcaacactgtaccaataccatttcttaaggcaattgacatttcaccactagctctagtatcagaaaatgaatcaggaaatggcctggctgggtcaagtacaaatgatgctttggaggcagttagggagctgttcagtggtgatgggcaggcaaagaaaggacggaaagggcaaaacgaagtccctcttcctccgggtgtgcatcacaggctgacgacaagccccacattgatgaacctggcccaagctctagcttatcataaaacgtgctatgaggacatgccgctacaagattcacaagcgacgcaagagcagcaaacgatacaaaatctttgtgacacacttcgcacaatactgaggttgtagatctgcaagagtgaaggctgcaacctttggagttccgaagcctgcatggagccaagggtgaacgtggcactgatcctgctcgtggtggagaactgaggatcgaaggaacgcatgacatgtgcctaccgtggagcaggcctaatggcttctgcgttttagcctgtggacgctttggtcactggaagctgggttgacacaggaatctctacggaagtggaaatttctgtccctgttaatagcctcttggagtttcactatgtagagacggcatcaaattttgctaatcagattttgtggcactaacgcatattgtagcctggttttgtatcgttgtcaatgcatttgttctccaaataaagagaaatagttaagcagaaataaacgaaaagttatttatgttggctattcgaaatcatgggaggcgtgatttctgctgtcttgaccccgtattccttgtgtctggccattgtacgccatgcttcgtgttgttaagtgtcagttttttttagcgcgcgtgtgaat

SEQ ID NO: 5343 - DNA, 2971 bp, Zea Mays
caattttccccatttgccattcccgacgagcaccttcaccgtctcctcccagtcccacctcgcgtggcacgccatggctttctccccgcgctcgccgtggtcgcgtgccaagaaaaccgacgtctactcaaccttcgttgtccacggcgatgacgatgaagacgacgcccgcggcggcaggggcccctccacgcgggcggaggaagacgaggaggaagacccctcctcgctgcctccgcttcttcagcggctccccaaggactttggcggcgcctcgttcgacgacgacgaggacccctactcctccgaccctgacgatgcttccctctctgccacggcggccttcaagagcggcgtcccggcctccggtcgatctccgttcctggatctgcggcgctcaagcccccgcgctaccgatgacgacccgtactctaccttcgtcgttcattccaccacacgctcggggagaacctcctccagccctcgcgggtccgcctccggcacattcatccgtcgctcgggtggctcgtctagccctcgcgagtccgtctctggcacattcatccgccggaccggcagcccgtcgagccccgggaagtcagcctccggcacattcatccgccggccagggagcccgtcgagcccccgcgggtcgttctctggcaccttcattcgccacaccagcgggggctccagttcccatgaatctgcctctggcggcggcgggggtttcgggtcctctttctggactccagcggtggagcagtcagaggagctccggcagccatcgcctctgatgcagcaacaacagcaacaacattcaaggcggaagccatcggtcagctcggtgccagacagtgttaccagggaggatccttccaccaagtacgagctgctccatgagcttgggaaaggttcatatggtgcagtgtacaaagcaagggatctcagaacgcaggagcttgtggctgtcaagatcatctcattaacagaaggggaagaaggctatgaagacatacggggagaaattgagatgctgcagcaatgcagccatccaaatgttgtccgctactttggaagctaccaaggagaggagtacctatggataattatggaatactgtggtggtggaagtgttgctgacttgataggcatcacagaggagcctcttgatgaatcccaaatagcttacatttgtagagaagcactaaagggccttgcttacctgcactccatttttaaagttcacagagatattaaggggggcaacatccttctaactgagcaaggcgaggtgaagttgggtgattttggtgtagctgcccagctgacaagaaccatgtcaaagcgcaacacgttcattggtactccacattggatggcaccagaggtcattcaagaaagtcgttatgatggaaaggtagacgtttgggcattaggtgtatctgcaatcgagatggcagagggcatgccaccaagatccactgtgcatccaatgagagttatcttcatgatatctagtgaaccagcacctatgctggaggataaagagaaatggtctctcctcttccatgattttattgcaaagtgtcttactaaagaccccagacttcggcctgctgcaattgagatgctgaagcacaaatttattgagaagtgcaatagtggagcttcgaaaatgttggcaaagatcaaggtagcgaagaagattagagccacactagctgtgcaaaatgagctgtctgaccctgacaatacaacgcaagatgtgccttttcgaataaatgaggactatggggaaactgtccctacaagttctcagcaacacatgaaacatggcacatataatgattgtcaggcaggtgattttggtactatgattgttcatactgaagatggggacgaagtgacagaatcacccattttcccaagaacagaattcatacccggccttggtagcatcaattctttcacacatgatccaaagagagcagaacttatttcaagtttttgtttcttgatagggcggagaacataggtgatagtgatgccaataaagaccgagatacagattatggtcctgacatgcaggaatcaaaagtgatctcacctttaactggaacagtgaagaagaatattggtgcagaagggactataaggtgccatgataatcaaattaacttgtcaccaggacttgcaaacacaacaactaaattgaacaacagcccaagccgtaaagcgttttcagttcaggataagctctggtcaatttatgctgccggcaacactgtaccaataccatttcttaaggcaattgacatttcaccactagctctagtatcagaaaatgaatcaggaaatggcctggctgggtcaagtacaaatgatgctttggaggcagttagggagctgttcagtggtgatgggcaggcaaagaaaggacggaaagggcaaaacgaagtccctcttcctccgggtgtgcatcacaggctgacgacaagccccacattgatgaacctggcccaagctctagcttatcataaaacgtgctatgaggacatgccgctacaagattcacaagcgacgcaagagcagcaaacgatacaaaatctttgtgacacacttcgcacaatactgggttgacacaggaatctctacggaagtggaaatttctgtccctgttaatagcctcttggagtttcactatgtagagacggcatcaaattttgctaatcagattttgtggcactaacgcatattgtagcctggttttgtatcgttgtcaatgcatttgttctccaaataaagagaaatagttaagcagaaataaacgaaaagttatttatgttggctattcgaaatcatgggaggcgtgatttctgctgtcttgaccccgtattccttgtgtctggccattgtacgccatgcttcgtgttgttaagtgtcagttttttttagcgcgcgtgtgaat

SEQ ID NO: 5344 - DNA, 3198 bp, Zea Mays
caattttccccatttgccattcccgacgagcaccttcaccgtctcctcccagtcccacctcgcgtggcacgccatggctttctccccgcgctcgccgtggtcgcgtgccaagaaaaccgacgtctactcaaccttcgttgtccacggcgatgacgatgaagacgacgcccgcggcggcaggggcccctccacgcgggcggaggaagacgaggaggaagacccctcctcgctgcctccgcttcttcagcggctccccaaggactttggcggcgcctcgttcgacgacgacgaggacccctactcctccgaccctgacgatgcttccctctctgccacggcggccttcaagagcggcgtcccggcctccggtcgatctccgttcctggatctgcggcgctcaagcccccgcgctaccgatgacgacccgtactctaccttcgtcgttcattccaccacacgctcggggagaacctcctccagccctcgcgggtccgcctccggcacattcatccgtcgctcgggtggctcgtctagccctcgcgagtccgtctctggcacattcatccgccggaccggcagcccgtcgagccccgggaagtcagcctccggcacattcatccgccggccagggagcccgtcgagcccccgcgggtcgttctctggcaccttcattcgccacaccagcgggggctccagttcccatgaatctgcctctggcggcggcgggggtttcgggtcctctttctggactccagcggtggagcagtcagaggagctccggcagccatcgcctctgatgcagcaacaacagcaacaacattcaaggcggaagccatcggtcagctcggtgccagacagtgttaccagggaggatccttccaccaagtacgagctgctccatgagcttgggaaaggttcatatggtgcagtgtacaaagcaagggatctcagaacgcaggagcttgtggctgtcaagatcatctcattaacagaaggggaagaaggctatgaagacatacggggagaaattgagatgctgcagcaatgcagccatccaaatgttgtccgctactttggaagctaccaaggagaggagtacctatggataattatggaatactgtggtggtggaagtgttgctgacttgataggcatcacagaggagcctcttgatgaatcccaaatagcttacatttgtagagaagcactaaagggccttgcttacctgcactccatttttaaagttcacagagatattaaggggggcaacatccttctaactgagcaaggcgaggtgaagttgggtgattttggtgtagctgcccagctgacaagaaccatgtcaaagcgcaacacgttcattggtactccacattggatggcaccagaggtcattcaagaaagtcgttatgatggaaaggtagacgtttgggcattaggtgtatctgcaatcgagatggcagagggcatgccaccaagatccactgtgcatccaatgagagtaagcggtgcttctcaatgcgttgtcagtatctgcagttaatgaggctaataggctgtaacctgtaacagaataaactgctctatctttggtgcagtgtacttgtctctttaatttcatttctgatgcatttgttttaacttcatcttgctaactatttggtatacatatcaatctattatttcattttcgtttagattgatagactggctaacggtctctcttccccctgcctatctcaggttatcttcatgatatctagtgaaccagcacctatgctggaggataaagagaaatggtctctcctcttccatgattttattgcaaagtgtcttactaaagaccccagacttcggcctgctgcaattgagatgctgaagcacaaatttattgagaagtgcaatagtggagcttcgaaaatgttggcaaagatcaaggtagcgaagaagattagagccacactagctgtgcaaaatgagctgtctgaccctgacaatacaacgcaagatgtgccttttcgaataaatgaggactatggggaaactgtccctacaagttctcagcaacacatgaaacatggcacatataatgattgtcaggtgattttggtactatgattgttcatactgaagatggggacgaagtgacagaatcacccattttcccaagaacagaattcatacccggccttggtagcatcaattctttcacacatgatccaaagagagcagaacttatttcaagtttttgggcggagaacataggtgatagtgatgccaataaagaccgagatacagattatggtcctgacatgcaggaatcaaaagtgatctcacctttaactggaacagtgaagaagaatattggtgcagaagggactataaggtgccatgataatcaaattaacttgtcaccaggacttgcaaacacaacaactaaattgaacaacagcccaagccgtaaagcgttttcagttcaggataagctctggtcaatttatgctgccggcaacactgtaccaataccatttcttaaggcaattgacatttcaccactagctctagtatcagaaaatgaatcaggaaatggcctggctgggtcaagtacaaatgatgctttggaggcagttagggagctgttcagtggtgatgggcaggcaaagaaaggacggaaagggcaaaacgaagtccctcttcctccgggtgtgcatcacaggctgacgacaagccccacattgatgaacctggcccaagctctagcttatcataaaacgtgctatgaggacatgccgctacaagattcacaagcgacgcaagagcagcaaacgatacaaaatctttgtgacacacttcgcacaatactgggttgacacaggaatctctacggaagtggaaatttctgtccctgttaatagcctcttggagtttcactatgtagagacggcatcaaattttgctaatcagattttgtggcactaacgcatattgtagcctggttttgtatcgttgtcaatgcatttgttctccaaataaagagaaatagttaagcagaaataaacgaaaagttatttatgttggctattcgaaatcatgggaggcgtgatttctgctgtcttgaccccgtattccttgtgtctggccattgtacgccatgcttcgtgttgttaagtgtcagttttttttagcgcgcgtgtgaat

SEQ ID NO: 5345 - DNA, 1870 bp, Zea Mays
ggaaatattattcagggtgttatcatcctactggcaggtggcccctgcccaatatgtcatcttcactatggatgttcattggtactccacattggatggcaccagaggtcattcaagaaagtcgttatgatggaaagacgtttgggcattaggtgtatctgcaatcgagatggcagagggcatgccaccaagatccactgtgcatccaatgagagttatcttcatgatatctagtgaaccagcacctatgctggaggataaagagaaatggtctctcctcttccatgattttattgcaaagtgtcttactaaagaccccagacttcggcctgctgcaattgagatgctgaagcacaaatttattgagaagtgcaatagtggagcttcgaaaatgttggcaaagatcaaggtagcgaagaagattagagccacactagctgtgcaaaatgagctgtctgaccctgacaatacaacgcaagatgtgccttttcgaataaatgaggactatggggaaactgtccctacaagttctcagcaacacatgaaacatggcacatataatgattgtcaggcaggtgattttggtactatgattgttcatactgaagatggggacgaagtgacagaatcacccattttcccaagaacagaattcatacccggccttggtagcatcaattctttcacacatgatccaaagagagcagaacttatttcaagtttttgggcggagaacataggtgatagtgatgccaataaagaccgagatacagattatggtcctgacatgcaggaatcaaaagtgatctcacctttaactggaacagtgaagaagaatattggtgcagaagggactataaggtgccatgataatcaaattaacttgtcaccaggacttgcaaacacaacaactaaattgaacaacagcccaagccgtaaagcgttttcagttcaggataagctctggtcaatttatgctgccggcaacactgtaccaataccatttcttaaggcaattgacatttcaccactagctctagtatcagaaaatgaatcaggaaatggcctggctgggtcaagtacaaatgatgctttggaggcagttagggagctgttcagtggtgatgggcaggcaaagaaaggacggaaagggcaaaacgaagtccctcttcctccgggtgtgcatcacaggctgacgacaagccccacattgatgaacctggcccaagctctagcttatcataaaacgtgctatgaggacatgccgctacaagattcacaagcgacgcaagagcagcaaacgatacaaaatctttgtgacacacttcgcacaatactgaggttgtagatctgcaagagtgaaggctgcaacctttggagttccgaagcctgcatggagccaagggtgaacgtggcactgatcctgctcgtggtggagaactgaggatcgaaggaacgcatgacatgtgcctaccgtggagcaggcctaatggcttctgcgttttagcctgtggacgctttggtcactggaagctgggttgacacaggaatctctacggaagtggaaatttctgtccctgttaatagcctcttggagtttcactatgtagagacggcatcaaattttgctaatcagattttgtggcactaacgcatattgtagcctggttttgtatcgttgtcaatgcatttgttctccaaataaagagaaatagttaagcagaaataaacgaaaagttatttatgttggctattcgaaatcatgggaggcgtgatttctgctgtcttgaccccgtattccttgtgtctggccattgtacgccatgcttcgtgttgttaagtgtcagttttttttagcgcgcgtgtgaat

SEQ ID NO: 5346 - DNA, 1434 bp, Zea Mays
gaactctcttctattaatgaaatggtctctcctcttccatgattttattgcaaagtgtcttactaaagaccccagacttcggcctgctgcaattgagatgctgaagcacaaatttattgagaagtgcaatagtggagcttcgaaaatgttggcaaagatcaaggtagcgaagaagattagagccacactagctgtgcaaaatgagctgtctgaccctgacaatacaacgcaagatgtgccttttcgaataaatgaggactatggggaaactgtccctacaagttctcagcaacacatgaaacatggcacatataatgattgtcaggtgattttggtactatgattgttcatactgaagatggggacgaagtgacagaatcacccattttcccaagaacagaattcatacccggccttggtagcatcaattctttcacacatgatccaaagagagcagaacttatttcaagtttttgtttcttgatagggcggagaacataggtgatagtgatgccaataaagaccgagatacagattatggtcctgacatgcaggaatcaaaagtgatctcacctttaactggaacagtgaagaagaatattggtgcagaagggactataaggtgccatgataatcaaattaacttgtcaccaggacttgcaaacacaacaactaaattgaacaacagcccaagccgtaaagcgttttcagttcaggataagctctggtcaatttatgctgccggcaacactgtaccaataccatttcttaaggcaattgacatttcaccactagctctagtatcagaaaatgaatcaggaaatggcctggctgggtcaagtacaaatgatgctttggaggcagttagggagctgttcagtggtgatgggcaggcaaagaaaggacggaaagggcaaaacgaagtccctcttcctccgggtgtgcatcacaggctgacgacaagccccacattgatgaacctggcccaagctctagcttatcataaaacgtgctatgaggacatgccgctacaagattcacaagcgacgcaagagcagcaaacgatacaaaatctttgtgacacacttcgcacaatactgggttgacacaggaatctctacggaagtggaaatttctgtccctgttaatagcctcttggagtttcactatgtagagacggcatcaaattttgctaatcagattttgtggcactaacgcatattgtagcctggttttgtatcgttgtcaatgcatttgttctccaaataaagagaaatagttaagcagaaataaacgaaaagttatttatgttggctattcgaaatcatgggaggcgtgatttctgctgtcttgaccccgtattccttgtgtctggccattgtacgccatgcttcgtgttgttaagtgtcagttttttttagcgcgcgtgtgaat

SEQ ID NO: 5347 - DNA, 667 bp, Zea Mays
accgtagctacggcctggcccaataacgaaccctgatccttgatctctataaattagaaaccctagcaccccgcgtcaccttcacccacctccgccagccactccaaacacttgcgccgccgctgcctcacaggtaaggccgccatggtctccggttcgggcgtgtgcgcgaagcgcatcgtggtcgacgcgcgccaccacatgctgggccgtctctcctcgatcatagccaaggagctgctcaatgggcagaaggtggtcgtcgtccgctgcgaggagatctgcatgtcgggcggcctcgtccgtcagaagatgaagtacctccgcttcctccgcaagcggatgaacaccaagccgtcccacgggcccatccacttccgcgcccccgccaagatcctgtggcgcaccatccgcgggatgattccgcacaagaccaagaggggggaggcggctctggcgaggctcaagacgtacgagggcgtcccgccgccgtacgacaagaccaagcgtatggtcatccctgacgctcttaaggttctgaggctacagcctggacacaagtactgcctcctcggcgagctctctaaggaggtcgggtggaactaccatgacaccatcaggaacccagttgcaattgcaatgaagctcgatgttgctctatcagatc

SEQ ID NO: 5348 - DNA, 357 bp, Zea Mays
aaagatctcacccctccagagtcccgggataattcgcttcgatccccagaggcacagacgagacgacagagatgaaggacggaacgtcgtcggggggaggggcgttcgctgcgggcagcgatccaaggcagccgtcgacggcgaagccatacgcgccgccgaagctgtcgccccaggacctacccatcgactatgcaggcttcctcgccgtcgccttcggcgtcctcggcgtcatgctccgctacaaggtgtgctcgtggatcgcaatcatcttctgcgctcagtcgttggcaaacatgaagaactttgagaacgatctgaagcagctttctatggccttcatcttttaacatttcc

SEQ ID NO: 5349 - DNA, 1249 bp, Zea Mays
aaagatctcacccctccagagtcccgggataattcgcttcgatccccagaggcacagacgagacgacagagatgaaggacggaacgtcgtcggggggaggggcgttcgctgcgggcagcgatccaaggcagccgtcgacggcgaagccatacgcgccgccgaagctgtcgccccaggacctacccatcgactatgcaggcttcctcgccgtcgccttcggcgtcctcggcgtcatgctccgctacaaggtgtgctcgtggatcgcaatcatcttctgcgctcagtcgttggcaaacatgaagaactttgagaacgatctgaagcagctttctatggccttcatgtttgctgttatgggtctggtgacgaactattttggccccgctcgtccaggcagtacaaagcgctaaactgcggaagaacatgtgctacattcttcataggactttttggtgcttccgatagctttgccatcggtgctgacattatgtatgtccaatttgagcaaacgtcataggggctctggttttgattcatctggttaataggagctaatagtcagctgctaaacattagctagctgataggcgaggtaaattttagctacacaaaggaagtaactgtctcagtgtcccactagccatctcatcctttctgatggctctgctcagctatgcttttgaagcagctagaacggctatttgcttattccaaattaccaaatcaaatatctgtcgaaatcttggtttgtctgagttttggcaatcaatatttggccatcaaccagtcatggtctttagtaaaaccatcacagctcacaagatccaaactgggtcgtcgcatatgaaaggtccacggattctgtcatccgaagaagttgttttctcccggcggatcgggatactgacgaggtcacagctcgcaagatatcgcccatcagcaaagatccactggacaggcctgcacgagacacgctcgatctggcgcctgcgtgcctgccgaatgtttaattgggattaacatacatcatctcgctaaaacgaggaaacggccacaagacgagctgttttgtattgctgttcgcgatcaccaattgtggtgtgagccggaggtggcccgggcgtgtttgcatgattgcatcaacaggcgactacgggacagcgatgctttgccggcagaagacgatcttcctcatgtggacagattgattactgtataatgtatgtctgacgatgacggtttcttggat

SEQ ID NO: 5350 - DNA, 1777 bp, Zea Mays
cacattttaaaaaatggctcatcgtggactacacatcgcatggttgcagttttcaacagactacactacatgttctttgaaaagtttacggcatggaaagacaccgatgccagtggctccaggccatgtcacgccgctgatggagctctcccacctcctggtcgaccaaggcttcgaggtcaccttcgtcaacaccgacgtggaccgcgcggccgtggtagccgcgctggaggcctccggcggcgtggcggcgctgggcggcggcatccacctggcgtccatcccggacgggctggccgacgacgaggaccgcaaggacatcagcaagctcgtcgacgcctacacgcgccacatgccgggctacctggagcgcctcctcgccgacatggaggccgccgggcggcccagggccaagtggctcgttgccgacaccaacatgggctggtcgttcgaggtcgccaagaagctcggcatccgggtcgtgtccttctggccggcggccaccgcgtgcttagccttcatgctcaagatccccaagctcatacaggacgggctcctcgacgataaggggctgccagtccgtcaggagacgttccagctcgccccggggatgccgccgctgcactcgtcgcagctgtcgtggaacaacgccggcgagcccgaggggcagcacatcatcttcgagctggtgacccggaacaacaagctgaacgatgagctggcggagatggtggtgagcaactccttctacgaggccgaggccggcgcgttcaagcttttcccgggcatcctgcccatcggcccgctgtccgccgacggggcgttccggaagcccgtgggccactacctgccggaggacgagcggtgcgtcaagtggctggacgcgcatccggacgcgtcgtccgtcgtgtacgtggccttcggcagcataaccatcttcagcgcgcgccagttcgaggagctggccgagggcctggagctcaccggccgcccgttcctgtgggtggtgcggccggacttcacccccggcctcagcaaggcgtggctccacgagttccagcggcgcgtcgccggcaggggcatgatcgtcagctggtgttcccagcaacaggtcctggcgcaccgtgcggtggcgtgcttcgtgtcgcactgcgggtggaactcgaccatggagggtctgaggaacggcgtgccgttcctgtgctggccctacttctgcgaccagtacctgaaccggagctacatcgtcaacgtgtggaggaccgggctggcggtgacgcccgacgcggacggaatcgtaggcagggaggagctgaggagcaaggtggagcaggtcgtcggcgacgccgacatcaaggacagggcgcgggtgctcaaggacgaagcccaccggtgcgtcgccgaaggagggtcctcgaacgacaacttcaaaaagctcgtgaatctgctcagtgaatgatgagaaccgggagactgggagcatcgtgtccagtgtcctggcgttgtaaatgttggtgcacttagggcttgtttggtttgatggctaacttgtcatattttacctaacttttgtgtctaaagttagttcttcaattcgaacgactaaccttaggtaaagtgtgacacatttagctacgaaccaaatagccccttaatctccttgattgtaaacagtggtggagcacctcttacggttaggggtgctaattgatcgcaatctaaattcttcttgacaaaatggtaaattttaaataaattttattttaaaaaataaaaa

SEQ ID NO: 5351 - DNA, 1470 bp, Zea Mays
gtcaccttcgtcaacaccgaggtcgaccacgcgttggtggtagcggcgctagctaggcggcggcacggcatccacctggcgtccatccgagacgggcaggccgacgaggacgacgaccgcaaggacatcatcaacaagctcgtggacgcctagtcgcgccacattccagattgccaggctgcctcatcgcgccgacatggagatcaccgtgcttggccttcatgctcaagattcccgagctgatggcctgtgcatatgcatgggctgccagtccgtcaggagacgttccagctcgccccggggatgccgccgctgcactcgtcgcagctgtcgtggaacaacgccggcgagcccgaggggcagcacatcatcttcgagctggtgacccggaacaacaagctgaacgatgagctggcggagatggtggtgagcaactccttctacgaggccgaggccggcgcgttcaagcttttcccgggcatcctgcccatcggcccgctgtccgccgacggggcgttccggaagcccgtgggccactacctgccggaggacgagcggtgcgtcaagtggctggacgcgcatccggacgcgtcgtccgtcgtgtacgtggccttcggcagcataaccatcttcagcgcgcgccagttcgaggagctggccgagggcctggagctcaccggccgcccgttcctgtgggtggtgcggccggacttcacccccggcctcagcaaggcgtggctccacgagttccagcggcgcgtcgccggcaggggcatgatcgtcagctggtgttcccagcaacaggtcctggcgcaccgtgcggtggcgtgcttcgtgtcgcactgcgggtggaactcgaccatggagggtctgaggaacggcgtgccgttcctgtgctggccctacttctgcgaccagtacctgaaccggagctacatcgtcaacgtgtggaggaccgggctggcggtgacgcccgacgcggacggaatcgtaggcagggaggagctgaggagcaaggtggagcaggtcgtcggcgacgccgacatcaaggacagggcgcgggtgctcaaggacgaagcccaccggtgcgtcgccgaaggagggtcctcgaacgacaacttcaaaaagctcgtgaatctgctcagtgaatgatgagaaccgggagactgggagcatcgtgtccagtgtcctggcgttgtaaatgttggtgcacttagggcttgtttggtttgatggctaacttgtcatattttacctaacttttgtgtctaaagttagttcttcaattcgaacgactaaccttaggtaaagtgtgacacatttagctacgaaccaaatagccccttaatctccttgattgtaaacagtggtggagcacctcttacggttaggggtgctaattgatcgcaatctaaattcttcttgacaaaatggtaaattttaaataaattttattttaaaaaataaaaa

SEQ ID NO: 5352 - DNA, 3694 bp, Zea Mays
cttgcctccatccactggcactgatccaccacatcccacgccgagcgcgacgccagcagcaggctagctccgctgtccgctccgccgctcactagctgctggaccgcgcctccctccatcgcgccggcgcgcgcgcctaactagcggagccgccttttcatggtccccgccgtggtcgggacgagatgcctcgcctcgcattcctccgccgctccctccccgcgaggcttctcgcgcgagcgtgtggtggtggtggtggtggagaccaggggagcccggaccaggtggcgcgggacgaggaggccggaggcagcggcggaatgagcgggcggtcgtcggcgggtgggccgtccggcggggagtgctacgcgtgcacgcagcccggggtgccggcgttccactccacgacgtgcgaccaggtgcactcgccggactgggacgccgacgcggggtcctcgctcgtgccggtccagggccaggcgcaggcggcggcggcggcggcggcgccgcggcagcggcacgcggcgcggtggctgttggggcccgtgctggacccgcggagcaggcgcgtgcagcgctggaaccgctggatcctgctgggccgcgccgccgcgctggcggtggacccgctcttcttctacgcgctctccatcggccgcgctggccagccctgcctctacatggacgccgggctcgcctccgcggtcacggcgctgcggacctgcgccgacgtggcgcacctcgcgcacgtgctcctgcagctccgcctcgcctacgtctcccgcgagtccctcgtcgtcgggtgcggcaagctcgtgtgggacgcccgcgccgtcgccgcgcactacgcacgctccgtcaagggcctctgcttcgacctcttcgtcatcctccccatcccgcaggttatcttctggctggttataccaaagttaatcagggaggagcaggttaagcttatcatgacaatactgctgctcatgttcatatttcaatttctccccaaggtctaccatagtatacacatcatgaggaaaatgcagaaggtgacaggttacatctttggatcaatatggtggggatttggtttaaatctatttgcctatttcattgcttctcatgtgagtattcccttcctcattagttaaatactgtagaaaatacaggttaaatcgtgtggacatggaatcccagtgtcgctctcctagcattgatatggttgctgatggcttagtattgtcactgttgttgatcataatattgctgaacatggaaactgccccccaacaactaaatcataaggattgattaagaaactgggtttctatctaatgtccaccaataaacatgtccagtgagttaaaattgtaaaagaacaaccttcattttttttttttgcctaaataagaattcctgtctgcaattttttcggctcatccttcaacctatagaattggtactagacttaagactaatgcagaccgaataatctgggtaattcgatcattcatcaatgctctgccatttccagattgcgggtgggtgctggtatgttcttgcgatccagcgcatcgcttcctgcctccaggaagaatgcaagagaaacaacagttgcgatctaatatcgctagcttgttccaaggagatatgttttcaccctccgtggtcatcgaatgttaacggattcgcgtgcgatacgaacatgacctcctttagccaacaaaatgtgtctacttgcttgagtggaaaaggttccttcgcttatggaatctatttgggggctcttcctgttatatcgagcaattcgctcgctgtcaaaatactctatcctatattttggggcctcatgacactcagtacttttggtaacgaccttgccccaacaagcaatggcattgaggtgatattcagcataatcaatgtcctcagtggccttatgctcttcacgttgctgatcggaaacatacaggtatttctgcacgcggtcctggcaaggaagcggaagatgcagctgcggttccgggacatggaatggtggatgaggcggaggcaactaccgtcccggctgaggcaaagggtgcgcaaatacgagcgcgaacgctgggccgccgtcacgggagacgaggagatggagatgatcaaggatctgcctgaagggctgaggcgggacatcaagcgctacctgtgccttgagctagttaagcaggttccactgttccatggcatggacgacctgatcctggacaacatctgcgaccggctgcggcctctggtgttgtccagcggggagaaggtgatccgggagggcgaccccgtgcagcgcatggtgttcatcctgcagggcaagctccggagcacgcagccgctgaccaaaggcgtggtggcgacgtgcatgctgggcgcgggcagcttcctgggcgacgagctgctgtcgtggtgcctgcgccgccccttcgtggaccggctccccgcgtcgtcggccacgttcgagtgcgtggaagcggcgcaggcgttctgcctcggcgcgccggacctgcggttcatcaccgagcacttccggtacaacttcgccaacgagaagctcaagcgcacggcgcggtactactcgtccaactggcggacgtgggccgccgtcaacatccagctcgcgtggcgcaggtacagggcccggacgtcggcggacctggcggcgccgccgttggtgggcgggcccgacgacggggaccggcggctcagacactacgcggccatgttcatgtcgctacggccgcatgaccacctagagtgagcactgatgagcaggagggagggaccatcctaggctcctagctgtgccggccgcgtcatggtgactgtacagtgtgcactgtaatagtatattgctgccatcttttgcgatattgctgcttctgaccgcgccattgcggcctcagctgcaggctgcagctgctgatgaacagaagagatggcaggaccgcaggccagattcaggcggagcagagaacacaagtcggcgttcaggttctccaccaccagattcagaaaccgtctgttcgtcctctccaaaacgattagaatcgataaacgcgctcgtaaatcgtaataaccctaaaccaaagcgtgagcgagacgcgcgagcgccatcagcggcgaagctcgtacaccgggacaactccacaatacggacggattccaaatgcggaccgatagagattattactagttttgctcctacaattgtgttccaggttgctcttctgttgattagacatggtgctgatgctgatgctgaggacaagaggaaggctacactgtccttggcggagcatcgaacagcccaaggcctgcacttgtcgacgcagccatggcgatgcttgaaggttgatctagttctctgctttaagcctaaactttcatgtcctatcaagaggaatggaaagtttgataggagaaactgttctgagtagaaagtgttggatttctatatttagattgattattactttccttgtttaggcttgcatgccaccattcttgctcacgtgcatgtctatagttggaacttggaaggcactaatcagatgatatccttcctattccaccggacactgtttccatgagacggttgggatacggaaggagtctggcctatatgtattagctgtttctctctatgaatcatcaatattcgtag

SEQ ID NO: 5353 - DNA, 2454 bp, Zea Mays
gttaattctgtccttttccaaatcaagtcattgatattgggtttttttttactccttgcaaagagctttgccatggttatcttctggctggttataccaaagttaatcagggaggagcaggttaagcttatcatgacaatactgctgctcatgttcatatttcaatttctccccaaggtctaccatagtatacacatcatgaggaaaatgcagaaggtgacaggttacatctttggatcaatatggtggggatttggtttaaatctatttgcctatttcattgcttctcatattgcgggtgggtgctggtatgttcttgcgatccagcgcatcgcttcctgcctccaggaagaatgcaagagaaacaacagttgcgatctaatatcgctagcttgttccaaggagatatgttttcaccctccgtggtcatcgaatgttaacggattcgcgtgcgatacgaacatgacctcctttagccaacaaaatgtgtctacttgcttgagtggaaaaggttccttcgcttatggaatctatttgggggctcttcctgttatatcgagcaattcgctcgctgtcaaaatactctatcctatattttggggcctcatgacactcagtacttttggtaacgaccttgccccaacaagcaatggcattgaggtgatattcagcataatcaatgtcctcagtggccttatgctcttcacgttgctgatcggaaacatacaggtatttctgcacgcggtcctggcaaggaagcggaagatgcagctgcggttccgggacatggaatggtggatgaggcggaggcaactaccgtcccggctgaggcaaagggtgcgcaaatacgagcgcgaacgctgggccgccgtcacgggagacgaggagatggagatgatcaaggatctgcctgaagggctgaggcgggacatcaagcgctacctgtgccttgagctagttaagcaggttccactgttccatggcatggacgacctgatcctggacaacatctgcgaccggctgcggcctctggtgttgtccagcggggagaaggtgatccgggagggcgaccccgtgcagcgcatggtgttcatcctgcagggcaagctccggagcacgcagccgctgaccaaaggcgtggtggcgacgtgcatgctgggcgcgggcagcttcctgggcgacgagctgctgtcgtggtgcctgcgccgccccttcgtggaccggctccccgcgtcgtcggccacgttcgagtgcgtggaagcggcgcaggcgttctgcctcggcgcgccggacctgcggttcatcaccgagcacttccggtacaacttcgccaacgagaagctcaagcgcacggcgcggtactactcgtccaactggcggacgtgggccgccgtcaacatccagctcgcgtggcgcaggtacagggcccggacgtcggcggacctggcggcgccgccgttggtgggcgggcccgacgacggggaccggcggctcagacactacgcggccatgttcatgtcgctacggccgcatgaccacctagagtgagcactgatgagcaggagggagggaccatcctaggctcctagctgtgccggccgcgtcatggtgactgtacagtgtgcactgtaatagtatattgctgccatcttttgcgatattgctgcttctgaccgcgccattgcggcctcagctgcaggctgcagctgctgatgaacagaagagatggcaggaccgcaggccagattcaggcggagcagagaacacaagtcggcgttcaggttctccaccaccagattcagaaaccgtctgttcgtcctctccaaaacgattagaatcgataaacgcgctcgtaaatcgtaataaccctaaaccaaagcgtgagcgagacgcgcgagcgccatcagcggcgaagctcgtacaccgggacaactccacaatacggacggattccaaatgcggaccgatagagattattactagttttgctcctacaattgtgttccaggttgctcttctgttgattagacatggtgctgatgctgatgctgaggacaagaggaaggctacactgtccttggcggagcatcgaacagcccaaggcctgcacttgtcgacgcagccatggcgatgcttgaaggttgatctagttctctgctttaagcctaaactttcatgtcctatcaagaggaatggaaagtttgataggagaaactgttctgagtagaaagtgttggatttctatatttagattgattattactttccttgtttaggcttgcatgccaccattcttgctcacgtgcatgtctatagttggaacttggaaggcactaatcagatgatatccttcctattccaccggacactgtttccatgagacggttgggatacggaaggagtctggcctatatgtattagctgtttctctctatgaatcatcaatattcgtag

SEQ ID NO: 5354 - DNA, 1734 bp, Zea Mays
gtgtttattccgataaacatccgagagacgcactggtatcttgctgtgatccatgcaagaaatatggagatacaagtgctcgattcacttggtacttcacaagaccgcaaagacctcactgactctattaaaggactgcaaagacaaatagatatgatatctcaacgtaaggagttaaaagaccacaggtggccagacctccaagttgcttcttggccgctcagagaaatagacatgggatatgcaaagcagacagatagctcttcatgtggcctctttcttttgaactatatcgaatactggacaggggatgaactgtctgacagttttacccaggatgacatgtcacactttaggaaaaaaatggctgctatattactatcttcagacctgaataagagaagggggtgtctgttatacaagaatgaaaaagaagttgactctggaagctcatctgatgttgagatattagaaaacccaaaagattctaataagaggaaactactccacgtgcttgatgatagcgaagtggtgtatgaagatgaggaaggccctattactcaagcagacttgcaaaggtggtttgttgatgattgggataaaaaagctcctgtaaaagtatctaccgatggttgcaccaatgactttttaatggttggtctttccacaaaggacatgccagtgaccaaagccgattcaatagatgttttatgtgattatatcatggcaatagaagacgatacgacactagaatgttttgacatggctgttcggctgcttgccaataaagagtcacgtaggccgaaagaagaaatcataaataatagaaagcattatatggacatgcgtttttgggttctcatgccatggaaattcaatggatgttacgcccttttcgtaatagatcatgttaaaaagcatgtgacttttatcgattttacaccgactcaagattggtgtaagcacatgccatacaagaggttcgaggaagcgattatcatggcctcaaaaaaatataagattgcttacagcaagaaacattctggatgggcggaggatatctttaagtgggaacatacaattcagactggtgttccaattgacttaaaagggtttaataccagctaccttgttctacaagctatggccatgtgggggaatgacagacgactgaaatttgttgggatcaagtcagtttatgtttgggcaggctttgatgataagccaatggttaaaagggctgtcattgtaacccccacaagcttagttagcaactgggaatctgagataattaagtggttgaaaggcagagtgcaggtgctggccctctgtgaaagcacacgtgctgatgttctttccggaattgaaagtttcttaaaacccttgagccgtctccagcctcctgagaactggaacggtggtgttgggtttgtgtctaaggaaatgatccaatctcattgtccagcgcctgctgagtacattcaggccatggatgcacaccttgacgagctcaactacacaaaggagatgcagttccagttcacggatgcatatagccgagcatgcagctttcttaaaccacaaagacagttacatcagaagctgtatcagaagtggttcagagttctgtttctgtggcggtcgatgctgttgacttggtagatgacaagggagatagcgatgatgacatcgtcgatcaccatggggacgaggacaggatgactgatgtggagc

SEQ ID NO: 5355 - DNA, 6327 bp, Zea Mays
aaaagagagaggcagtaggcaacgcccccacagaggcagagagaaagccagaggcagtagtaggcagagcacataaccaaacaacacccatccaaaaaccccaaaaggaagagagaaaggagtgagaaaaccacgcagtcgtttgtccagacaaaacaagaacaagaacccagcagcagtacgcacttcctcctcctcctcctcctctctctctcgctctctctcctcttgctctcgctccctctcgctcccccagtccgcctccctggcccatcagatccaattccttccccgacccccatcccggatccgccgcaattcctccgtgcgtcgagctcgattgctccccgcccgtggaatttgctcctttctcccgcaagaatcccacctcggccggcgacttggggggacctgccaaggtttgggcgcgcgctcctgcttggcgtagcgggccatgggcgtgctgttgccagctaggctgttcgtgcgccggatgctcagggttgtcaggctcaacccgttgcagcgcagcgccaagagtggatgaggtaatttctcgcgagcgcattcagcacagcaggttactattggctgctcgtccacttaagcaggttgaggtatccatttggttcgacacagtgaagaactgaagatacgcattgtgcttgcttgtcttgcggggctcacaaacatcctgctggtgtgctgtgctgggaaggtcacataatccacttggctatatgccggggtgggaatgtgaatcggggcttcattagtgcaggcagcaggcttgttaacttgttttgcaacaagcatgggggcaaaagttgaaggggaaagctatatgcctggatattatgccacaggggatctcaacgtggaagcaagtggtaggtggtctccatactatgaggagatgacatcaaatggccagttatgcaatggcttcgcaacaaaaccaacaagtggttattcagaatttgacaaagaaatactcaagcatcaaattcttgaacatgaagctgtgttcagacaacaggtgtatgaactgcaccgagtttacaaaatacagaaggatatgatgaaacaacatcaaagaaaagaggtatattcatacccaactttggcaggtgcatcacatactaattcaccatcacaagtgccaccaaacggtgcaaagatgatgtggcagatgccagttcctcctgtgtctacaacatacaggaaagctattggagagcataatgatacaaaccagtcctgcatgaagttccttagagaaggcagtgtgcagtcttctccaaatggatttctatcaagtgatgctgctccaagaaccagacaaggcacttttgaccttcaacttccagccgatcattatatagatgacgatgacacatcagataacaagcccatagatttccttggtttggcatcagatgcaaaaccccagaatgatgctgagcttacattagttagtgcagaacgcttgggcaagttcagtgataatagttcatcctcaggtttgcggactacaaataatcttggaagccgacaagttaccaacctgaatgaatcaaatactggcttctttatgggtagagcaaatggatctgtttccagaggccttccgcataccctcgagaactcgtggcaccaaccgatattgagatcaagcacaactactttcaatttcagtaaagaatactccaaagaaaagcacacaaatgaaggtacaagctcaaatttttttgacacaagtgcgaaactaacacatgacgacaagccaacaatcaataaaggtaaacaagtcagcagtataacttttttagcacccagatataatgatgctgatcccccaaaatacttcaaagctgctgatgggaggcctgccagttataaccaatttctttaccaaggtcagaatagttcagctggatggattgcacgaagtcctctggaaccttctgttatcaataattttgctagagttgaccgtccacatcattcgaatctgggtacatttactgtccccatctctattcctcaaatagacaatccttcaattgtctccccgatgggttcttgcacagcagacccaaggagcagcattgtcaacaatcctgctttaattccaagattcaatgggtcgtcaaccgtgaattcgtacgccagtcttagtgctgtgacacagagcattggaacttcaatcccaaagctgaaaaatgtggataacttagataaacgctatcctggttttccacttgattcgttttctgtgtcccactcacgacatcaggtagcaatttcaagtaacctggagcaaaagaactcccagaagtttgaagattcagatcaacagtcccatggcaagggtatgaagaacttcaatttgaatgagacactgtcagattgtcaggaagatggtcttgtagaacaagatgggagatgtgctgccagttttcagcatggtaaagacggagggtcagtattcgggatctcttggctcaaaaataaagctgtgtctgctgatccaacagctttggagaaggcagggaagatttttggccattcgtttggaactacaatggagctgaaaaatgctaaagaccagaacgaaccagctgtgactattcgaaatttgtcagactctgcttcgacatctcttggctgtggaattaagaaggatgggccttcagaagacattgccactggaactttgctggtttgtaataaagcccaagaggacgctacatgtttacccctttcatgccagaaacatgtgcctaaagatggacaagatgctgatggagtcatcaagataagtggtgcctccatcaggaatttcatcgatctcaatgatgctgtgccaaacgatgacaattctgaagaatcagtagtgtcacatgaatgccaggcggaaccttcacggaacaaccatcctaaacgagcatttgtgattgatctagaggtgccggcttgtgaagaggatgctgcttgggattttgatcaagaatgtgcacagcctaaacctgatgcacaccaggaagttgacggcagatctgatacatctgctctagctgcagctgagaacatcgtagcgttgtcaaggattattccaacagctctagaggcatctgatgatatgttgcagtggtttgcagatctcgctgtattgaacatcaaggaccttgctgagcaagctgaactccaagcttgtaccaatgattccagtaacgacgagtcagattcattcgaatccttgacactgaagctggaagagaccaagattgatgagtactggagcaggccactggaacctgaaatcacaaccgatgaacaattaatttcaactgctcaccttctcaccaagcccagaaggggccagcaaaggaggcgacggcagaagcgggatttccagaaagatatcttgcctggcctttcgtcactttcccggcctgaaatcatagaggatgtccagttgcttgaggggttagtccaggcttctggtggatcctgggagtcgagtttaactaggcgaggacgttatggtgggcggactcgaggtaggaaacctcggaaaactgtagtaactgtaattgtagaagaggaggtcgaggttagcccaccgccgaaacctgttggcactggcgacctcgaagccgatggtaggggtatggttggatggggcagaacaacaaggcggtgtcgcagagcgagatgtccgtcaggtaacaacttggctgctgcgtcttgagaaagggtattgccagcaagcattggacctgattaggtacttggtggttcacaattgttatagactccgatggatggactggtataaggtgatcacagtcatgagtgtacatactctgtcggcgtattggcctcaccccaactttcatgcttttgggttgaaacatggtttacgttcttataataagttccgtaaattagctggtaagacatttctgcgacagcattgtattaagctgttccaggttatgaggtccggtataaattcattgtgagaaaaaaaactgcaatgcctgtaaaccaccttgatctctgaagattagctcatcgcatgcgcaacaaagggtgtgaaagacttcgggtctgtattcttttttagcttatatatgctctgcctaattggctagtacatattcagtatccgaaatgcccatttatttttgtttagatactgattggaagcacccaaattttaagaacctgttttatgaaaattaaggtggttccaaacataatagtttatatcccagtctgtctatagaaactgaattctttcttaaaaaaactagaaactagtctcctaactaaaacctgtttatgaaaattatggtggttccaaacactattaactagtttttttataaaccagtttttaaaaattagagatagaaattagattcttaaaaaaacatatcgatttatatatcagtttataggaattagattctcattttcttaaaaaccaagaagctggtctaaaaaataaaaactggttttttaaaaactaggtccaggtcgcatcccaatgtttccgttccctttcggcctgcatatgcttctgctatatatatggcggatgttgtatttgttcaaatattcgtcaaactccattaatgaaaataattcagaactaccggtaactaatctcacggtttttattgttttggaaaacacgacaactaatcattggtaccggaggccctgaactactgggcctaatccgattcaatatctcggcccacgatgcaacgggtgatcagtttttcccgttcgaatttcggagccctcctctcctccccgctccagcgcccctgcagttctcgctccactgacagctcgccgaggggccgcgccgcgctcgagacccgtcgatggcgaggcggagcctggcggtcgacgcaaccgcaggcgccgcatcccgggttcggttcgcgcccacctccaataacctgctcgtctcctcatgggattcggggctgcggttgtacgatgccgacgagggcacgctcagggtcaacgtggagtcagaggcggcattcctcgactgctgcttcgaggatgagtctgcagcgtttgcctgcggctctgatggatctgtgagaaggtacgacttccactcaggttcgcaggatacggtggggctccatgaagatgcactagcctgcattgagttctcttcactgaccggccactccgcgcgggattttctcgcgggccccagccgctgtgcgcgctcgctgctccgcccgccgcagccaccacgtgtcagtcggccacgccacggcacactccccttcctcgccggccgcagccatcgtgaccgcgtgctcgcaggccacacggaggtcagattatgacaggcagccttgacaagaagctaaagctttgggattcaaaaacaagaaatgtaagcccgagcggcaccataaccttaaattcagatgtggcctcaatttctatatgcggcatttacatattagctgcagttgagagaaatgtttatctttatgacatgaggaatctaacaagaccagttgatgaaaaagactgtcctctggattatcaaattcgatgccttcatacttctctagagtggaatgcttatgttgctggctctgtggatggagttgttgcattgaagtatcttgatcgtggaacagatagagatttgggatatgcatttcgttgtcatccaaattccagaaacggaaaatggaatctggtccctgtaaattgcatctcagttcatccctgcaacagaactttcgttacgggagatgataaaggatgcactattgtttgggatgctcaattgaaaaagaagctgattgagcttccaatgtatttgggcagtgtggcgtcagtggcatacaaccataatggccaacttctggcggttgcctcaaactattttttagaagtggataaagaggagcaacaccaccaggtattcattgaaactgtggagaacttcaaaggcaagtcccgtgtgggatagagccttctaacaaaacatgttctgttcatctgttgtattgtattttgtctaccatacatgttaaaggtcaccaagatgtgacagcatgttgtattatgttgtatgactaagcattttttttaggaaacgacataatatggctaagcaatacttgtatatattggttacatctagtctgagacagctgtggtgtgttgtaactcttttgagcttttgcaaccagtattgctgttctggacttctggtaaccgcagctatccctgctgtgttaatgaactgttatttgctttcaa

SEQ ID NO: 5356 - DNA, 3784 bp, Zea Mays
aacgcccccacagaggcagagagaaagccagaggcagtagtaggcagagcacataaccaaacaacacccatccaaaaaccccaaaaggaagagagaaaggagtgagaaaaccacgcagtcgtttgtccagacaaaacaagaacaagaacccagcagcagtaatttctcgcgagcgcattcagcacagcaggttactattggctgctcgtccacttaagcaggttgaggtatccatttggttcgacacagtgaagaactgaagatacgcattgtgcttgcttgtcttgcggggctcacaaacatcctgctggtgtgctgtgctgggaaggtcacataatccacttggctatatgccggggtgggaatgtgaatcggggcttcattagtgcaggcagcaggcttgttaacttgttttgcaacaagcatgggggcaaaagttgaaggggaaagctatatgcctggatattatgccacaggggatctcaacgtggaagcaagtggtaggtggtctccatactatgaggagatgacatcaaatggccagttatgcaatggcttcgcaacaaaaccaacaagtggttattcagaatttgacaaagaaatactcaagcatcaaattcttgaacatgaagctgtgttcagacaacaggtgtatgaactgcaccgagtttacaaaatacagaaggatatgatgaaacaacatcaaagaaaagaggtatattcatacccaactttggcaggtgcatcacatactaattcaccatcacaagtgccaccaaacggtgcaaagatgatgtggcagatgccagttcctcctgtgtctacaacatacaggaaagctattggagagcataatgatacaaaccagtcctgcatgaagttccttagagaaggcagtgtgcagtcttctccaaatggatttctatcaagtgatgctgctccaagaaccagacaaggcacttttgaccttcaacttccagccgatcattatatagatgacgatgacacatcagataacaagcccatagatttccttggtttggcatcagatgcaaaaccccagaatgatgctgagcttacattagttagtgcagaacgcttgggcaagttcagtgataatagttcatcctcaggtttgcggactacaaataatcttggaagccgacaagttaccaacctgaatgaatcaaatactggcttctttatgggtagagcaaatggatctgtttccagaggccttccgcataccctcgagaactcgtggcaccaaccgatattgagatcaagcacaactactttcaatttcagtaaagaatactccaaagaaaagcacacaaatgaaggtacaagctcaaatttttttgacacaagtgcgaaactaacacatgacgacaagccaacaatcaataaaggtaaacaagtcagcagtataacttttttagcacccagatataatgatgctgatcccccaaaatacttcaaagctgctgatgggaggcctgccagttataaccaatttctttaccaaggtcagaatagttcagctggatggattgcacgaagtcctctggaaccttctgttatcaataattttgctagagttgaccgtccacatcattcgaatctgggtacatttactgtccccatctctattcctcaaatagacaatccttcaattgtctccccgatgggttcttgcacagcagacccaaggagcagcattgtcaacaatcctgctttaattccaagattcaatgggtcgtcaaccgtgaattcgtacgccagtcttagtgctgtgacacagagcattggaacttcaatcccaaagctgaaaaatgtggataacttagataaacgctatcctggttttccacttgattcgttttctgtgtcccactcacgacatcaggtagcaatttcaagtaacctggagcaaaagaactcccagaagtttgaagattcagatcaacagtcccatggcaagggtatgaagaacttcaatttgaatgagacactgtcagattgtcaggaagatggtcttgtagaacaagatgggagatgtgctgccagttttcagcatggtaaagacggagggtcagtattcgggatctcttggctcaaaaataaagctgtgtctgctgatccaacagctttggagaaggcagggaagatttttggccattcgtttggaactacaatggagctgaaaaatgctaaagaccagaacgaaccagctgtgactattcgaaatttgtcagactctgcttcgacatctcttggctgtggaattaagaaggatgggccttcagaagacattgccactggaactttgctggtttgtaataaagcccaagaggacgctacatgtttacccctttcatgccagaaacatgtgcctaaagatggacaagatgctgatggagtcatcaagataagtggtgcctccatcaggaatttcatcgatctcaatgatgctgtgccaaacgatgacaattctgaagaatcagtagtgtcacatgaatgccaggcggaaccttcacggaacaaccatcctaaacgagcatttgtgattgatctagaggtgccggcttgtgaagaggatgctgcttgggattttgatcaagaatgtgcacagcctaaacctgatgcacaccaggaagttgacggcagatctgatacatctgctctagctgcagctgagaacatcgtagcgttgtcaaggattattccaacagctctagaggcatctgatgatatgttgcagtggtttgcagatctcgctgtattgaacatcaaggaccttgctgagcaagctgaactccaagcttgtaccaatgattccagtaacgacgagtcagattcattcgaatccttgacactgaagctggaagagaccaagattgatgagtactggagcaggccactggaacctgaaatcacaaccgatgaacaattaatttcaactgctcaccttctcaccaagcccagaaggggccagcaaaggaggcgacggcagaagcgggatttccagaaagatatcttgcctggcctttcgtcactttcccggcctgaaatcatagaggatgtccagttgcttgaggggttagtccaggcttctggtggatcctgggagtcgagtttaactaggcgaggacgttatggtgggcggactcgaggtaggaaacctcggaaaactgtagtaactgtaattgtagaagaggaggtcgaggttagcccaccgccgaaacctgttggcactggcgacctcgaagccgatggtaggggtatggttggatggggcagaacaacaaggcggtgtcgcagagcgagatgtccgtcaggtaacaacttggctgctgcgtcttgagaaagggtattgccagcaagcattggacctgattaggtacttggtggttcacaattgttatagactccgatggatggactggtataaggtgatcacagtcatgagtgtacatactctgtcggcgtattggcctcaccccaactttcatgcttttgggttgaaacatggtttacgttcttataataagttccgtaaattagctggtaagacatttctgcgacagcattgtattaagctgttccaggttatgaggtccggtataaattcattgtgagaaaaaaaactgcaatgcctgtaaaccaccttgatctctgaagattagctcatcgcatgcgcaacaaagggtgtgaaagacttcgggtctgtattcttttttagcttatatatgctctgcctaattggctagtacatattcag

SEQ ID NO: 5357 - DNA, 4043 bp, Zea Mays
ggcagagcacataaccaaacaacacccatccaaaaaccccaaaaggaagagagaaaggagtgagaaaaccacgcagtcgtttgtccagacaaaacaagaacaagaacccagcagcagtacgcacttcctcctcctcctcctcctctctctctcgctctctctcctcttgctctcgctccctctcgctcccccagtccgcctccctggcccatcagatccaattccttccccgacccccatcccggatccgccgcaattcctccgtgcgtcgagctcgattgctccccgcccgtggaatttgctcctttctcccgcaagaatcccacctcggccggcgacttggggggacctgccaaggtttgggcgcgcgctcctgcttggcgtagcgggccatgggcgtgctgttgccagctaggctgttcgtgcgccggatgctcagggttgtcaggctcaacccgttgcagcgcagcgccaagagtggatgaggtaatttctcgcgagcgcattcagcacagcaggttactattggctgctcgtccacttaagcaggttgaggtatccatttggttcgacacagtgaagaactgaagatacgcattgtgcttgcttgtcttgcggggctcacaaacatcctgctggtgtgctgtgctgggaaggtcacataatccacttggctatatgccggggtgggaatgtgaatcggggcttcattagtgcaggcagcaggcttgttaacttgttttgcaacaagcatgggggcaaaagttgaaggggaaagctatatgcctggatattatgccacaggggatctcaacgtggaagcaagtggtaggtggtctccatactatgaggagatgacatcaaatggccagttatgcaatggcttcgcaacaaaaccaacaagtggttattcagaatttgacaaagaaatactcaagcatcaaattcttgaacatgaagctgtgttcagacaacaggtgtatgaactgcaccgagtttacaaaatacagaaggatatgatgaaacaacatcaaagaaaagaggtatattcatacccaactttggcaggtgcatcacatactaattcaccatcacaagtgccaccaaacggtgcaaagatgatgtggcagatgccagttcctcctgtgtctacaacatacaggaaagctattggagagcataatgatacaaaccagtcctgcatgaagttccttagagaaggcagtgtgcagtcttctccaaatggatttctatcaagtgatgctgctccaagaaccagacaaggcacttttgaccttcaacttccagccgatcattatatagatgacgatgacacatcagataacaagcccatagatttccttggtttggcatcagatgcaaaaccccagaatgatgctgagcttacattagttagtgcagaacgcttgggcaagttcagtgataatagttcatcctcaggtttgcggactacaaataatcttggaagccgacaagttaccaacctgaatgaatcaaatactggcttctttatgggtagagcaaatggatctgtttccagaggccttccgcataccctcgagaactcgtggcaccaaccgatattgagatcaagcacaactactttcaatttcagtaaagaatactccaaagaaaagcacacaaatgaaggtaaacaagtcagcagtataacttttttagcacccagatataatgatgctgatcccccaaaatacttcaaagctgctgatgggaggcctgccagttataaccaatttctttaccaaggtcagaatagttcagctggatggattgcacgaagtcctctggaaccttctgttatcaataattttgctagagttgaccgtccacatcattcgaatctgggtacatttactgtccccatctctattcctcaaatagacaatccttcaattgtctccccgatgggttcttgcacagcagacccaaggagcagcattgtcaacaatcctgctttaattccaagattcaatgggtcgtcaaccgtgaattcgtacgccagtcttagtgctgtgacacagagcattggaacttcaatcccaaagctgaaaaatgtggataacttagataaacgctatcctggttttccacttgattcgttttctgtgtcccactcacgacatcaggtagcaatttcaagtaacctggagcaaaagaactcccagaagtttgaagattcagatcaacagtcccatggcaagggtatgaagaacttcaatttgaatgagacactgtcagattgtcaggaagatggtcttgtagaacaagatgggagatgtgctgccagttttcagcatggtaaagacggagggtcagtattcgggatctcttggctcaaaaataaagctgtgtctgctgatccaacagctttggagaaggcagggaagatttttggccattcgtttggaactacaatggagctgaaaaatgctaaagaccagaacgaaccagctgtgactattcgaaatttgtcagactctgcttcgacatctcttggctgtggaattaagaaggatgggccttcagaagacattgccactggaactttgctggtttgtaataaagcccaagaggacgctacatgtttacccctttcatgccagaaacatgtgcctaaagatggacaagatgctgatggagtcatcaagataagtggtgcctccatcaggaatttcatcgatctcaatgatgctgtgccaaacgatgacaattctgaagaatcagtagtgtcacatgaatgccaggcggaaccttcacggaacaaccatcctaaacgagcatttgtgattgatctagaggtgccggcttgtgaagaggatgctgcttgggattttgatcaagaatgtgcacagcctaaacctgatgcacaccaggaagttgacggcagatctgatacatctgctctagctgcagctgagaacatcgtagcgttgtcaaggattattccaacagctctagaggcatctgatgatatgttgcagtggtttgcagatctcgctgtattgaacatcaaggaccttgctgagcaagctgaactccaagcttgtaccaatgattccagtaacgacgagtcagattcattcgaatccttgacactgaagctggaagagaccaagattgatgagtactggagcaggccactggaacctgaaatcacaaccgatgaacaattaatttcaactgctcaccttctcaccaagcccagaaggggccagcaaaggaggcgacggcagaagcgggatttccagaaagatatcttgcctggcctttcgtcactttcccggcctgaaatcatagaggatgtccagttgcttgaggggttagtccaggcttctggtggatcctgggagtcgagtttaactaggcgaggacgttatggtgggcggactcgaggtaggaaacctcggaaaactgtagtaactgtaattgtagaagaggaggtcgaggttagcccaccgccgaaacctgttggcactggcgacctcgaagccgatggtaggggtatggttggatggggcagaacaacaaggcggtgtcgcagagcgagatgtccgtcaggtaacaacttggctgctgcgtcttgagaaagggtattgccagcaagcattggacctgattaggtacttggtggttcacaattgttatagactccgatggatggactggtataaggtgatcacagtcatgagtgtacatactctgtcggcgtattggcctcaccccaactttcatgcttttgggttgaaacatggtttacgttcttataataagttccgtaaattagctggtaagacatttctgcgacagcattgtattaagctgttccaggttatgaggtccggtataaattcattgtgagaaaaaaaactgcaatgcctgtaaaccaccttgatctctgaagattagctcatcgcatgcgcaacaaagggtgtgaaagacttcgggtctgtattcttttttagcttatatatgctctgcctaattggctagtacatattcag

SEQ ID NO: 5358 - DNA, 3756 bp, Zea Mays
gtcgtttgtccagacaaaacaagaacaagaacccagcagcagtacgcacttcctcctcctcctcctcctctctctctcgctctctctcctcttgctctcgctccctctcgctcccccagtccgcctccctggcccatcagatccaattccttccccgacccccatcccggatccgccgcaattcctccgtgcgtcgagctcgattgctccccgcccgtggaatttgctcctttctcccgcaagaatcccacctcggccggcgacttggggggacctgccaaggtttgggcgcgcgctcctgcttggcgtagcgggccatgggcgtgctgttgccagctaggctgttcgtgcgccggatgctcagggttgtcaggctcaacccgttgcagcgcagcgccaagagtggatgaggtaatttctcgcgagcgcattcagcacagcaggttactattggctgctcgtccacttaagcaggttgaggtatccatttggttcgacacagtgaagaactgaagatacgcattgtgcttgcttgtcttgcggggctcacaaacatcctgctggtgtgctgtgctgggaaggtcacataatccacttggctatatgccggggtgggaatgtgaatcggggcttcattagtgcaggcagcaggcttgttaacttgttttgcaacaagcatgggggcaaaagttgaaggggaaagctatatgcctggatattatgccacaggggatctcaacgtggaagcaagtggtaggtggtctccatactatgaggagatgacatcaaatggccagttatgcaatggcttcgcaacaaaaccaacaagtggttattcagaatttgacaaagaaatactcaagcatcaaattcttgaacatgaagctgtgttcagacaacaggtgtatgaactgcaccgagtttacaaaatacagaaggatatgatgaaacaacatcaaagaaaagaggtatattcatacccaactttggcaggtgcatcacatactaattcaccatcacaagtgccaccaaacggtgcaaagatgatgtggcagatgccagttcctcctgtgtctacaacatacaggaaagctattggagagcataatgatacaaaccagtcctgcatgaagttccttagagaaggcagtgtgcagtcttctccaaatggatttctatcaagtgatgctgctccaagaaccagacaaggcacttttgaccttcaacttccagccgatcattatatagatgacgatgacacatcagataacaagcccatagatttccttggtttggcatcagatgcaaaaccccagaatgatgctgagcttacattagttagtgcagaacgcttgggcaagttcagtgataatagttcatcctcaggtttgcggactacaaataatcttggaagccgacaagttaccaacctgaatgaatcaaatactggcttctttatgggtagagcaaatggatctgtttccagaggccttccgcataccctcgagaactcgtggcaccaaccgatattgagatcaagcacaactactttcaatttcagtaaagaatactccaaagaaaagcacacaaatgaaggtacaagctcaaatttttttgacacaagtgcgaaactaacacatgacgacaagccaacaatcaataaaggtaaacaagtcagcagtataacttttttagcacccagatataatgatgctgatcccccaaaatacttcaaagctgctgatgggaggcctgccagttataaccaatttctttaccaaggtcagaatagttcagctggatggattgcacgaagtcctctggaaccttctgttatcaataattttgctagagttgaccgtccacatcattcgaatctgggtagcaatttcaagtaacctggagcaaaagaactcccagaagtttgaagattcagatcaacagtcccatggcaagggtatgaagaacttcaatttgaatgagacactgtcagattgtcaggaagatggtcttgtagaacaagatgggagatgtgctgccagttttcagcatggtaaagacggagggtcagtattcgggatctcttggctcaaaaataaagctgtgtctgctgatccaacagctttggagaaggcagggaagatttttggccattcgtttggaactacaatggagctgaaaaatgctaaagaccagaacgaaccagctgtgactattcgaaatttgtcagactctgcttcgacatctcttggctgtggaattaagaaggatgggccttcagaagacattgccactggaactttgctggtttgtaataaagcccaagaggacgctacatgtttacccctttcatgccagaaacatgtgcctaaagatggacaagatgctgatggagtcatcaagataagtggtgcctccatcaggaatttcatcgatctcaatgatgctgtgccaaacgatgacaattctgaagaatcagtagtgtcacatgaatgccaggcggaaccttcacggaacaaccatcctaaacgagcatttgtgattgatctagaggtgccggcttgtgaagaggatgctgcttgggattttgatcaagaatgtgcacagcctaaacctgatgcacaccaggaagttgacggcagatctgatacatctgctctagctgcagctgagaacatcgtagcgttgtcaaggattattccaacagctctagaggcatctgatgatatgttgcagtggtttgcagatctcgctgtattgaacatcaaggaccttgctgagcaagctgaactccaagcttgtaccaatgattccagtaacgacgagtcagattcattcgaatccttgacactgaagctggaagagaccaagattgatgagtactggagcaggccactggaacctgaaatcacaaccgatgaacaattaatttcaactgctcaccttctcaccaagcccagaaggggccagcaaaggaggcgacggcagaagcgggatttccagaaagatatcttgcctggcctttcgtcactttcccggcctgaaatcatagaggatgtccagttgcttgaggggttagtccaggcttctggtggatcctgggagtcgagtttaactaggcgaggacgttatggtgggcggactcgaggtaggaaacctcggaaaactgtagtaactgtaattgtagaagaggaggtcgaggttagcccaccgccgaaacctgttggcactggcgacctcgaagccgatggtaggggtatggttggatggggcagaacaacaaggcggtgtcgcagagcgagatgtccgtcaggtaacaacttggctgctgcgtcttgagaaagggtattgccagcaagcattggacctgattaggtacttggtggttcacaattgttatagactccgatggatggactggtataaggtgatcacagtcatgagtgtacatactctgtcggcgtattggcctcaccccaactttcatgcttttgggttgaaacatggtttacgttcttataataagttccgtaaattagctggtaagacatttctgcgacagcattgtattaagctgttccaggttatgaggtccggtataaattcattgtgagaaaaaaaactgcaatgcctgtaaaccaccttgatctctgaagattagctcatcgcatgcgcaacaaagggtgtgaaagacttcgggtctgtattcttttttagcttatatatgctctgcctaattggctagtacatattcag

SEQ ID NO: 5359 - DNA, 3674 bp, Zea Mays
aacaagaacaagaacccagcagcagtaatttctcgcgagcgcattcagcacagcaggttactattggctgctcgtccacttaagcaggttgaggtatccatttggttcgacacagtgaagaactgaagatacgcattgtgcttgcttgtcttgcggggctcacaaacatcctgctggtgtgctgtgctgggaaggtcacataatccacttggctatatgccggggtgggaatgtgaatcggggcttcattagtgcaggcagcaggcttgttaacttgttttgcaacaagcatgggggcaaaagttgaaggggaaagctatatgcctggatattatgccacaggggatctcaacgtggaagcaagtggtaggtggtctccatactatgaggagatgacatcaaatggccagttatgcaatggcttcgcaacaaaaccaacaagtggttattcagaatttgacaaagaaatactcaagcatcaaattcttgaacatgaagctgtgttcagacaacagcctcacaacccactcgctatccaggtgtatgaactgcaccgagtttacaaaatacagaaggatatgatgaaacaacatcaaagaaaagaggtatattcatacccaactttggcaggtgcatcacatactaattcaccatcacaagtgccaccaaacggtgcaaagatgatgtggcagatgccagttcctcctgtgtctacaacatacaggaaagctattggagagcataatgatacaaaccagtcctgcatgaagttccttagagaaggcagtgtgcagtcttctccaaatggatttctatcaagtgatgctgctccaagaaccagacaaggcacttttgaccttcaacttccagccgatcattatatagatgacgatgacacatcagataacaagcccatagatttccttggtttggcatcagatgcaaaaccccagaatgatgctgagcttacattagttagtgcagaacgcttgggcaagttcagtgataatagttcatcctcaggtttgcggactacaaataatcttggaagccgacaagttaccaacctgaatgaatcaaatactggcttctttatgggtagagcaaatggatctgtttccagaggccttccgcataccctcgagaactcgtggcaccaaccgatattgagatcaagcacaactactttcaatttcagtaaagaatactccaaagaaaagcacacaaatgaaggtacaagctcaaatttttttgacacaagtgcgaaactaacacatgacgacaagccaacaatcaataaaggtaaacaagtcagcagtataacttttttagcacccagatataatgatgctgatcccccaaaatacttcaaagctgctgatgggaggcctgccagttataaccaatttctttaccaaggtcagaatagttcagctggatggattgcacgaagtcctctggaaccttctgttatcaataattttgctagagttgaccgtccacatcattcgaatctgggtacatttactgtccccatctctattcctcaaatagacaatccttcaattgtctccccgatgggttcttgcacagcagacccaaggagcagcattgtcaacaatcctgctttaattccaagattcaatgggtcgtcaaccgtgaattcgtacgccagtcttagtgctgtgacacagagcattggaacttcaatcccaaagctgaaaaatgtggataacttagataaacgctatcctggttttccacttgattcgttttctgtgtcccactcacgacatcaggtagcaatttcaagtaacctggagcaaaagaactcccagaagtttgaagattcagatcaacagtcccatggcaagggtatgaagaacttcaatttgaatgagacactgtcagattgtcaggaagatggtcttgtagaacaagatgggagatgtgctgccagttttcagcatggtaaagacggagggtcagtattcgggatctcttggctcaaaaataaagctgtgtctgctgatccaacagctttggagaaggcagggaagatttttggccattcgtttggaactacaatggagctgaaaaatgctaaagaccagaacgaaccagctgtgactattcgaaatttgtcagactctgcttcgacatctcttggctgtggaattaagaaggatgggccttcagaagacattgccactggaactttgctggtttgtaataaagcccaagaggacgctacatgtttacccctttcatgccagaaacatgtgcctaaagatggacaagatgctgatggagtcatcaagataagtggtgcctccatcaggaatttcatcgatctcaatgatgctgtgccaaacgatgacaattctgaagaatcagtagtgtcacatgaatgccaggcggaaccttcacggaacaaccatcctaaacgagcatttgtgattgatctagaggtgccggcttgtgaagaggatgctgcttgggattttgatcaagaatgtgcacagcctaaacctgatgcacaccaggaagttgacggcagatctgatacatctgctctagctgcagctgagaacatcgtagcgttgtcaaggattattccaacagctctagaggcatctgatgatatgttgcagtggtttgcagatctcgctgtattgaacatcaaggaccttgctgagcaagctgaactccaagcttgtaccaatgattccagtaacgacgagtcagattcattcgaatccttgacactgaagctggaagagaccaagattgatgagtactggagcaggccactggaacctgaaatcacaaccgatgaacaattaatttcaactgctcaccttctcaccaagcccagaaggggccagcaaaggaggcgacggcagaagcgggatttccagaaagatatcttgcctggcctttcgtcactttcccggcctgaaatcatagaggatgtccagttgcttgaggggttagtccaggcttctggtggatcctgggagtcgagtttaactaggcgaggacgttatggtgggcggactcgaggtaggaaacctcggaaaactgtagtaactgtaattgtagaagaggaggtcgaggttagcccaccgccgaaacctgttggcactggcgacctcgaagccgatggtaggggtatggttggatggggcagaacaacaaggcggtgtcgcagagcgagatgtccgtcaggtaacaacttggctgctgcgtcttgagaaagggtattgccagcaagcattggacctgattaggtacttggtggttcacaattgttatagactccgatggatggactggtataaggtgatcacagtcatgagtgtacatactctgtcggcgtattggcctcaccccaactttcatgcttttgggttgaaacatggtttacgttcttataataagttccgtaaattagctggtaagacatttctgcgacagcattgtattaagctgttccaggttatgaggtccggtataaattcattgtgagaaaaaaaactgcaatgcctgtaaaccaccttgatctctgaagattagctcatcgcatgcgcaacaaagggtgtgaaagacttcgggtctgtattcttttttagcttatatatgctctgcctaattggctagtacatattcag

SEQ ID NO: 5360 - DNA, 3952 bp, Zea Mays
cgcacttcctcctcctcctcctcctctctctctcgctctctctcctcttgctctcgctccctctcgctcccccagtccgcctccctggcccatcagatccaattccttccccgacccccatcccggatccgccgcaattcctccgtgcgtcgagctcgattgctccccgcccgtggaatttgctcctttctcccgcaagaatcccacctcggccggcgacttggggggacctgccaaggtttgggcgcgcgctcctgcttggcgtagcgggccatgggcgtgctgttgccagctaggctgttcgtgcgccggatgctcagggttgtcaggctcaacccgttgcagcgcagcgccaagagtggatgaggtaatttctcgcgagcgcattcagcacagcaggttactattggctgctcgtccacttaagcaggttgaggtatccatttggttcgacacagtgaagaactgaagatacgcattgtgcttgcttgtcttgcggggctcacaaacatcctgctggtgtgctgtgctgggaaggtcacataatccacttggctatatgccggggtgggaatgtgaatcggggcttcattagtgcaggcagcaggcttgttaacttggggatctcaacgtggaagcaagtggtaggtggtctccatactatgaggagatgacatcaaatggccagttatgcaatggcttcgcaacaaaaccaacaagtggttattcagaatttgacaaagaaatactcaagcatcaaattcttgaacatgaagctgtgttcagacaacagcctcacaacccactcgctatccaggtgtatgaactgcaccgagtttacaaaatacagaaggatatgatgaaacaacatcaaagaaaagaggtatattcatacccaactttggcaggtgcatcacatactaattcaccatcacaagtgccaccaaacggtgcaaagatgatgtggcagatgccagttcctcctgtgtctacaacatacaggaaagctattggagagcataatgatacaaaccagtcctgcatgaagttccttagagaaggcagtgtgcagtcttctccaaatggatttctatcaagtgatgctgctccaagaaccagacaaggcacttttgaccttcaacttccagccgatcattatatagatgacgatgacacatcagataacaagcccatagatttccttggtttggcatcagatgcaaaaccccagaatgatgctgagcttacattagttagtgcagaacgcttgggcaagttcagtgataatagttcatcctcaggtttgcggactacaaataatcttggaagccgacaagttaccaacctgaatgaatcaaatactggcttctttatgggtagagcaaatggatctgtttccagaggccttccgcataccctcgagaactcgtggcaccaaccgatattgagatcaagcacaactactttcaatttcagtaaagaatactccaaagaaaagcacacaaatgaaggtacaagctcaaatttttttgacacaagtgcgaaactaacacatgacgacaagccaacaatcaataaaggtaaacaagtcagcagtataacttttttagcacccagatataatgatgctgatcccccaaaatacttcaaagctgctgatgggaggcctgccagttataaccaatttctttaccaaggtcagaatagttcagctggatggattgcacgaagtcctctggaaccttctgttatcaataattttgctagagttgaccgtccacatcattcgaatctgggtacatttactgtccccatctctattcctcaaatagacaatccttcaattgtctccccgatgggttcttgcacagcagacccaaggagcagcattgtcaacaatcctgctttaattccaagattcaatgggtcgtcaaccgtgaattcgtacgccagtcttagtgctgtgacacagagcattggaacttcaatcccaaagctgaaaaatgtggataacttagataaacgctatcctggttttccacttgattcgttttctgtgtcccactcacgacatcaggtagcaatttcaagtaacctggagcaaaagaactcccagaagtttgaagattcagatcaacagtcccatggcaagggtatgaagaacttcaatttgaatgagacactgtcagattgtcaggaagatggtcttgtagaacaagatgggagatgtgctgccagttttcagcatggtaaagacggagggtcagtattcgggatctcttggctcaaaaataaagctgtgtctgctgatccaacagctttggagaaggcagggaagatttttggccattcgtttggaactacaatggagctgaaaaatgctaaagaccagaacgaaccagctgtgactattcgaaatttgtcagactctgcttcgacatctcttggctgtggaattaagaaggatgggccttcagaagacattgccactggaactttgctggtttgtaataaagcccaagaggacgctacatgtttacccctttcatgccagaaacatgtgcctaaagatggacaagatgctgatggagtcatcaagataagtggtgcctccatcaggaatttcatcgatctcaatgatgctgtgccaaacgatgacaattctgaagaatcagtagtgtcacatgaatgccaggcggaaccttcacggaacaaccatcctaaacgagcatttgtgattgatctagaggtgccggcttgtgaagaggatgctgcttgggattttgatcaagaatgtgcacagcctaaacctgatgcacaccaggaagttgacggcagatctgatacatctgctctagctgcagctgagaacatcgtagcgttgtcaaggattattccaacagctctagaggcatctgatgatatgttgcagtggtttgcagatctcgctgtattgaacatcaaggaccttgctgagcaagctgaactccaagcttgtaccaatgattccagtaacgacgagtcagattcattcgaatccttgacactgaagctggaagagaccaagattgatgagtactggagcaggccactggaacctgaaatcacaaccgatgaacaattaatttcaactgctcaccttctcaccaagcccagaaggggccagcaaaggaggcgacggcagaagcgggatttccagaaagatatcttgcctggcctttcgtcactttcccggcctgaaatcatagaggatgtccagttgcttgaggggttagtccaggcttctggtggatcctgggagtcgagtttaactaggcgaggacgttatggtgggcggactcgaggtaggaaacctcggaaaactgtagtaactgtaattgtagaagaggaggtcgaggttagcccaccgccgaaacctgttggcactggcgacctcgaagccgatggtaggggtatggttggatggggcagaacaacaaggcggtgtcgcagagcgagatgtccgtcaggtaacaacttggctgctgcgtcttgagaaagggtattgccagcaagcattggacctgattaggtacttggtggttcacaattgttatagactccgatggatggactggtataaggtgatcacagtcatgagtgtacatactctgtcggcgtattggcctcaccccaactttcatgcttttgggttgaaacatggtttacgttcttataataagttccgtaaattagctggtaagacatttctgcgacagcattgtattaagctgttccaggttatgaggtccggtataaattcattgtgagaaaaaaaactgcaatgcctgtaaaccaccttgatctctgaagattagctcatcgcatgcgcaacaaagggtgtgaaagacttcgggtctgtattcttttttagcttatatatgctctgcctaattggctagtacatattcag

SEQ ID NO: 5361 - DNA, 1265 bp, Zea Mays
agtttttcccgttcgaatttcggagccctcctctcctccccgctccagcgcccctgcagttctcgctccactgacagctcgccgaggggccgcgccgcgctcgagacccgtcgatggcgaggcggagcctggcggtcgacgcaaccgcaggcgccgcatcccgggttcggttcgcgcccacctccaataacctgctcgtctcctcatgggattcggggctgcggttgtacgatgccgacgagggcacgctcagggtcaacgtggagtcagaggcggcattcctcgactgctgcttcgaggatgagtctgcagcgtttgcctgcggctctgatggatctgtgagaaggtacgacttccactcaggttcgcaggatacggtggggctccatgaagatgcactagcctgcattgagttctcttcactgaccggtcagattatgacaggcagccttgacaagaagctaaagctttgggattcaaaaacaagaaatgaatctaacaagaccagttgatgaaaaagactgtcctctggattatcaaattcgatgccttcatacttctctagagtggaatgcttatgttgctggctctgtggatggagttgttgcattgaagtatcttgatcgtggaacagatagagatttgggatatgcatttcgttgtcatccaaattccagaaacggaaaatggaatctggtccctgtaaattgcatctcagttcatccctgcaacagaactttcgttacgggagatgataaaggatgcactattgtttgggatgctcaattgaaaaagaagctgattgagcttccaatgtatttgggcagtgtggcgtcagtggcatacaaccataatggccaacttctggcggttgcctcaaactattttttagaagtggataaagaggagcaacaccaccaggtattcattgaaactgtggagaacttcaaaggcaagtcccgtgtgggatagagccttctaacaaaacatgttctgttcatctgttgtattgtattttgtctaccatacatgttaaaggtcaccaagatgtgacagcatgttgtattatgttgtatgactaagcattttttttaggaaacgacataatatggctaagcaatacttgtatatattggttacatctagtctgagacagctgtggtgtgttgtaactcttttgagcttttgcaaccagtattgctgttctggacttctggtaaccgcagctatccctgctgtgttaatgaactgttatttgctttcaa

SEQ ID NO: 5362 - DNA, 1277 bp, Zea Mays
agtttttcccgttcgaatttcggagccctcctctcctccccgctccagcgcccctgcagttctcgctccactgacagctcgccgaggggccgcgccgcgctcgagacccgtcgatggcgaggcggagcctggcggtcgacgcaaccgcaggcgccgcatcccgggttcggttcgcgcccacctccaataacctgctcgtctcctcatgggattcggggctgcggttgtacgatgccgacgagggcacgctcagggtcaacgtggagtcagaggcggcattcctcgactgctgcttcgaggatgagtctgcagcgtttgcctgcggctctgatggatctgtgagaaggtacgacttccactcaggttcgcaggatacggtggggctccatgaagatgcactagcctgcattgagttctcttcactgaccggtcagattatgacaggcagccttgacaagaagctaaagctttgggattcaaaaacaagaaatgtaagcccgagcggcaccataaccttaaattcagatgtggcctcaatttctatatgcggcatttacatattagctgcagttgagagaaatgtttatctttatgacatgaggaatctaacaagaccagttgatgaaaaagactgtcctctggattatcaaattcgatgccttcatacttctctagagtggaatgcttatgttgctggctctgtggatggagttgttgcattgaagtatcttgatcgtggaacagatagagatttgggatatgcatttcgttgtcatccaaattccagaaacggaaaatggaatctggtccctgtaaattgcatctcagttcatccctgcaacagaactttcgttacgggagatgataaaggatgcactattgtttgggatgctcaattgaaaaagaagctgattgagggagcaacaccaccaggtattcattgaaactgtggagaacttcaaaggcaagtcccgtgtgggatagagccttctaacaaaacatgttctgttcatctgttgtattgtattttgtctaccatacatgttaaaggtcaccaagatgtgacagcatgttgtattatgttgtatgactaagcattttttttaggaaacgacataatatggctaagcaatacttgtatatattggttacatctagtctgagacagctgtggtgtgttgtaactcttttgagcttttgcaaccagtattgctgttctggacttctggtaaccgcagctatccctgctgtgttaatgaactgttatttgctttcaa

SEQ ID NO: 5363 - DNA, 1260 bp, Zea Mays
agtttttcccgttcgaatttcggagccctcctctcctccccgctccagcgcccctgcagttctcgctccactgacagctcgccgaggggccgcgccgcgctcgagacccgtcgatggcgaggcggagcctggcggtcgacgcaaccgcaggcgccgcatcccgggttcggttcgcgcccacctccaataacctgctcgtctcctcatgggattcggggctgcggttgtacgatgccgacgagggcacgctcagggtcaacgtggagtcagaggcggcattcctcgactgctgcttcgaggatgagtctgcagcgtttgcctgcggctctgatggatctgtgagaaggttcgcaggatacggtggggctccatgaagatgcactagcctgcattgagttctcttcactgaccggtcagattatgacaggcagccttgacaagaagctaaagctttgggattcaaaaacaagaaatgtaagcccgagcggcaccataaccttaaattcagatgtggcctcaatttctatatgcggcatttacatattagctgcagttgagagaaatgtttatctttatgacatgaggaatctaacaagaccagttgatgaaaaagactgtcctctggattatcaaattcgatgccttcatacttctctagagtggaatgcttatgttgctggctctgtggatggagttgttgcattgaagtatcttgatcgtggaacagatagagatttgggatatgcatttcgttgtcatccaaattccagaaacggaaaatggaatctggtccctgtaaattgcatctcagttcatccctgcaacagaactttcgttacgggagatgataaaggatgcactattgtttgggatgctcaattgaaaaagaagctgattgagggagcaacaccaccaggtattcattgaaactgtggagaacttcaaaggcaagtcccgtgtgggatagagccttctaacaaaacatgttctgttcatctgttgtattgtattttgtctaccatacatgttaaaggtcaccaagatgtgacagcatgttgtattatgttgtatgactaagcattttttttaggaaacgacataatatggctaagcaatacttgtatatattggttacatctagtctgagacagctgtggtgtgttgtaactcttttgagcttttgcaaccagtattgctgttctggacttctggtaaccgcagctatccctgctgtgttaatgaactgttatttgctttcaa

SEQ ID NO: 5364 - DNA, 1404 bp, Zea Mays
ctattccgcttccctctcccactccactcgccatggcggaagcgctcgtgggcctccgcatcgctgcccccgccgtctcgtagccgcagcctaggtttcatggcagccagcttcttcccgttgtgcacctcgccgcgtcccggcgcaaccgactgtgcaccgcccgtgcggccgtctcagggccaccggaggtggacgaggacgattccatgagcatcgacaacttgcatcgcttcttcgacctcaacgtcgggaagtgggatggccggttctaccaattcgacgcgcacgggaaggttcttcaggagattagcacgaggctgtccgtgagctcgtacggggaggacaaactcatcagcctcctgcaatcgttgtacattaagcaaggatcctctgcaatatcgattgtggacgaagaggattctgaacctgaatgggtggagtacaaaatcaaagagacgaacatgttcactgtggacaaatatcagcagtgtacagatagggttctttcctgaacaaaaggcatttgctctgaggtaccagactgctggaatgctggagactgttcttcggattggtgtgcttggagaagatgatactggtgaagaatcccccaaaaacttgaagataccttctcgtaagccatctattgtatgtgaaaattgtctttactcccttgaaggcaatggtagaatcagggcttttcacataatggatccaaagggagtgctcgacacacttcttgtttttcatgagaagaggcagggatctaaagtgccacagccacttacaaactattcagttggtaccaagagtgctagcagcgataggataaatgcactacttggaagatgggaggggcattctgtgactaagcggagtggggtgtatggagcaacacttgttgaggcagatacagctattgttctcaagatggacagtaatggccaattaattcaggatactttatcaactaaattcggaactggaacaacaacggtcaactggacaggatcagcaaatgacaacttgcttcagtttgatggaggatatgaaataacattgctacctggtgggatgtacatgggatatccgtcagacattagcaaatctgttgcccaattagattcttttcatttggagttctgttggatggaatcacctggaaagaggcagcggcttgtccgaacttacgattcagctggtttggctgtttcgtcgacctatttttctgaaaccaaagtatgagtcacagtttcctcttacaaaatgtattgcaacgaattttgtaagtgatccaataatctcactaactatttttgttgttccgtgcatgatacttgagtgtatattctcagattttttttctctctatccaaaaggcagaaatttattaaccaagca

SEQ ID NO: 5365 - DNA, 1394 bp, Zea Mays
ttccgcttccctctcccactccactcgccatggcggaagcgctcgtgggcctccgcatcgctgcccccgccgtctcgtagccgcagcctaggtttcatggcagccagcttcttcccgttgtgcacctcgccgcgtcccggcgcaaccgactgtgcaccgcccgtgcggccgtctcagggccaccggaggtggacgaggacgattccatgagcatcgacaacttgcatcgcttcttcgacctcaacgtcgggaagtgggatggccggttctaccaattcgacgcgcacgggaaggttcttcaggagattagcacgaggctgtccgtgagctcgtacggggaggacaaactcatcagcctcctgcaatcgttgtacattaagcaaggatcctctgcaatatcgattgtggacgaagaggattctgaacctgaatgggtggagtacaaaatcaaagagacgaacatgttcactgtggacaaatatcagcagatagggttctttcctgaacaaaaggcatttgctctgaggtaccagactgctggaatgctggagactgttcttcggattggtgtgcttggagaagatgatactggtgaagaatcccccaaaaacttgaagataccttctcgtaagccatctattgtatgtgaaaattgtctttactcccttgaaggcaatggtagaatcagggcttttcacataatggatccaaagggagtgctcgacacacttcttgtttttcatgagaagaggcagggatctaaagtgccacagccacttacaaactattcagttggtaccaagagtgctagcagcgataggataaatgcactacttggaagatgggaggggcattctgtgactaagcggagtggggtgtatggagcaacacttgttgaggcagatacagctattgttctcaagatggacagtaatggccaattaattcaggatactttatcaactaaattcggaactggaacaacaacggtcaactggacaggatcagcaaatgacaacttgcttcagtttgatggaggatatgaaataacattgctacctggtgggatgtacatgggatatccgtcagacattagcaaatctgttgcccaattagattcttttcatttggagttctgttggatggaatcacctggaaagaggcagcggcttgtccgaacttacgattcagctggtttggctgtttcgtcgacctatttttctgaaaccaaagtatgagtcacagtttcctcttacaaaatgtattgcaacgaattttgtaagtgatccaataatctcactaactatttttgttgttccgtgcatgatacttgagtgtatattctcagattttttttctctctatccaaaaggcagaaatttattaaccaagca

SEQ ID NO: 5366 - DNA, 1329 bp, Zea Mays
ttccgcttccctctcccactccactcgccatggcggaagcgctcgtgggcctccgcatcgctgcccccgccgtctcgtagccgcagcctaggtttcatggcagccagcttcttcccgttgtgcacctcgccgcgtcccggcgcaaccgactgtgcaccgcccgtgcggccgtctcagggccaccggaggtggacgaggacgattccatgagcatcgacaacttgcatcgcttcttcgacctcaacgtcgggaagtgggatggccggttctaccaattcgacgcgcacgggaaggttcttcaggagattagcacgaggctgtccgtgagctcgtacggggaggacaaactcatcagcctcctgcaatcgttgtacattaagcaaggatcctctgcaatatcgattgtggacgaagaggattctgaacctgaatgggtggagtacaaaatcaaagagacgaacatgttcactgtggacaaatatcagcagatagggttctttcctgaacaaaaggcatttgctctgaggtaccagactgctggaatgctggagactgttcttcggattggtgtgcttggagaagatgatactggtgaagaatcccccaagcaatggtagaatcagggcttttcacataatggatccaaagggagtgctcgacacacttcttgtttttcatgagaagaggcagggatctaaagtgccacagccacttacaaactattcagttggtaccaagagtgctagcagcgataggataaatgcactacttggaagatgggaggggcattctgtgactaagcggagtggggtgtatggagcaacacttgttgaggcagatacagctattgttctcaagatggacagtaatggccaattaattcaggatactttatcaactaaattcggaactggaacaacaacggtcaactggacaggatcagcaaatgacaacttgcttcagtttgatggaggatatgaaataacattgctacctggtgggatgtacatgggatatccgtcagacattagcaaatctgttgcccaattagattcttttcatttggagttctgttggatggaatcacctggaaagaggcagcggcttgtccgaacttacgattcagctggtttggctgtttcgtcgacctatttttctgaaaccaaagtatgagtcacagtttcctcttacaaaatgtattgcaacgaattttgtaagtgatccaataatctcactaactatttttgttgttccgtgcatgatacttgagtgtatattctcagattttttttctctctatccaaaaggcagaaatttattaaccaagca

SEQ ID NO: 5367 - DNA, 1323 bp, Zea Mays
tcccactccactcgccatggcggaagcgctcgtgggcctccgcatcgctgcccccgccgtctcgtagccgcagcctaggtttcatggcagccagcttcttcccgttgtgcacctcgccgcgtcccggcgcaaccgactgtgcaccgcccgtgcggccgtctcagggccaccggaggtggacgaggacgattccatgagcatcgacaacttgcatcgcttcttcgacctcaacgtcgggaagtgggatggccggttctaccaattcgacgcgcacgggaaggttcttcaggagattagcacgaggctgtccgtgagctcgtacggggaggacaaactcatcagcctcctgcaatcgttgtacattaagcaaggatcctctgcaatatcgattgtggacgaagaggattctgaacctgaatgggtggagtacaaaatcaaagagacgaacatgttcactgtggacaaatatcagcagtgtacagatagggttctttcctgaacaaaaggcatttgctctgaggtaccagactgctggaatgctggagactgttcttcggattggtgtgcttggagaagatgatactggtgaagaatcccccaagcaatggtagaatcagggcttttcacataatggatccaaagggagtgctcgacacacttcttgtttttcatgagaagaggcagggatctaaagtgccacagccacttacaaactattcagttggtaccaagagtgctagcagcgataggataaatgcactacttggaagatgggaggggcattctgtgactaagcggagtggggtgtatggagcaacacttgttgaggcagatacagctattgttctcaagatggacagtaatggccaattaattcaggatactttatcaactaaattcggaactggaacaacaacggtcaactggacaggatcagcaaatgacaacttgcttcagtttgatggaggatatgaaataacattgctacctggtgggatgtacatgggatatccgtcagacattagcaaatctgttgcccaattagattcttttcatttggagttctgttggatggaatcacctggaaagaggcagcggcttgtccgaacttacgattcagctggtttggctgtttcgtcgacctatttttctgaaaccaaagtatgagtcacagtttcctcttacaaaatgtattgcaacgaattttgtaagtgatccaataatctcactaactatttttgttgttccgtgcatgatacttgagtgtatattctcagattttttttctctctatccaaaaggcagaaatttattaaccaagca

SEQ ID NO: 5368 - DNA, 1052 bp, Zea Mays
tctcttatgtgtatatatatgtcaggttgtacattaagcaaggatcctctgcaatatcgattgtggacgaagaggattctgaacctgaatgggtggagtacaaaatcaaagagacgaacatgttcactgtggacaaatatcagcagatagggttctttcctgaacaaaaggcatttgctctgaggtaccagactgctggaatgctggagactgttcttcggattggtgtgcttggagaagatgatactggtgaagaatcccccaaaaacttgaagataccttctcgtaagccatctattgtatgtgaaaattgtctttactcccttgaaggcaatggtagaatcagggcttttcacataatggatccaaagggagtgctcgacacacttcttgtttttcatgagaagaggcagggatctaaagtgccacagccacttacaaactattcagttggtaccaagagtgctagcagcgataggataaatgcactacttggaagatgggaggggcattctgtgactaagcggagtggggtgtatggagcaacacttgttgaggcagatacagctattgttctcaagatggacagtaatggccaattaattcaggatactttatcaactaaattcggaactggaacaacaacggtcaactggacaggatcagcaaatgacaacttgcttcagtttgatggaggatatgaaataacattgctacctggtgggatgtacatgggatatccgtcagacattagcaaatctgttgcccaattagattcttttcatttggagttctgttggatggaatcacctggaaagaggcagcggcttgtccgaacttacgattcagctggtttggctgtttcgtcgacctatttttctgaaaccaaagtatgagtcacagtttcctcttacaaaatgtattgcaacgaattttgtaagtgatccaataatctcactaactatttttgttgttccgtgcatgatacttgagtgtatattctcagattttttttctctctatccaaaaggcagaaatttattaaccaagca

SEQ ID NO: 5369 - DNA, 2584 bp, Zea Mays
tgtaaatagggctaaaaatgaaaaaaaaactgcgggtggaccagcaggctcccgagttccgacgcgtctccggcggccacccccatctccctctctccgctcgccgcgcctccatcggtccactcagccttttgtatcgagcatgtactaaattggtcatggagaaatatcaacaagtatgccgacattagctcttgaaagatcccaacttaccaacattggtcagggtaaatttgtcaagttatcaattgatgtgtgcttggttattgatttccattagattgcagcatagcttgctcttcatctgaaagttttcgagggtaagtgtttatcatgcaccatggttgttggtaatgacatagtttacatggttgggtgctaaaaggacgagaagagtttgaataatcggtccgatgaacattctacttgagcttaagcacctcaagccctttagcatccctgcaaggcttgtcatctgtaaaggccttctgatagtgattgcccttattttgttgagagcaattgtgtctccttttcttgctatagattcatctgagaagaaagagttttacgagtcaacagcccctgacttgcttcctagaattagacgtgacaagtttcttgaggtcccacagatcatatgggggttgaacaatcaaaagattgcattcgccagagcatgcttgactgcaagattcctgaacagatcccttctcatgccaagcttgagtgcttctctcttctacaaagaggttgacttgcttcagcctatcaattttgacaaagtgtttgactttaacaagttcaatgcgcgttgccatggcttcgtaaggttagctcagtattcagaagtttcaaatcgaaccgagcctttcaaactccaaaaggggactggtagaaggtggacggcagacagagatttggatcaactgcagcaatccatagggagcaatgcggatgactctgaagtcattgaaattgttgggaaaaatccatttctgtggcctgaccactggccagtcaaagactatgccaaaatctttgattgccttgtcttagttcctgagatagaaaccgaagtggttaatgtgatatccaagattagagaggcaggccaaagagcaagacatgaagctgggagttctcatagtaagcagaggagagatagctcaacgaatccgcctgtaccgtatgttgctgttcacatgaggatagaaaaagattggatgatacattgcaagaagtgggagcaacggtccaagtcgcatgaaatctgcagtagtaaagaagagatcattcataaggtctcacagatcactgatctacatcggccggttgttgtttatcttgcggtagctgacagccttcttgaagatgattcaataaccagtgggtggagagtgggtatggttgcttacgagaagaagaagcttggtgttactgacgtctacgatcggcagccatatcttataaagtctgccatcgactttgaggtgtgctcaagagcagatgtgtttgttggcaatagcttctcaacattctccaacctcgtagtgctgtccagaacagaaaggctgtataacctaggaaaggcgagctcatgtggcgagaacatcgggctttcatcgtatgcatacaatgtcatgggcggcgatggtggaccgcagagatggatgacggatatgtcggatggaagcctgcagaggttaagttacggaacaaataacgtctcatgccactgactttgacgcatagcacttgcctgaacatgatgtatacgtgaggaagtccctgtccgatttcatttagggcttgttcgtttgtgtcggattgcacccggaatcgttccaactaatcaaagtttatataaattagagaaacaatccggttaggaatcgttccgacccatcaatccgacagaaacgaacaaggccttatcgacaaaggaaacaagtacgtgcagctaatttgctgtgcctctgtgtttgaagcacttgtgaaagactatggccaggagttgtctgttgatagttgtgcttaaaagccttgacagtgttgggcagtttgtagtttgtataaagctgaatgctgtgcgatggcttttacctgggacccctttgtttttatcgtttcagaatcagaccttaaacacattcatgtgaagtgtatttgttcacttgcagcgtgtgtgttttaagatggttctgagtttttttttgcccgcaatgcagtaacctccttgcaaaaaggaccagatgcttgctatttctctgagattgaaagggagtgagaaataggtgctggtggaaagataatttggtgattttgttttttcttctttcatcatattgtaatataacattttaatgaggatctctgatgattagcctgtgtagtggtgtcttattgagtcatcgggtcctgagtttaaagcagtcttttcgtatttacggggtgaagacaatgcagtgaagacttgctttggtttactgtaactaaatttctattcaccggttcaaatgtaaatgcagaagccatcttaccctgtttaatcctttttgaagtgtgtctggaaggtacagaa

SEQ ID NO: 5370 - DNA, 2547 bp, Zea Mays
gccgcgcctccatcggtccactcagcttcagcgcaaggaaaccgaccggtctcggtgcaccccacgggctctggaacaggcccagtcgagccttttgtatcgagcatgtactaaattggtcatggagaaatatcaacaagtatgccgacattagctcttgaaagatcccaacttaccaacattggtcagggtaaatttgtcaagttatcaattgatgtgtgcttggttattgatttccattagattgcagcatagcttgctcttcatctgaaagttttcgagggtaagtgtttatcatgcaccatggttgttggtaatgacatagtttacatggttgggtgctaaaaggacgagaagagtttgaataatcggtccgatgaacattctacttgagcttaagcacctcaagccctttagcatccctgcaaggcttgtcatctgtaaaggccttctgatagtgattgcccttattttgttgagagcaattgtgtctccttttcttgctatagattcatctgagaagaaagagttttacgagtcaacagcccctgacttgcttcctagaattagacgtgacaagtttcttgaggtcccacagatcatatgggggttgaacaatcaaaagattgcattcgccagagcatgcttgactgcaagattcctgaacagatcccttctcatgccaagcttgagtgcttctctcttctacaaagaggttgacttgcttcagcctatcaattttgacaaagtgtttgactttaacaagttcaatgcgcgttgccatggcttcgtaaggttagctcagtattcagaagtttcaaatcgaaccgagcctttcaaactccaaaaggggactggtagaaggtggacggcagacagagatttggatcaactgcagcaatccatagggagcaatgcggatgactctgaagtcattgaaattgttgggaaaaatccatttctgtggcctgaccactggccagtcaaagactatgccaaaatctttgattgccttgtcttagttcctgagatagaaaccgaagtggttaatgtgatatccaagattagagaggcaggccaaagagcaagacatgaagctgggagttctcatagtaagcagaggagagatagctcaacgaatccgcctgtaccgtatgttgctgttcacatgaggatagaaaaagattggatgatacattgcaagaagtgggagcaacggtccaagtcgcatgaaatctgcagtagtaaagaagagatcattcataaggtctcacagatcactgatctacatcggccggttgttgtttatcttgcggtagctgacagccttcttgaagatgattcaataaccagtgggtggagagtgggtatggttgcttacgagaagaagaagcttggtgttactgacgtctacgatcggcagccatatcttataaagtctgccatcgactttgaggtgtgctcaagagcagatgtgtttgttggcaatagcttctcaacattctccaacctcgtagtgctgtccagaacagaaaggctgtataacctaggaaaggcgagctcatgtggcgagaacatcgggctttcatcgtatgcatacaatgtcatgggcggcgatggtggaccgcagagatggatgacggatatgtcggatggaagcctgcagaggttaagttacggaacaaataacgtctcatgccactgactttgacgcatagcacttgcctgaacatgatgtatacgtgaggaagtccctgtccgatttcatttagggcttgttcgtttgtgtcggattgcacccggaatcgttccaactaatcaaagtttatataaattagagaaacaatccggttaggaatcgttccgacccatcaatccgacagaaacgaacaaggccttatcgacaaaggaaacaagtacgtgcagctaatttgctgtgcctctgtgtttgaagcacttgtgaaagactatggccaggagttgtctgttgatagttgtgcttaaaagccttgacagtgttgggcagtttgtagtttgtataaagctgaatgctgtgcgatggcttttacctgggacccctttgtttttatcgtttcagaatcagaccttaaacacattcatgtgaagtgtatttgttcacttgcagcgtgtgtgttttaagatggttctgagtttttttttgcccgcaatgcagtaacctccttgcaaaaaggaccagatgcttgctatttctctgagattgaaagggagtgagaaataggtgctggtggaaagataatttggtgattttgttttttcttctttcatcatattgtaatataacattttaatgaggatctctgatgattagcctgtgtagtggtgtcttattgagtcatcgggtcctgagtttaaagcagtcttttcgtatttacggggtgaagacaatgcagtgaagacttgctttggtttactgtaactaaatttctattcaccggttcaaatgtaaatgcagaagccatcttaccctgtttaatcctttttgaagtgtgtctggaaggtacagaa

SEQ ID NO: 5371 - DNA, 376 bp, Zea Mays
cgcgcctccatcggtccactcagtaacctccttgcaaaaaggaccagatgcttgctatttctctgagattgaaagggagtgagaaataggtgctggtggaaagataatttggtgattttgttttttcttctttcatcatattgtaatataacattttaatgaggatctctgatgattagcctgtgtagtggtgtcttattgagtcatcgggtcctgagtttaaagcagtcttttcgtatttacggggtgaagacaatgcagtgaagacttgctttggtttactgtaactaaatttctattcaccggttcaaatgtaaatgcagaagccatcttaccctgtttaatcctttttgaagtgtgtctggaaggtacagaa

SEQ ID NO: 5372 - DNA, 2530 bp, Zea Mays
ggaagtgctcagtattgatgtaggattgaagcaatccaaggaagattgccagagatttgctgctttattaatgccttttgtatcgagcatgtactaaattggtcatggagaaatatcaacaagtatgccgacattagctcttgaaagatcccaacttaccaacattggtcagggtaaatttgtcaagttatcaattgatgtgtgcttggttattgatttccattagattgcagcatagcttgctcttcatctgaaagttttcgagggtaagtgtttatcatgcaccatggttgttggtaatgacatagtttacatggttgggtgctaaaaggacgagaagagtttgaataatcggtccgatgaacattctacttgagcttaagcacctcaagccctttagcatccctgcaaggcttgtcatctgtaaaggccttctgatagtgattgcccttattttgttgagagcaattgtgtctccttttcttgctatagattcatctgagaagaaagagttttacgagtcaacagcccctgacttgcttcctagaattagacgtgacaagtttcttgaggtcccacagatcatatgggggttgaacaatcaaaagattgcattcgccagagcatgcttgactgcaagattcctgaacagatcccttctcatgccaagcttgagtgcttctctcttctacaaagaggttgacttgcttcagcctatcaattttgacaaagtgtttgactttaacaagttcaatgcgcgttgccatggcttcgtaaggttagctcagtattcagaagtttcaaatcgaaccgagcctttcaaactccaaaaggggactggtagaaggtggacggcagacagagatttggatcaactgcagcaatccatagggagcaatgcggatgactctgaagtcattgaaattgttgggaaaaatccatttctgtggcctgaccactggccagtcaaagactatgccaaaatctttgattgccttgtcttagttcctgagatagaaaccgaagtggttaatgtgatatccaagattagagaggcaggccaaagagcaagacatgaagctgggagttctcatagtaagcagaggagagatagctcaacgaatccgcctgtaccgtatgttgctgttcacatgaggatagaaaaagattggatgatacattgcaagaagtgggagcaacggtccaagtcgcatgaaatctgcagtagtaaagaagagatcattcataaggtctcacagatcactgatctacatcggccggttgttgtttatcttgcggtagctgacagccttcttgaagatgattcaataaccagtgggtggagagtgggtatggttgcttacgagaagaagaagcttggtgttactgacgtctacgatcggcagccatatcttataaagtctgccatcgactttgaggtgtgctcaagagcagatgtgtttgttggcaatagcttctcaacattctccaacctcgtagtgctgtccagaacagaaaggctgtataacctaggaaaggcgagctcatgtggcgagaacatcgggctttcatcgtatgcatacaatgtcatgggcggcgatggtggaccgcagagatggatgacggatatgtcggatggaagcctgcagaggttaagttacggaacaaataacgtctcatgccactgactttgacgcatagcacttgcctgaacatgatgtatacgtgaggaagtccctgtccgatttcatttagggcttgttcgtttgtgtcggattgcacccggaatcgttccaactaatcaaagtttatataaattagagaaacaatccggttaggaatcgttccgacccatcaatccgacagaaacgaacaaggccttatcgacaaaggaaacaagtacgtgcagctaatttgctgtgcctctgtgtttgaagcacttgtgaaagactatggccaggagttgtctgttgatagttgtgcttaaaagccttgacagtgttgggcagtttgtagtttgtataaagctgaatgctgtgcgatggcttttacctgggacccctttgtttttatcgtttcagaatcagaccttaaacacattcatgtgaagtgtatttgttcacttgcagcgtgtgtgttttaagatggttctgagtttttttttgcccgcaatgcagtaacctccttgcaaaaaggaccagatgcttgctatttctctgagattgaaagggagtgagaaataggtgctggtggaaagataatttggtgattttgttttttcttctttcatcatattgtaatataacattttaatgaggatctctgatgattagcctgtgtagtggtgtcttattgagtcatcgggtcctgagtttaaagcagtcttttcgtatttacggggtgaagacaatgcagtgaagacttgctttggtttactgtaactaaatttctattcaccggttcaaatgtaaatgcagaagccatcttaccctgtttaatcctttttgaagtgtgtctggaaggtacagaa

SEQ ID NO: 5373 - DNA, 1616 bp, Zea Mays
cagaacagagctcaggcctcagagagacaccgcttcagcagcagaagaaggctactggctacaacaagtcaacaagactgcagtggcagtagcgatgatggtgaaggaagaggagatgatggcagaggcaggaggaggacgaggctacatggacctgcttggcctcggcgaagaggactacctgctgtgcctgtcccctccctcctacttcactcccagtgtcgtctccgccacggccaccaccactgccgccgcgtcggcatcaacctgctgcgcggcctcctacctggacctggacctggctcccgcttaccaccacacgctgagcttcggtggccaggaccaggagcagcagcaccacggagacgacggcgccttgggcttccagcactacggcggcgatcacgcgatcccggcggcggcggcggctgttcagcagaagtccagcccgaccaccgagtgctcctcctccctctcgtccatgtcgccctcgccgcccgcgacagccgtctccgccgccgtctcctgccccaagccacaggctttcaagaagaagaaggcggggtcaaggagcagtgcgtctgccgccgctccagctgctacgaacaagaggcccagggtgaggagggagaggctcggggagaggatcgtagctctgcagcagctggtctctccgttcggaaagtctgatacggcttccgttctgcacgaggcgctggggtacatacgcttcctgcacgaccaggttcaggtcctgagcacgccgtacatgcagatgcagcgccagccggcctcggcgcacgtcccggagagcgcggcggggacggtggtggaggcgcaggagcagcccgacctgaggagccgaggcctgtgcctggtgcccgtctcctgcacggagcacatcgccggcaacgacagccacggcaacggcgccgacctctggtcgtccgtgctgctgccgctgccgctgccaggtggtggtagtcacccgagccaagggcgcttggcctagctgcccgcggacacgcttgctttacggattatgcttatgccagggtttagggctttcagtaggcgcttttggggctactaatctatccattcccggccgtactccgtctgtctaaaagtaaacttttggggagccgggtgctgctgctgctgcttttggtgggaaaaaaaaggcgcagggatccatattgcaagtggttgtggacgaggcgcagggtagaacagaagaagacagtggtctgaggatgccgagatctttgggcacgcacgaacgtgaatgtccctgtgctgtcaccgcctcccggcagcggcaggcattgaatgaaggctacctcctccgccgatgttgcctgctcgggagtcgtgcggcgacagctccggtatccgattttctctctgcttgtcgctcctactccttggaagttggaactctgcacaaaccactgcaatctcatgcagtgcccccttttttccaccccgaagctcatgacgacgcacatcggagacgacaactagtcggagacttgtgtactgtgacagtgcggtgttcatctgatgatacgacagtactaggggtcggcttccataactttagtggttcagaa

SEQ ID NO: 5374 - DNA, 1661 bp, Zea Mays
tgcactagctcaagcagcctatgccacatttgcactcaagcaagtgagcagctcgcccgccctccagcaacatggagacggccaacgttgtcatcctctcgttcttcttcatctttgcaatccaccgcctcttcaaccgcctccatagcaggagcacgaagatgaagccgctgccaccgggccctctagccataccggtcctcggccacctatacctcctcctcgagaagaatatgcaccacttgttcacgcgcctcgccgcgcgctacgggcccgtgctctacctccgcctcggctcgcgtaacgccgtggtcgtgtcctctgtggactgcgccagggagtgcttcacggagcacgacgtgaccttcgcgaaccgcccgaccttccccacgctgcatctcatgacctacgggggcaccacggtcggcacctgcgcctacggcccgtactggcgccacatccgccgcgtcatcacggtgcacctcctgtccgctctccgggtgaggtccatggtccccgccatcgaagcagaggtgcgcgccatggcgcggagcatgtaccgtgcggccgcggccgctccatgcggcaccggcgccgccaaggtggagctgagggggaggctgttcgaggtcgcgctcagcgccctcatggaaaccgtcgcgcagagcaagacatcccgctcttccatgggcggtgccgcggacacgggcatgtcaccggaggcccaagagttcaaggagtccatggacgttatgattccgctcctcggcacggccaacatgtgggacttcctgcccgtgctacagaggttcgacgtgttcggcgtgaagaacaagatggcggccgcggtgagcggcagggacgcgttcttccggcggctcattgacgaggagcggcggaggctggacgacggcgtcgagagcgagaacaaaagtatgatggctgtgctgctcactctgcagaagtcagaaccggagaattacagtgatgacatgatcatgtctctgtgcttctccatgttctctgcgggaacggaaaccactgcgaccacggcggaatgggcgatgtcgctgctcctgaacaaccccgaggtcctgaagaaggcgcagggggaaatcgacgcgcatgtggggaattcccgcctgctaggcgccgacgacatgccgcacctcccctacctccagtgcgtccccaaagttgacatgaccgaagcgtccgggctcactctcccgagggccgttcccctcgaggccatgtgcaaaccgcgccaagccatgcttgatgtccttcagaacctgtgagtgcccttgcggaccgaagaagttgatgagcatcattatcaaatgttgccacgttgttgccttgctatcgttatacgtagggcaatgtttaatccctacaagatctctctctccccccaataaacatgttcgtgcgttgtaatacaacatatcacttgtattgtcggttgtaatatgattcagagtgaaattctatatgtcactggatctgaacaatatctagttcatcatagactaaggaaaatactttgaaggttcctggttgaactctattagtagtaatagaaattttgcctgtttctggtctccaaccaaagggagatccggtggtctgcttgttggttttgatgctgttgtttt

SEQ ID NO: 5375 - DNA, 2023 bp, Zea Mays
ccactcaagcaagcgagcaagcttaagccccacctcctagcaacatggagacggcctacgttgtcgttctgtcgttcttcttcatcgttgctatccaccgccttctcaaccgcggcgaaagcaagaatatgagcaagcagccgctgccaccgggccctcgcgccatcccggttctcggccacttacacctcctcgagaagccgtaccacctggcgtttatgcgcctcgccgcgcgctacgggcctgtgttctccctccagctgggctcgcgcgccgccgtggtcgtgtccaccgcggactgcgccagggagtgcctcgcagagcacgacgcgacgttcgcgaaccggccgacctaccccacgctgcacctgatgacctacggcggcgccacgatcggccacagcgcctacggcgcgcactggcgccacgtccgccgcgtcgtatcgttgcacctcctgtccccgcaacgcgtgctgtcctccatggtccccaccatcaccgcggaggtgcgcgccatggcgcggaggatgtaccgcgccgccgcgggcggtgccgcgaggatcgagctcaaggggaggctgctcgagctctccctcagcaccctgatggagaccatcgcgcagaccaagacgtaccgtcccgcggacgacgcggacacggacatgtcgccggagacccaggagttcaagcagctgttggacgctatcatctcgcttctcgggctgaccaacgtgttggaattcctgccggtgctacagacgttcgacgttttgggactgaagaagaagatcgcggcggcggcgggcagaagggacgcgttcttccagcggctcattgacgcggagcggcgcaggctggacgacggcgtggagggccagaagaagagcatgctggccgtcctgctcgctctgcagaagtcggaaccggagaattacacggacgagaagatcatggctctatgcttctccatgttcattgccggaacggactccacggcgacggcgatggaatgggccatgtcgctgctgctgaaccaccccgaggtcttgaagaaagcgcgggaggaaatcgacgcgcacgtgggcagctcccggctgctgggagcggacgacgtgccgagcctcggctacctccactgcgtcctcaacgagacgctccggctgtacccggtggggccgacgctgatcccgcacgagtccacggcggactgcacggtcggcggctaccgcgtgccgagcggcacgatgctgctcgtcaacgtgtacgccatccacagggacccggcgacgtggccggaccctgacgtcttccggcccgagcggttcgaggacggcggcggcagcgccgaagggaggctcctgataccgttcgggatggggcggcgcaagtgccccggagagaccatggcgctgcagatcatggggctggccctggggaccatgatccagtgcttcgactggggcgcggtcggaggcggaggcgctcccaaagttgacatgacccaaggcggcgggctcactctcccgcgggccgttccgctggaggccatgtgcaaaccgcgccaagtcatgcttgatgtcctccagaagctgtgacacaatctacgatatgatgaccgaatatatcacatgcatataattttccaatgcaagcgtgacttggggcatcacgattcacgcgacacgcgcggcacggaagcaaggaccaaaattattatatcgtcatgatctggtggaaaactgtggccgttcacgctgcacgttgacacgcaactcgacttctcggcgacttgccggtggtcggcccagtggcgaagttagagcaataacgtcgaagaaaaaaaaacagggtgagaaagaagacggagtagtattacgtaatggatgtgtatataagataaaaattacttattattcatatattttatgagtacaagtacaatataatattataaataacaacagtaatgatttatatttgagtactagtggtaacaactaacaagttcgaatatatcagtatt

SEQ ID NO: 5376 - DNA, 2015 bp, Zea Mays
ctttttctcgctttctgaggttttagctcacgagcattgggccttacgatttctcatcaaacctatgttggcccaatcagttcaccaggcttaaagcccatatgcttctgccttcactgatggcccacgttatcacttcggcgagttcactccacgataacggaccggatcgcacttgacgatcaaatcgaatcgcacctattcctctctttggcggtagccgcgtagcgcccgctcagtcgccgccgaccacggcggagaaattgcggcttcacctcgcctgtgtgtcctgattacgcgaggactcgagcggctaagcttagcagcgatctcggtctcagcgaggtcggtgggtgccggaagagaaatgggtggcttccacttccaccacacctggttcaaggcacgcaaggtgtttgtaagaatgcttagcaatggaggcggtgccagcatggcctgtgatatctcggtggacgcctcggacctctccaagcgcctctgcaagctcatcatctcctgccggaaggcatccgccctcgagcacgagctcgaccatagcggcgtccgcgttacgccggagatcgcggagagcgtcctcaagcacctcgacaacgctggtatgctcgcgtaccgcttcttcgagtgggcgcgcaagcagaagcgtggggtgtgtgctcataccgtgcgttcctaccacacggtggttacgtccctagccaagatcaggcagtaccaactcatgtgggacgtcgtggccatcatgcgcaaggagggtgtggccaatgttgagacgttcgggatcatcatgcgcaaatatgccagggcacagaagttggatgaggcagtttacacgttcaacgtcatggagaaatatggtgttgcccacaacctcgctgccttcaacagcttgctcagtgcactatgcaaatctaagaacgtgcgcaaggcgcaggagatctttgataagatgaataatcggttcagtcctgatgccaagacctatagtatcttgcttgagggttgggggagagcgcccagcctcccaaagatgcgagaggtttacagtgatatgcttgccgctggttgccagcctgacattgtcacatatggtatcatggtcgatgcactctgcaagacaggccgagttgaagaggctgtctgtgtcgtgcaggacatgagctctaggggatgccaaccgacaaccttcatatacagcatcttagtgcatacttatggagttgatatgaggattgaggatgctgttgcagcatttttggatatggagaaggatgggattatgcctgatgttgttgtgtacaatgcgctcatcactgccttctgcaaagtgaagaagtttgagaatgccttcagagtcatggatgacatgcaaggccatggaatctccccaaattcaaggacctggaacatcatcctaaatactctgattagccttggaaaggatgatgaggcatatagggtcttccgcagcatgattaagcgctgcaaaccagactctgatacttacaccatgatgataaagatgttctgtgagaatgataagatagagatggcactgaaggtatggaagtatatgcgattgaagcagttcttgccgagcatgcacacattctctgtgctgatcaatggtctctgtgacaagggtgaagttagccaagcttgtgtcctgcttgaagatatgatcgagaagggcattagacctcctggttcaacttttggcaagctgaggcagctacttttaaaagaagggaggaaggatgtgcttgactttcttgtcgagaaaatgaagatcctcgctcaagaacctttgtttgattgacccttcacttctccattggtatgaatgcttactcctgtcatctatatggatacacgtggttaatatgggatgggtagatgctcaaaatatctgctcttatttcttcattctttaatttggagtattattctatatctgagtttctgttgctgatatactcttcatggttcatgtgcca

SEQ ID NO: 5377 - DNA, 1693 bp, Zea Mays
atcaaatcgaatcgcacctattcctctctttggcggtagccgcgtagcgcccgctcagtcgccgccgaccacggcggagaaattgcggcttcacctcgcctgtgtgtcctgattacgcgaggactcgagcggctaagcttagcagcgatctcggtctcagcgaggtcggtgggtgccggaagagaaatgggtggcttccacttccaccacacctggttcaaggcacgcaaggtgtttgtaagaatgcttagcaatggaggcggtgccagcatggcctgtgatatctcggtggacgcctcggacctctccaagcgcctctgcaagctcatcatctcctgccggaaggcatccgccctcgagcacgagctcgaccatagcggcgtccgcgttacgccggagatcgcggagagcgtcctcaagcacctcgacaacgctggtatgctcgcgtaccgcttcttcgagtgggcgcgcaagcagaagcgtggggtgtgtgctcataccgtgcgttcctaccacacggtggttacgtccctagccaagatcaggcagtaccaactcatgtgggacgtcgtggccatcatgcgcaaggagggtgtggccaatgttgagacgttcgggatcatcatgcgcaaatatgccagggcacagaagttggatgaggcagtttacacgttcaacgtcatggagaaatatggtgttgcccacaacctcgctgccttcaacagcttgctcagtgcactatgcaaatctaagaacgtgcgcaaggcgcaggagatctttgataagatgaataatcggttcagtcctgatgccaagacctatagtatcttgcttgagggttgggggagagcgcccagcctcccaaagatgcgagaggtttacagtgatatgcttgccgctggttgccagcctgacattgtcacatatggtatcatggtcgatgcactctgcaagacaggccgagttgaagaggctgtctgtgtcgtgcaggacatgagctctaggggatgccaaccgacaaccttcatatacagcatcttagtgcatacttatggagttgatatgaggattgaggatgctgttgcagcatttttggatatggagaaggatgggattatgcctgatgttgttgtgtacaatgcgctcatcactgccttctgcaaagtgaagaagtttgagaatgccttcagagtcatggatgacatgcaaggccatggaatctccccaaattcaaggacctggaacatcatcctaaatactctgattagccttggaaaggatgatgaggcatatagggtcttccgcagcatgattaagcgctgcaaaccagactctgatacttacaccatgatgataaagatgttctgtgagaatgataagatagagatggcactgaagggtgaagttagccaagcttgtgtcctgcttgaagatatgatcgagaagggcattagacctcctggttcaacttttggcaagctgaggcagctacttttaaaagaagggaggaaggatgtgcttgactttcttgtcgagaaaatgaagatcctcgctcaagaacctttgtttgattgacccttcacttctccattgctgctgagaatatcagttatcatttaggctttatgaataaatgttcccagttaaggattgctttggtgacccaggatcatagaaggattggaggggattg

SEQ ID NO: 5378 - DNA, 782 bp, Zea Mays
cgcgcatcggcggcggcgtggcggctctttcctcctctcgcgtgacgcgggcgcgcggccggccggcgagcgccgacctcgcggggaagagcgcctacgaggtcctcagggttggggagactagttccagcgtcgagatcaaggcctccttccatctcctagccaaagatacccacccagacgtcgccgcgactgcttgttcttgacggttccttcagatcatcaccgcattctaccagattcacagtgaagagctacgatggcgacctgctgcgatcgcagaggcgtgttgtgcagaaacaccccagttcatctcagttggtatacccaagtgattcaggctcaggcattgtggcttaccattgacgacatagctaccaagagggttgccactggctctggttattttgataggctcaaaagcgaactgttcacagcaatccatgctccatactatggaactgatgtcgactccatggatgtccttcctgattgctttgaagctgaggagagatcttctgaatttactccaaatgtttctataaatgtgaataaggattcaatatctatgaatcctgttgatatgaacatgcaagagatgcggtatgaaaatgatattcctgcaaaagatgcaaaatgccttcaaggacatttagttgcggatatttgggaaattagttgttactgtgactaggagccccaaatgtgattgcattaacaattcggatgcaaaagatcacattcacttgtttcttgttccaaacacatatctattttatttg

SEQ ID NO: 5379 - DNA, 754 bp, Zea Mays
agagcgcctacgaggtcctcagggttggggagactagttccagcgtcgagatcaaggcctccttccatctcctagccaaagatacccacccagacgtcgccgcgactgcttgttcttgacggttccttcagatcatcaccgcgcttttgtacgacagattctaccagattcacagtgaagagctacgatggcgacctgctgcgatcgcagaggcgtgttgtgcagaaacaccccagttcatctcagttggtatacccaagtgattcaggctcaggcattgtggtacctcgagagagcaatatcgttgaatggttgaaatggtacaggcttaccattgacgacatagctaccaagagggttgccactggctctggttattttgataggctcaaaagcgaactgttcacagcaatccatgctccatactatggaactgatgtcgactccatggatgtccttcctgattgctttgaagctgaggagagatcttctgaatttactccaaatgtttctataaatgtgaataaggattcaatatctatgaatcctgttgatatgaacatgcaagagatgcggtatgaaaatgatattcctgcaaaagatgcaaaatgccttcaaggacatttagttgcggatatttgggaaattagttgttactgtgactaggagccccaaatgtgattgcattaacaattcggatgcaaaagatcacattcacttgtttcttgttccaaacacatatctattttatttg

SEQ ID NO: 5380 - DNA, 3473 bp, Zea Mays
agggatagtatcatatcattataatctttactacttattaagacagcaaggggtaggttgccattcctggttctgccattccctgttctgccgcttccattcccgctcccgcatagcctattcccattcccgcttgcccagcacacgcacacacctccctgacccggctgcgaatgtcgtcgcacgaggccgcgccaccgctccgtcccggctccgagccgccgcgccacccctcgccacctccccgagtcccacagccgcgacgcgcgtgtccccgtcgtgccaccactgcctccccatcgctgcctccccgaacccccgcagccacgacgcatgccgtcgtcatcgaacgaggccgaagccccaccacaccaccactccctccccctcgccgcctccccgaccggtcgcatccctgcagctcagaggctaccggtagacggagagaaccctgctcccttgcctaggattcccaaaaccctagcctcgacccgtatacacgaggacccccgacaatgaggaggctgctgcgacagctgcgccacgttcatggtcgacaaggtcatcgcgctcaccgcctcgagcacccccgacgacgaggaggctgctgcgacggccgcgccacgttcctggtcggcaaggtcatcgccctctaatacctcatgcgccattgttgcatcgtctatcccaaggttatctcagaggaccagccaagaacaaaaggagttgaacagatggaaaaaccatttcacaggattgaaagcatgttctttaccaaaacttgatttgagcacacacaaaataaataatgctaactaaactaaactcatttgccccgcatagtttcagttatacagaatacaactaagatcctataatataatccagttacagaggaggcaaaaagcagttttgtgttaacatttatgttgcttttaccactagcctactatactcgctcccaaaaagggaagcgtattttatagagcgaaaagccaaaccttacagactttgttcaacaattaatcaaattatataggagtttaggacatgtagaagcctcgagcaatgtctctgcccggtgcccagatagcaaaatgattgtggtgtttactgagacaccataggccagtaaaaaaatcgctggtgcatgaggatttgcaccactgcaataggttggtatgccgcacagccacaaccacacaggcatacagtcaagactatggttgttccaattataatcaagataaagtgaaaatgcagcatgttcctaatgcactgtatttgtcccattagcccaacaatatgtcacgtcccctctgaactatgaaggctatggtttaccagctgaatgttctgattagcttaaccgttgtagcatggagacttgcaaacataattagggacactattcttcgagtgcctctgttaattacagtgaggaattccctattgttttttctcagatgttttgtcgatactcgggattgagttgtgtgcctaggattccatgttttttgatttgagctttacttcccagttatacttctcattctttgggttttgtacctaatgacctgtatcgaaacatctatggttactaaattgttcttaatcagatcaggtataaacttgtcatcgtggctggggacaaaacgggtgaaactgagtttgttatgtttggccggataacacagcatgtcagcatctcgtgcggaaaacggctgcagtggtgtatgccctgtcaatagaatcagcggtgtattccctacaaaatctgacaatagcatcgacggtgtatgccctatcaccggcaaggatcatggtagcaacctcaaggaaagtcgtgatcatggtgaagaaaagggcaagggtccttgtgtggtaccagcaaaatgcccatttggttatgactccaacacttccaagctaggtctgcttagcttcactgtctgccagacactgctccatgaaagtagaaaatcgcatgtatatcatgctttaaagacagtccactatgtggtgccgatatagaattcaagctcttgttcaccgattcattgatggtcatgccagaatcaagcgatcacatgctacaggggatgtggaagcagcaggatttttgtgtctaaaacattggaagtgcaaagtcaaggctcactatgtatgtagacgatatcaaggagttaaaatgttcagaagatagacctatgttcacaacttggagctgtgttaggaatgcttggggattgttggacacatttatttggcatgaggcaaacataccatatgcagtatgggaagttaccagcactcacgataattaacatactatccttcagtgctatgctcgagttaccctgtggacctaacagatcctgagtatgatcacaagtctatatttgggaggacacattctgttgtggcattcttgccaaatttaaaagctggtaaaaagaagagcttgctaggagattcaaaagagcctgaagaccaagcaccacataaggtactggctttcagggacataaacactcaagctccaacacacatcctcatcatccccaaagtcaaggatggactaactggtctgtcaaaggtctacgacggatccatcctgctggacaatcgctcaagcatcgtgtcagagatgttcgccacacccaacaacaactcgatgtgcgggtaccccgtagtcgatgccgtcaaggcggtgctggaggaggtttgcctaggcatcgtctcatacgttgacatactggagctgagaaagggacaaaacaaagaacgaacttcaaatcaaagctaaagaagcggatattcaaaatcttaaaaagccaccacgtggccgctcctcatcctggtgctcctcaactgcatcaagagggcatcttggggaagaagcatggtgccaccaagagcgttgtcgttcggatgtttcgcgttgttgaccagtgtgtagaggatctcaagctatcagacacagttaatgcttaatccttagagctgcatataaccaagtggtgcttacctggatttgaggacctatgatgcttgtttatctcaagagtaatgtaggccagcgagtgctcgggcagatagaagagagagagagagagagagaggagatgcagcggctcacggggcgggacatgtgggacgtggaggagtgccagagcccgcgcatgggcagcgtcatcctcggcgtcggcggcaccagcaacaccgtctgcgtctgcatccccgccgccatgcccttcaacgaccccctccccgtcctctcccgcaccgtcgccggctactccaaccacaactccgtcggagggacatatttccaagccatgtcaagctgttcgtggagaacgacgcggtggcggcgctggccagtggaaccatgggcaagctgcacggatgtgtgctgatcgcagggacagggaccatagcgtatgggttcaccagtgatggtagggaag

SEQ ID NO: 5381 - DNA, 5398 bp, Zea Mays
agggatagtatcatatcattataatctttactacttattaagacagcaaggggtaggttgccattcctggttctgccattccctgttctgccgcttccattcccgctcccgcatagcctattcccattcccgcttgcccagcacacgcacacacctccctgacccggctgcgaatgtcgtcgcacgaggccgcgccaccgctccgtcccggctccgagccgccgcgccacccctcgccacctccccgagtcccacagccgcgacgcgcgtgtccccgtcgtgccaccactgcctccccatcgctgcctccccgaacccccgcagccacgacgcatgccgtcgtcatcgaacgaggccgaagccccaccacaccaccactccctccccctcgccgcctccccgaccggtcgcatccctgcagctcagaggctaccggtagacggagagaaccctgctcccttgcctaggattcccaaaaccctagcctcgacccgtatacacgaggacccccgacaatgaggaggctgctgcgacagctgcgccacgttcatggtcgacaaggtcatcgcgctcaccgcctcgagcacccccgacgacgaggaggctgctgcgacggccgcgccacgttcctggtcggcaaggtcatcgccctctaatacctcatgcgccattgttgcatcgtctatcccaaggttatctcagaggaccagccaagaacaaaaggagttgaacagatggaaaaaccatttcacaggattgaaagcatgttctttaccaaaacttgatttgagcacacacaaaataaataatgctaactaaactaaactcatttgccccgcatagtttcagttatacagaatacaactaagatcctataatataatccagttacagaggaggcaaaaagcagttttgtgttaacatttatgttgcttttaccactagcctactatactcgctcccaaaaagggaagcgtattttatagagcgaaaagccaaaccttacagactttgttcaacaattaatcaaattatataggagtttaggacatgtagaagcctcgagcaatgtctctgcccggtgcccagatagcaaaatgattgtggtgtttactgagacaccataggccagtaaaaaaatcgctggtgcatgaggatttgcaccactgcaataggttggtatgccgcacagccacaaccacacaggcatacagtcaagactatggttgttccaattataatcaagataaagtgaaaatgcagcatgttcctaatgcactgtatttgtcccattagcccaacaatatgtcacgtcccctctgaactatgaaggctatggtttaccagctgaatgttctgattagcttaaccgttgtagcatggagacttgcaaacataattagggacactattcttcgagtgcctctgttaattacagtgaggaattccctattgttttttctcagatgttttgtcgatactcgggattgagttgtgtgcctaggattccatgttttttgatttgagctttacttcccagttatacttctcattctttgggttttgtacctaatgacctgtatcgaaacatctatggttactaaattgttcttaatcagatcaggtataaacttgtcatcgtggctggggacaaaacgggtgaaactgagtttgttatgtttggccggataacacagcatgtcagcatctcgtgcggaaaacggctgcagtggtgtatgccctgtcaatagaatcagcggtgtattccctacaaaatctgacaatagcatcgacggtgtatgccctatcaccggcaaggatcatggtagcaacctcaaggaaagtcgtgatcatggtgaagaaaagggcaagggtccttgtgtggtaccagcaaaatgcccatttggttatgactccaacacttccaagctaggtctgcttagcttcactgtctgccagacactgctccatgaaagtagaaaatcgcatgtatatcatgctttaaagacagtccactatgtggtgccgatatagaattcaagctcttgttcaccgattcattgatggtcatgccagaatcaagcgatcacatgctacaggggatgtggaagcagcaggatttttgtgtctaaaacattggaagtgcaaagtcaaggctcactatgtatgtagacgatatcaaggagttaaaatgttcagaagatagacctatgttcacaacttggagctgtgttaggaatgcttggggattgttgggtgcaaatggttggataactacggacatgaacacatatagctacattgtttctcaaattagaatacagataggatttcagtaaatcagatcatggtatggttgcagttttgtagtacgggtaattttgttttgttttctctgatgctaaggtagttttaagatttactttgacctttcctttggttgatgtaatcttgaagctgtagtcgttagaggtaatcataggttttgttcataagaggacttgacttttcgtggatgtggaagcatttgtttgtttttgttcgaatgcaagagagatattttagggcctggcgatcaccttgttttggtgctctgcacaatcagcattccttttaccgtgtgaataaggatctcactttaggtgtgttaaactgggtttttgaattttgaataatttgttgatgatggaagagtggttgttcgatatgtttacgctagagtggaaatgtctatgaacatgaacaacaaaatggataatgcagagttcattattattttttggtcttcccttggttagtagtcgtttttgagttgctcaacaccaaatgcatggtggatatgctgttgcatgatatgtggatgtatttgttagtgggtgacaagttcaatgattttgctaatcaggacacatttatttggcatgaggcaaacataccatatgcagtatgggaagttaccagcactcacgataattaacatactatccttcagtgctatgctcgagttaccctgtggacctaacagatcctgagtatgatcacaagtctatatttgggaggacacattctgttgtggcattcttgccaaatttaaaagctggtaaaaagaagagcttgctaggagattcaaaagagcctgaagaccaagcaccacataaggttgttattttcatcctttgtcatcaagtatgtgaactactaacttgtggcattttcttttatcttccaagctaacaaatgattaacattttgtttaagaaatagaaaactaggtgattgactgagccttactgcttagaacttaagtctgtatcgttgtttgtttaatatttaggttgcttctaaaatggatgagcttgtactatttcatagtagaaaccatattatggcaatgaaaactgtaattaatcatatccccatattattttgttttctaagctttttaacttctatacaaaattattctatttaaatgggaacaagcaacctgctcttttgccaagtagccgctcttgtcattatcatgttacatgagtatagaatcaaagttagatttctaaatggcaactgtgttgagtgaactgagtgcttcattgaattatattgtttgatgctttgtgtgaatggctaaaccttcagcccaaatgcctaatgtatgattcttcttttgctatagattatgatattcacaatctatgaagtgcatcatgttttggttctaggtactggctttcagggacataaacactcaagctccaacacacatcctcatcatccccaaagtcaaggatggactaactggtctgtcaaaggaaaggatgacattaaaccacaagaatacatcacaatggccaaagcacatccttaagcgtggattgtctattcaagatgaaggcactcgagctgctattgcaacacaactccaacaaaatactcttgtttatttcttcatctaggtctacgacggatccatcctgctggacaatcgctcaagcatcgtgtcagagatgttcgccacacccaacaacaactcgatgtgcgggtaccccgtagtcgatgccgtcaaggcggtgctggaggaggtttgcctaggcatcgtctcatacgttgacatactggagctgagaaagggacaaaacaaagaacgaacttcaaatcaaagctaaagaagcggatattcaaaatcttaaaaagccaccacgtggccgctcctcatcctggtgctcctcaactgcatcaagagggcatcttggggaagaagcatggtgccaccaagagcgttgtcgttcggatgtttcgcgttgttgaccagtgtgtagaggatctcaagctatcagacacagttaatgcttaatccttagagctgcatataaccaagtggtgcttacctggatttgaggacctatgatgcttgtttatctcaagagtaatgtaggccagcgagtgctcgggcagatagaagagagagagagagagagagaggagatgcagcggctcacggggcgggacatgtgggacgtggaggagtgccagagcccgcgcatgggcagcgtcatcctcggcgtcggcggcaccagcaacaccgtctgcgtctgcatccccgccgccatgcccttcaacgaccccctccccgtcctctcccgcaccgtcgccggctactccaaccacaactccgtcggagaggacagggcaagggagacgctggagagggtgatgtcgcaggcgctgctcaaggcgcgccggcgacggtcaaatgtctgcgccgtctgcttggccgtagcaggcgtcaaccatccagtcgatcagcagagaatgctggactggctcagggacatatttccaagccatgtcaagctgttcgtggagaacgacgcggtggcggcgctggccagtggaaccatgggcaagctgcacggatgtgtgctgatcgcagggacagggaccatagcgtatgggttcaccagtgatggtagggaagctcgagcagcaggtgcagggccagttctgggtgactgggccagttaacgaagtggagcacctgaactagcagtcacgtctgcaatatacacaccagcaaaacactcctgtaacactaaacagttcatgcatatccttgactgaagacgatgttgcaaaggtttcagacatcagctttggcgttgacaagaaacaagatgacgagtacaatgctcctgatgagtacaacgcagtgtataaaattgctttgtactacaacgcagtgtataagtttgctttgtactgcttgagaccatctctggaaggcgttcatattttgacgatgatgtgctcctatattttcctttctgaataccaaattctttaatatgtcctcttgtgtggaatcaagttcctaatttagctagagcaatacttgaaa

SEQ ID NO: 5382 - DNA, 4031 bp, Zea Mays
agggatagtatcatatcattataatctttactacttattaagacagcaaggggtaggttgccattcctggttctgccattccctgttctgccgcttccattcccgctcccgcatagcctattcccattcccgcttgcccagcacacgcacacacctccctgacccggctgcgaatgtcgtcgcacgaggccgcgccaccgctccgtcccggctccgagccgccgcgccacccctcgccacctccccgagtcccacagccgcgacgcgcgtgtccccgtcgtgccaccactgcctccccatcgctgcctccccgaacccccgcagccacgacgcatgccgtcgtcatcgaacgaggccgaagccccaccacaccaccactccctccccctcgccgcctccccgaccggtcgcatccctgcagctcagaggctaccggtagacggagagaaccctgctcccttgcctaggattcccaaaaccctagcctcgacccgtatacacgaggacccccgacaatgaggaggctgctgcgacagctgcgccacgttcatggtcgacaaggtcatcgcgctcaccgcctcgagcacccccgacgacgaggaggctgctgcgacggccgcgccacgttcctggtcggcaaggtcatcgccctctaatacctcatgcgccattgttgcatcgtctatcccaaggttatctcagaggaccagccaagaacaaaaggagttgaacagatggaaaaaccatttcacaggattgaaagcatgttctttaccaaaacttgatttgagcacacacaaaataaataatgctaactaaactaaactcatttgccccgcatagtttcagttatacagaatacaactaagatcctataatataatccagttacagaggaggcaaaaagcagttttgtgttaacatttatgttgcttttaccactagcctactatactcgctcccaaaaagggaagcgtattttatagagcgaaaagccaaaccttacagactttgttcaacaattaatcaaattatataggagtttaggacatgtagaagcctcgagcaatgtctctgcccggtgcccagatagcaaaatgattgtggtgtttactgagacaccataggccagtaaaaaaatcgctggtgcatgaggatttgcaccactgcaataggttggtatgccgcacagccacaaccacacaggcatacagtcaagactatggttgttccaattataatcaagataaagtgaaaatgcagcatgttcctaatgcactgtatttgtcccattagcccaacaatatgtcacgtcccctctgaactatgaaggctatggtttaccagctgaatgttctgattagcttaaccgttgtagcatggagacttgcaaacataattagggacactattcttcgagtgcctctgttaattacagtgaggaattccctattgttttttctcagatgttttgtcgatactcgggattgagttgtgtgcctaggattccatgttttttgatttgagctttacttcccagttatacttctcattctttgggttttgtacctaatgacctgtatcgaaacatctatggttactaaattgttcttaatcagatcaggtataaacttgtcatcgtggctggggacaaaacgggtgaaactgagtttgttatgtttggccggataacacagcatgtcagcatctcgtgcggaaaacggctgcagtggtgtatgccctgtcaatagaatcagcggtgtattccctacaaaatctgacaatagcatcgacggtgtatgccctatcaccggcaaggatcatggtagcaacctcaaggaaagtcgtgatcatggtgaagaaaagggcaagggtccttgtgtggtaccagcaaaatgcccatttggttatgactccaacacttccaagctaggtctgcttagcttcactgtctgccagacactgctccatgaaagtagaaaatcgcatgtatatcatgctttaaagacagtccactatgtggtgccgatatagaattcaagctcttgttcaccgattcattgatggtcatgccagaatcaagcgatcacatgctacaggggatgtggaagcagcaggatttttgtgtctaaaacattggaagtgcaaagtcaaggctcactatgtatgtagacgatatcaaggagttaaaatgttcagaagatagacctatgttcacaacttggagctgtgttaggaatgcttggggattgttgctcgagttaccctgtggacctaacagatcctgagtatgatcacaagtctatatttgggaggacacattctgttgtggcattcttgccaaatttaaaagctggtaaaaagaagagcttgctaggagattcaaaagagcctgaagaccaagcaccacataaggttgttattttcatcctttgtcatcaagtactggctttcagggacataaacactcaagctccaacacacatcctcatcatccccaaagtcaaggatggactaactggtctgtcaaaggaaaggatgacattaaaccacaagaatacatcacaatggccaaagcacatccttaagcgtggattgtctattcaagatgaaggcactcgagctgctattgcaacacaactccaacaaaatactcttgtttatttcttcatctaggtctacgacggatccatcctgctggacaatcgctcaagcatcgtgtcagagatgttcgccacacccaacaacaactcgatgtgcgggtaccccgtagtcgatgccgtcaaggcggtgctggaggaggtttgcctaggcatcgtctcatacgttgacatactggagctgagaaagggacaaaacaaagaacgaacttcaaatcaaagctaaagaagcggatattcaaaatcttaaaaagccaccacgtggccgctcctcatcctggtgctcctcaactgcatcaagagggcatcttggggaagaagcatggtgccaccaagagcgttgtcgttcggatgtttcgcgttgttgaccagtgtgtagaggatctcaagctatcaggagtaatgtaggccagcgagtgctcgggcagatagaagagagagagagagagagagaggagatgcagcggctcacggggcgggacatgtgggacgtggaggagtgccagagcccgcgcatgggcagcgtcatcctcggcgtcggcggcaccagcaacaccgtctgcgtctgcatccccgccgccatgcccttcaacgaccccctccccgtcctctcccgcaccgtcgccggctactccaaccacaactccgtcggagaggacagggcaagggagacgctggagagggtgatgtcgcaggcgctgctcaaggcgcgccggcgacggtcaaatgtctgcgccgtctgcttggccgtagcaggcgtcaaccatccagtcgatcagcagagaatgctggactggctcagggacatatttccaagccatgtcaagctgttcgtggagaacgacgcggtggcggcgctggccagtggaaccatgggcaagctgcacggatgtgtgctgatcgcagggacagggaccatagcgtatgggttcaccagtgatggtagggaagctcgagcagcaggtgcagggccagttctgggtgactgggccagttaacgaagtggagcacctgaactagcagtcacgtctgcaatatacacaccagcaaaacactcctgtaacactaaacagttcatgcatatccttgactgaagacgatgttgcaaaggtttcagacatcagctttggcgttgacaagaaacaagatgacgagtacaatgctcctgatgagtacaacgcagtgtataaaattgctttgtactacaacgcagtgtataagtttgctttgtactgcttgagaccatctctggaaggcgttcatattttgacgatgatgtgctcctatattttcctttctgaataccaaattctttaatatgtcctcttgtgtggaatcaagttcctaatttagctagagcaatacttgaaa

SEQ ID NO: 5383 - DNA, 4098 bp, Zea Mays
agggatagtatcatatcattataatctttactacttattaagacagcaaggggtaggttgccattcctggttctgccattccctgttctgccgcttccattcccgctcccgcatagcctattcccattcccgcttgcccagcacacgcacacacctccctgacccggctgcgaatgtcgtcgcacgaggccgcgccaccgctccgtcccggctccgagccgccgcgccacccctcgccacctccccgagtcccacagccgcgacgcgcgtgtccccgtcgtgccaccactgcctccccatcgctgcctccccgaacccccgcagccacgacgcatgccgtcgtcatcgaacgaggccgaagccccaccacaccaccactccctccccctcgccgcctccccgaccggtcgcatccctgcagctcagaggctaccggtagacggagagaaccctgctcccttgcctaggattcccaaaaccctagcctcgacccgtatacacgaggacccccgacaatgaggaggctgctgcgacagctgcgccacgttcatggtcgacaaggtcatcgcgctcaccgcctcgagcacccccgacgacgaggaggctgctgcgacggccgcgccacgttcctggtcggcaaggtcatcgccctctaatacctcatgcgccattgttgcatcgtctatcccaaggttatctcagaggaccagccaagaacaaaaggagttgaacagatggaaaaaccatttcacaggattgaaagcatgttctttaccaaaacttgatttgagcacacacaaaataaataatgctaactaaactaaactcatttgccccgcatagtttcagttatacagaatacaactaagatcctataatataatccagttacagaggaggcaaaaagcagttttgtgttaacatttatgttgcttttaccactagcctactatactcgctcccaaaaagggaagcgtattttatagagcgaaaagccaaaccttacagactttgttcaacaattaatcaaattatataggagtttaggacatgtagaagcctcgagcaatgtctctgcccggtgcccagatagcaaaatgattgtggtgtttactgagacaccataggccagtaaaaaaatcgctggtgcatgaggatttgcaccactgcaataggttggtatgccgcacagccacaaccacacaggcatacagtcaagactatggttgttccaattataatcaagataaagtgaaaatgcagcatgttcctaatgcactgtatttgtcccattagcccaacaatatgtcacgtcccctctgaactatgaaggctatggtttaccagctgaatgttctgattagcttaaccgttgtagcatggagacttgcaaacataattagggacactattcttcgagtgcctctgttaattacagtgaggaattccctattgttttttctcagatgttttgtcgatactcgggattgagttgtgtgcctaggattccatgttttttgatttgagctttacttcccagttatacttctcattctttgggttttgtacctaatgacctgtatcgaaacatctatggttactaaattgttcttaatcagatcaggtataaacttgtcatcgtggctggggacaaaacgggtgaaactgagtttgttatgtttggccggataacacagcatgtcagcatctcgtgcggaaaacggctgcagtggtgtatgccctgtcaatagaatcagcggtgtattccctacaaaatctgacaatagcatcgacggtgtatgccctatcaccggcaaggatcatggtagcaacctcaaggaaagtcgtgatcatggtgaagaaaagggcaagggtccttgtgtggtaccagcaaaatgcccatttggttatgactccaacacttccaagctaggtctgcttagcttcactgtctgccagacactgctccatgaaagtagaaaatcgcatgtatatcatgctttaaagacagtccactatgtggtgccgatatagaattcaagctcttgttcaccgattcattgatggtcatgccagaatcaagcgatcacatgctacaggggatgtggaagcagcaggatttttgtgtctaaaacattggaagtgcaaagtcaaggctcactatgtatgtagacgatatcaaggagttaaaatgttcagaagatagacctatgttcacaacttggagctgtgttaggaatgcttggggattgttggacacatttatttggcatgaggcaaacataccatatgcagtatgggaagttaccagcactcacgataattaacatactatccttcagtgctatgctcgagttaccctgtggacctaacagatcctgagtatgatcacaagtctatatttgggaggacacattctgttgtggcattcttgccaaatttaaaagctggtaaaaagaagagcttgctaggagattcaaaagagcctgaagaccaagcaccacataaggtactggctttcagggacataaacactcaagctccaacacacatcctcatcatccccaaagtcaaggatggactaactggtctgtcaaaggaaaggatgacattaaaccacaagaatacatcacaatggccaaagcacatccttaagcgtggattgtctattcaagatgaaggcactcgagctgctattgcaacacaactccaacaaaatactcttgtttatttcttcatctaggtctacgacggatccatcctgctggacaatcgctcaagcatcgtgtcagagatgttcgccacacccaacaacaactcgatgtgcgggtaccccgtagtcgatgccgtcaaggcggtgctggaggaggtttgcctaggcatcgtctcatacgttgacatactggagctgagaaagggacaaaacaaagaacgaacttcaaatcaaagctaaagaagcggatattcaaaatcttaaaaagccaccacgtggccgctcctcatcctggtgctcctcaactgcatcaagagggcatcttggggaagaagcatggtgccaccaagagcgttgtcgttcggatgtttcgcgttgttgaccagtgtgtagaggatctcaagctatcaggagtaatgtaggccagcgagtgctcgggcagatagaagagagagagagagagagagaggagatgcagcggctcacggggcgggacatgtgggacgtggaggagtgccagagcccgcgcatgggcagcgtcatcctcggcgtcggcggcaccagcaacaccgtctgcgtctgcatccccgccgccatgcccttcaacgaccccctccccgtcctctcccgcaccgtcgccggctactccaaccacaactccgtcggagaggacagggcaagggagacgctggagagggtgatgtcgcaggcgctgctcaaggcgcgccggcgacggtcaaatgtctgcgccgtctgcttggccgtagcaggcgtcaaccatccagtcgatcagcagagaatgctggactggctcagggacatatttccaagccatgtcaagctgttcgtggagaacgacgcggtggcggcgctggccagtggaaccatgggcaagctgcacggatgtgtgctgatcgcagggacagggaccatagcgtatgggttcaccagtgatggtagggaagctcgagcagcaggtgcagggccagttctgggtgactgggccagttaacgaagtggagcacctgaactagcagtcacgtctgcaatatacacaccagcaaaacactcctgtaacactaaacagttcatgcatatccttgactgaagacgatgttgcaaaggtttcagacatcagctttggcgttgacaagaaacaagatgacgagtacaatgctcctgatgagtacaacgcagtgtataaaattgctttgtactacaacgcagtgtataagtttgctttgtactgcttgagaccatctctggaaggcgttcatattttgacgatgatgtgctcctatattttcctttctgaataccaaattctttaatatgtcctcttgtgtggaatcaagttcctaatttagctagagcaatacttgaaa

SEQ ID NO: 5384 - DNA, 3490 bp, Zea Mays
cacgaggccgcgccaccgctccgtcccggctccgagccgccgcgccacccctcgccacctccccgagtcccacagccgcgacgcgcgtgtccccgtcgtgccaccactgcctccccatcgctgcctccccgaacccccgcagccacgacgcatgccgtcgtcatcgaacgaggccgaagccccaccacaccaccactccctccccctcgccgcctccccgaccggtcgcatccctgcagctcagaggctaccggtagacggagagaaccctgctcccttgcctaggattcccaaaaccctagcctcgacccgtatacacgaggacccccgacaatgaggaggctgctgcgacagctgcgccacgttcatggtcgacaaggtcatcgcgctcaccgcctcgagcacccccgacgacgaggaggctgctgcgacggccgcgccacgttcctggtcggcaaggtcatcgccctctaatacctcatgcgccattgttgcatcgtctatcccaaggtataaacttgtcatcgtggctggggacaaaacgggtgaaactgagtttgttatgtttggccggataacacagcatgtcagcatctcgtgcggaaaacggctgcagtggtgtatgccctgtcaatagaatcagcggtgtattccctacaaaatctgacaatagcatcgacggtgtatgccctatcaccggcaaggatcatggtagcaacctcaaggaaagtcgtgatcatggtgaagaaaagggcaagggtccttgtgtggtaccagcaaaatgcccatttggttatgactccaacacttccaagctaggtctgcttagcttcactgtctgccagacactgctccatgaaagtagaaaatcgcatgtatatcatgctttaaagacagtccactatgtggtgccgatatagaattcaagctcttgttcaccgattcattgatggtcatgccagaatcaagcgatcacatgctacaggggatgtggaagcagcaggatttttgtgtctaaaacattggaagtgcaaagtcaaggctcactatgtatgtagacgatatcaaggagttaaaatgttcagaagatagacctatgttcacaacttggagctgtgttaggaatgcttggggattgttggacacatttatttggcatgaggcaaacataccatatgcagtatgggaagttaccagcactcacgataattaacatactatccttcagtgctatgctcgagttaccctgtggacctaacagatcctgagtatgatcacaagtctatatttgggaggacacattctgttgtggcattcttgccaaatttaaaagctggtaaaaagaagagcttgctaggagattcaaaagagcctgaagaccaagcaccacataaggttgttattttcatcctttgtcatcaagtatgtgaactactaacttgtggcattttcttttatcttccaagctaacaaatgattaacattttgtttaagaaatagaaaactaggtgattgactgagccttactgcttagaacttaagtctgtatcgttgtttgtttaatatttaggttgcttctaaaatggatgagcttgtactatttcatagtagaaaccatattatggcaatgaaaactgtaattaatcatatccccatattattttgttttctaagctttttaacttctatacaaaattattctatttaaatgggaacaagcaacctgctcttttgccaagtagccgctcttgtcattatcatgttacatgagtatagaatcaaagttagatttctaaatggcaactgtgttgagtgaactgagtgcttcattgaattatattgtttgatgctttgtgtgaatggctaaaccttcagcccaaatgcctaatgtatgattcttcttttgctatagattatgatattcacaatctatgaagtgcatcatgttttggttctaggtactggctttcagggacataaacactcaagctccaacacacatcctcatcatccccaaagtcaaggatggactaactggtctgtcaaaggtctacgacggatccatcctgctggacaatcgctcaagcatcgtgtcagagatgttcgccacacccaacaacaactcgatgtgcgggtaccccgtagtcgatgccgtcaaggcggtgctggaggaggtttgcctaggcatcgtctcatacgttgacatactggagctgagaaagggacaaaacaaagaacgaacttcaaatcaaagctaaagaagcggatattcaaaatcttaaaaagccaccacgtggccgctcctcatcctggtgctcctcaactgcatcaagagggcatcttggggaagaagcatggtgccaccaagagcgttgtcgttcggatgtttcgcgttgttgaccagtgtgtagaggatctcaagctatcagacacagttaatgcttaatccttagagctgcatataaccaagtggtgcttacctggatttgaggacctatgatgcttgtttatctcaagagtaatgtaggccagcgagtgctcgggcagatagaagagagagagagagagagagaggagatgcagcggctcacggggcgggacatgtgggacgtggaggagtgccagagcccgcgcatgggcagcgtcatcctcggcgtcggcggcaccagcaacaccgtctgcgtctgcatccccgccgccatgcccttcaacgaccccctccccgtcctctcccgcaccgtcgccggctactccaaccacaactccgtcggagaggacagggcaagggagacgctggagagggtgatgtcgcaggcgctgctcaaggcgcgccggcgacggtcaaatgtctgcgccgtctgcttggccgtagcaggcgtcaaccatccagtcgatcagcagagaatgctggactggctcagggacatatttccaagccatgtcaagctgttcgtggagaacgacgcggtggcggcgctggccagtggaaccatgggcaagctgcacggatgtgtgctgatcgcagggacagggaccatagcgtatgggttcaccagtgatggtagggaagctcgagcagcaggtgcagggccagttctgggtgactgggccagttaacgaagtggagcacctgaactagcagtcacgtctgcaatatacacaccagcaaaacactcctgtaacactaaacagttcatgcatatccttgactgaagacgatgttgcaaaggtttcagacatcagctttggcgttgacaagaaacaagatgacgagtacaatgctcctgatgagtacaacgcagtgtataaaattgctttgtactacaacgcagtgtataagtttgctttgtactgcttgagaccatctctggaaggcgttcatattttgacgatgatgtgctcctatattttcctttctgaataccaaattctttaatatgtcctcttgtgtggaatcaagttcctaatttagctagagcaatacttgaaa

SEQ ID NO: 5385 - DNA, 3004 bp, Zea Mays
cacgaggccgcgccaccgctccgtcccggctccgagccgccgcgccacccctcgccacctccccgagtcccacagccgcgacgcgcgtgtccccgtcgtgccaccactgcctccccatcgctgcctccccgaacccccgcagccacgacgcatgccgtcgtcatcgaacgaggccgaagccccaccacaccaccactccctccccctcgccgcctccccgaccggtcgcatccctgcagctcagaggctaccggtagacggagagaaccctgctcccttgcctaggattcccaaaaccctagcctcgacccgtatacacgaggacccccgacaatgaggaggctgctgcgacagctgcgccacgttcatggtcgacaaggtcatcgcgctcaccgcctcgagcacccccgacgacgaggaggctgctgcgacggccgcgccacgttcctggtcggcaaggtcatcgccctctaatacctcatgcgccattgttgcatcgtctatcccaaggtataaacttgtcatcgtggctggggacaaaacgggtgaaactgagtttgttatgtttggccggataacacagcatgtcagcatctcgtgcggaaaacggctgcagtggtgtatgccctgtcaatagaatcagcggtgtattccctacaaaatctgacaatagcatcgacggtgtatgccctatcaccggcaaggatcatggtagcaacctcaaggaaagtcgtgatcatggtgaagaaaagggcaagggtccttgtgtggtaccagcaaaatgcccatttggttatgactccaacacttccaagctaggtctgcttagcttcactgtctgccagacactgctccatgaaagtagaaaatcgcatgtatatcatgctttaaagacagtccactatgtggtgccgatatagaattcaagctcttgttcaccgattcattgatggtcatgccagaatcaagcgatcacatgctacaggggatgtggaagcagcaggatttttgtgtctaaaacattggaagtgcaaagtcaaggctcactatgtatgtagacgatatcaaggagttaaaatgttcagaagatagacctatgttcacaacttggagctgtgttaggaatgcttggggattgttgctcgagttaccctgtggacctaacagatcctgagtatgatcacaagtctatatttgggaggacacattctgttgtggcattcttgccaaatttaaaagctggtaaaaagaagagcttgctaggagattcaaaagagcctgaagaccaagcaccacataaggttgttattttcatcctttgtcatcaagtactggctttcagggacataaacactcaagctccaacacacatcctcatcatccccaaagtcaaggatggactaactggtctgtcaaaggaaaggatgacattaaaccacaagaatacatcacaatggccaaagcacatccttaagcgtggattgtctattcaagatgaaggcactcgagctgctattgcaacacaactccaacaaaatactcttgtttatttcttcatctaggtctacgacggatccatcctgctggacaatcgctcaagcatcgtgtcagagatgttcgccacacccaacaacaactcgatgtgcgggtaccccgtagtcgatgccgtcaaggcggtgctggaggaggtttgcctaggcatcgtctcatacgttgacatactggagctgagaaagggacaaaacaaagaacgaacttcaaatcaaagctaaagaagcggatattcaaaatcttaaaaagccaccacgtggccgctcctcatcctggtgctcctcaactgcatcaagagggcatcttggggaagaagcatggtgccaccaagagcgttgtcgttcggatgtttcgcgttgttgaccagtgtgtagaggatctcaagctatcagacacagttaatgcttaatccttagagctgcatataaccaagtggtgcttacctggatttgaggacctatgatgcttgtttatctcaagagtaatgtaggccagcgagtgctcgggcagatagaagagagagagagagagagagaggagatgcagcggctcacggggcgggacatgtgggacgtggaggagtgccagagcccgcgcatgggcagcgtcatcctcggcgtcggcggcaccagcaacaccgtctgcgtctgcatccccgccgccatgcccttcaacgaccccctccccgtcctctcccgcaccgtcgccggctactccaaccacaactccgtcggagaggacagggcaagggagacgctggagagggtgatgtcgcaggcgctgctcaaggcgcgccggcgacggtcaaatgtctgcgccgtctgcttggccgtagcaggcgtcaaccatccagtcgatcagcagagaatgctggactggctcagggacatatttccaagccatgtcaagctgttcgtggagaacgacgcggtggcggcgctggccagtggaaccatgggcaagctgcacggatgtgtgctgatcgcagggacagggaccatagcgtatgggttcaccagtgatggtagggaagctcgagcagcaggtgcagggccagttctgggtgactgggccagttaacgaagtggagcacctgaactagcagtcacgtctgcaatatacacaccagcaaaacactcctgtaacactaaacagttcatgcatatccttgactgaagacgatgttgcaaaggtttcagacatcagctttggcgttgacaagaaacaagatgacgagtacaatgctcctgatgagtacaacgcagtgtataaaattgctttgtactacaacgcagtgtataagtttgctttgtactgcttgagaccatctctggaaggcgttcatattttgacgatgatgtgctcctatattttcctttctgaataccaaattctttaatatgtcctcttgtgtggaatcaagttcctaatttagctagagcaatacttgaaa

SEQ ID NO: 5386 - DNA, 2867 bp, Zea Mays
cacgaggccgcgccaccgctccgtcccggctccgagccgccgcgccacccctcgccacctccccgagtcccacagccgcgacgcgcgtgtccccgtcgtgccaccactgcctccccatcgctgcctccccgaacccccgcagccacgacgcatgccgtcgtcatcgaacgaggccgaagccccaccacaccaccactccctccccctcgccgcctccccgaccggtcgcatccctgcagctcagaggctaccggtagacggagagaaccctgctcccttgcctaggattcccaaaaccctagcctcgacccgtatacacgaggacccccgacaatgaggaggctgctgcgacagctgcgccacgttcatggtcgacaaggtcatcgcgctcaccgcctcgagcacccccgacgacgaggaggctgctgcgacggccgcgccacgttcctggtcggcaaggtcatcgccctctaatacctcatgcgccattgttgcatcgtctatcccaaggtataaacttgtcatcgtggctggggacaaaacgggtgaaactgagtttgttatgtttggccggataacacagcatgtcagcatctcgtgcggaaaacggctgcagtggtgtatgccctgtcaatagaatcagcggtgtattccctacaaaatctgacaatagcatcgacggtgtatgccctatcaccggcaaggatcatggtagcaacctcaaggaaagtcgtgatcatggtgaagaaaagggcaagggtccttgtgtggtaccagcaaaatgcccatttggttatgactccaacacttccaagctaggtctgcttagcttcactgtctgccagacactgctccatgaaagtagaaaatcgcatgtatatcatgctttaaagacagtccactatgtggtgccgatatagaattcaagctcttgttcaccgattcattgatggtcatgccagaatcaagcgatcacatgctacaggggatgtggaagcagcaggatttttgtgtctaaaacattggaagtgcaaagtcaaggctcactatgtatgtagacgatatcaaggagttaaaatgttcagaagatagacctatgttcacaacttggagctgtgttaggaatgcttggggattgttggacacatttatttggcatgaggcaaacataccatatgcagtatgggaagttaccagcactcacgataattaacatactatccttcagtgctatgctcgagttaccctgtggacctaacagatcctgagtatgatcacaagtctatatttgggaggacacattctgttgtggcattcttgccaaatttaaaagctggtaaaaagaagagcttgctaggagattcaaaagagcctgaagaccaagcaccacataaggttgttattttcatcctttgtcatcaagtactggctttcagggacataaacactcaagctccaacacacatcctcatcatccccaaagtcaaggatggactaactggtctgtcaaaggtctacgacggatccatcctgctggacaatcgctcaagcatcgtgtcagagatgttcgccacacccaacaacaactcgatgtgcgggtaccccgtagtcgatgccgtcaaggcggtgctggaggaggtttgcctaggcatcgtctcatacgttgacatactggagctgagaaagggacaaaacaaagaacgaacttcaaatcaaagctaaagaagcggatattcaaaatcttaaaaagccaccacgtggccgctcctcatcctggtgctcctcaactgcatcaagagggcatcttggggaagaagcatggtgccaccaagagcgttgtcgttcggatgtttcgcgttgttgaccagtgtgtagaggatctcaagctatcaggagtaatgtaggccagcgagtgctcgggcagatagaagagagagagagagagagagaggagatgcagcggctcacggggcgggacatgtgggacgtggaggagtgccagagcccgcgcatgggcagcgtcatcctcggcgtcggcggcaccagcaacaccgtctgcgtctgcatccccgccgccatgcccttcaacgaccccctccccgtcctctcccgcaccgtcgccggctactccaaccacaactccgtcggagaggacagggcaagggagacgctggagagggtgatgtcgcaggcgctgctcaaggcgcgccggcgacggtcaaatgtctgcgccgtctgcttggccgtagcaggcgtcaaccatccagtcgatcagcagagaatgctggactggctcagggacatatttccaagccatgtcaagctgttcgtggagaacgacgcggtggcggcgctggccagtggaaccatgggcaagctgcacggatgtgtgctgatcgcagggacagggaccatagcgtatgggttcaccagtgatggtagggaagctcgagcagcaggtgcagggccagttctgggtgactgggccagttaacgaagtggagcacctgaactagcagtcacgtctgcaatatacacaccagcaaaacactcctgtaacactaaacagttcatgcatatccttgactgaagacgatgttgcaaaggtttcagacatcagctttggcgttgacaagaaacaagatgacgagtacaatgctcctgatgagtacaacgcagtgtataaaattgctttgtactacaacgcagtgtataagtttgctttgtactgcttgagaccatctctggaaggcgttcatattttgacgatgatgtgctcctatattttcctttctgaataccaaattctttaatatgtcctcttgtgtggaatcaagttcctaatttagctagagcaatacttgaaa

SEQ ID NO: 5387 - DNA, 3344 bp, Zea Mays
cacgaggccgcgccaccgctccgtcccggctccgagccgccgcgccacccctcgccacctccccgagtcccacagccgcgacgcgcgtgtccccgtcgtgccaccactgcctccccatcgctgcctccccgaacccccgcagccacgacgcatgccgtcgtcatcgaacgaggccgaagccccaccacaccaccactccctccccctcgccgcctccccgaccggtcgcatccctgcagctcagaggctaccggtagacggagagaaccctgctcccttgcctaggattcccaaaaccctagcctcgacccgtatacacgaggacccccgacaatgaggaggctgctgcgacagctgcgccacgttcatggtcgacaaggtcatcgcgctcaccgcctcgagcacccccgacgacgaggaggctgctgcgacggccgcgccacgttcctggtcggcaaggtcatcgccctctaatacctcatgcgccattgttgcatcgtctatcccaaggtataaacttgtcatcgtggctggggacaaaacgggtgaaactgagtttgttatgtttggccggataacacagcatgtcagcatctcgtgcggaaaacggctgcagtggtgtatgccctgtcaatagaatcagcggtgtattccctacaaaatctgacaatagcatcgacggtgtatgccctatcaccggcaaggatcatggtagcaacctcaaggaaagtcgtgatcatggtgaagaaaagggcaagggtccttgtgtggtaccagcaaaatgcccatttggttatgactccaacacttccaagctaggtctgcttagcttcactgtctgccagacactgctccatgaaagtagaaaatcgcatgtatatcatgctttaaagacagtccactatgtggtgccgatatagaattcaagctcttgttcaccgattcattgatggtcatgccagaatcaagcgatcacatgctacaggggatgtggaagcagcaggatttttgtgtctaaaacattggaagtgcaaagtcaaggctcactatgtatgtagacgatatcaaggagttaaaatgttcagaagatagacctatgttcacaacttggagctgtgttaggaatgcttggggattgttgctcgagttaccctgtggacctaacagatcctgagtatgatcacaagtctatatttgggaggacacattctgttgtggcattcttgccaaatttaaaagctggtaaaaagaagagcttgctaggagattcaaaagagcctgaagaccaagcaccacataaggttgttattttcatcctttgtcatcaagtatgtgaactactaacttgtggcattttcttttatcttccaagctaacaaatgattaacattttgtttaagaaatagaaaactaggtgattgactgagccttactgcttagaacttaagtctgtatcgttgtttgtttaatatttaggttgcttctaaaatggatgagcttgtactatttcatagtagaaaccatattatggcaatgaaaactgtaattaatcatatccccatattattttgttttctaagctttttaacttctatacaaaattattctatttaaatgggaacaagcaacctgctcttttgccaagtagccgctcttgtcattatcatgttacatgagtatagaatcaaagttagatttctaaatggcaactgtgttgagtgaactgagtgcttcattgaattatattgtttgatgctttgtgtgaatggctaaaccttcagcccaaatgcctaatgtatgattcttcttttgctatagattatgatattcacaatctatgaagtgcatcatgttttggttctaggtactggctttcagggacataaacactcaagctccaacacacatcctcatcatccccaaagtcaaggatggactaactggtctgtcaaaggtctacgacggatccatcctgctggacaatcgctcaagcatcgtgtcagagatgttcgccacacccaacaacaactcgatgtgcgggtaccccgtagtcgatgccgtcaaggcggtgctggaggaggtttgcctaggcatcgtctcatacgttgacatactggagctgagaaagggacaaaacaaagaacgaacttcaaatcaaagctaaagaagcggatattcaaaatcttaaaaagccaccacgtggccgctcctcatcctggtgctcctcaactgcatcaagagggcatcttggggaagaagcatggtgccaccaagagcgttgtcgttcggatgtttcgcgttgttgaccagtgtgtagaggatctcaagctatcagacacagttaatgcttaatccttagagctgcatataaccaagtggtgcttacctggatttgaggacctatgatgcttgtttatctcaagagtaatgtaggccagcgagtgctcgggcagatagaagagagagagagagagagagaggagatgcagcggctcacggggcgggacatgtgggacgtggaggagtgccagagcccgcgcatgggcagcgtcatcctcggcgtcggcggcaccagcaacaccgtctgcgtctgcatccccgccgccatgcccttcaacgaccccctccccgtcctctcccgcaccgtcgccggctactccaaccacaactccgtcggagaggacagggcaagggagacgctggagagggtgatgtcgcaggcgctgctcaaggcgcgccggcgacggtcaaatgtctgcgccgtctgcttggccgtagcaggcgtcaaccatccagtcgatcagcagagaatgctggactggctcagggacatatttccaagccatgtcaagctgttcgtggagaacgacgcggtggcggcgctggccagtggaaccatgggcaagctgcacggatgtgtgctgatcgcagggacagggaccatagcgtatgggttcaccagtgatgttaacgaagtggagcacctgaactagcagtcacgtctgcaatatacacaccagcaaaacactcctgtaacactaaacagttcatgcatatccttgactgaagacgatgttgcaaaggtttcagacatcagctttggcgttgacaagaaacaagatgacgagtacaatgctcctgatgagtacaacgcagtgtataaaattgctttgtactacaacgcagtgtataagtttgctttgtactgcttgagaccatctctggaaggcgttcatattttgacgatgatgtgctcctatattttcctttctgaataccaaattctttaatatgtcctcttgtgtggaatcaagttcctaatttagctagagcaatacttgaaa

SEQ ID NO: 5388 - DNA, 3071 bp, Zea Mays
cacgaggccgcgccaccgctccgtcccggctccgagccgccgcgccacccctcgccacctccccgagtcccacagccgcgacgcgcgtgtccccgtcgtgccaccactgcctccccatcgctgcctccccgaacccccgcagccacgacgcatgccgtcgtcatcgaacgaggccgaagccccaccacaccaccactccctccccctcgccgcctccccgaccggtcgcatccctgcagctcagaggctaccggtagacggagagaaccctgctcccttgcctaggattcccaaaaccctagcctcgacccgtatacacgaggacccccgacaatgaggaggctgctgcgacagctgcgccacgttcatggtcgacaaggtcatcgcgctcaccgcctcgagcacccccgacgacgaggaggctgctgcgacggccgcgccacgttcctggtcggcaaggtcatcgccctctaatacctcatgcgccattgttgcatcgtctatcccaaggtataaacttgtcatcgtggctggggacaaaacgggtgaaactgagtttgttatgtttggccggataacacagcatgtcagcatctcgtgcggaaaacggctgcagtggtgtatgccctgtcaatagaatcagcggtgtattccctacaaaatctgacaatagcatcgacggtgtatgccctatcaccggcaaggatcatggtagcaacctcaaggaaagtcgtgatcatggtgaagaaaagggcaagggtccttgtgtggtaccagcaaaatgcccatttggttatgactccaacacttccaagctaggtctgcttagcttcactgtctgccagacactgctccatgaaagtagaaaatcgcatgtatatcatgctttaaagacagtccactatgtggtgccgatatagaattcaagctcttgttcaccgattcattgatggtcatgccagaatcaagcgatcacatgctacaggggatgtggaagcagcaggatttttgtgtctaaaacattggaagtgcaaagtcaaggctcactatgtatgtagacgatatcaaggagttaaaatgttcagaagatagacctatgttcacaacttggagctgtgttaggaatgcttggggattgttggacacatttatttggcatgaggcaaacataccatatgcagtatgggaagttaccagcactcacgataattaacatactatccttcagtgctatgctcgagttaccctgtggacctaacagatcctgagtatgatcacaagtctatatttgggaggacacattctgttgtggcattcttgccaaatttaaaagctggtaaaaagaagagcttgctaggagattcaaaagagcctgaagaccaagcaccacataaggtactggctttcagggacataaacactcaagctccaacacacatcctcatcatccccaaagtcaaggatggactaactggtctgtcaaaggaaaggatgacattaaaccacaagaatacatcacaatggccaaagcacatccttaagcgtggattgtctattcaagatgaaggcactcgagctgctattgcaacacaactccaacaaaatactcttgtttatttcttcatctaggtctacgacggatccatcctgctggacaatcgctcaagcatcgtgtcagagatgttcgccacacccaacaacaactcgatgtgcgggtaccccgtagtcgatgccgtcaaggcggtgctggaggaggtttgcctaggcatcgtctcatacgttgacatactggagctgagaaagggacaaaacaaagaacgaacttcaaatcaaagctaaagaagcggatattcaaaatcttaaaaagccaccacgtggccgctcctcatcctggtgctcctcaactgcatcaagagggcatcttggggaagaagcatggtgccaccaagagcgttgtcgttcggatgtttcgcgttgttgaccagtgtgtagaggatctcaagctatcagacacagttaatgcttaatccttagagctgcatataaccaagtggtgcttacctggatttgaggacctatgatgcttgtttatctcaagagtaatgtaggccagcgagtgctcgggcagatagaagagagagagagagagagagaggagatgcagcggctcacggggcgggacatgtgggacgtggaggagtgccagagcccgcgcatgggcagcgtcatcctcggcgtcggcggcaccagcaacaccgtctgcgtctgcatccccgccgccatgcccttcaacgaccccctccccgtcctctcccgcaccgtcgccggctactccaaccacaactccgtcggagaggacagggcaagggagacgctggagagggtgatgtcgcaggcgctgctcaaggcgcgccggcgacggtcaaatgtctgcgccgtctgcttggccgtagcaggcgtcaaccatccagtcgatcagcagagaatgctggactggctcagggacatatttccaagccatgtcaagctgttcgtggagaacgacgcggtggcggcgctggccagtggaaccatgggcaagctgcacggatgtgtgctgatcgcagggacagggaccatagcgtatgggttcaccagtgatggtagggaagctcgagcagcaggtgcagggccagttctgggtgactgggccagttaacgaagtggagcacctgaactagcagtcacgtctgcaatatacacaccagcaaaacactcctgtaacactaaacagttcatgcatatccttgactgaagacgatgttgcaaaggtttcagacatcagctttggcgttgacaagaaacaagatgacgagtacaatgctcctgatgagtacaacgcagtgtataaaattgctttgtactacaacgcagtgtataagtttgctttgtactgcttgagaccatctctggaaggcgttcatattttgacgatgatgtgctcctatattttcctttctgaataccaaattctttaatatgtcctcttgtgtggaatcaagttcctaatttagctagagcaatacttgaaa

SEQ ID NO: 5389 - DNA, 3855 bp, Zea Mays
cacgaggccgcgccaccgctccgtcccggctccgagccgccgcgccacccctcgccacctccccgagtcccacagccgcgacgcgcgtgtccccgtcgtgccaccactgcctccccatcgctgcctccccgaacccccgcagccacgacgcatgccgtcgtcatcgaacgaggccgaagccccaccacaccaccactccctccccctcgccgcctccccgaccggtcgcatccctgcagctcagaggctaccggtagacggagagaaccctgctcccttgcctaggattcccaaaaccctagcctcgacccgtatacacgaggacccccgacaatgaggaggctgctgcgacagctgcgccacgttcatggtcgacaaggtcatcgcgctcaccgcctcgagcacccccgacgacgaggaggctgctgcgacggccgcgccacgttcctggtcggcaaggtcatcgccctctaatacctcatgcgccattgttgcatcgtctatcccaaggttatctcagaggaccagccaagaacaaaaggagttgaacagatggaaaaaccatttcacaggattgaaagcatgttctttaccaaaacttgatttgagcacacacaaaataaataatgctaactaaactaaactcatttgccccgcatagtttcagttatacagaatacaactaagatcctataatataatccagttacagaggaggcaaaaagcagttttgtgttaacatttatgttgcttttaccactagcctactatactcgctcccaaaaagggaagcgtattttatagagcgaaaagccaaaccttacagactttgttcaacaattaatcaaattatataggagtttaggacatgtagaagcctcgagcaatgtctctgcccggtgcccagatagcaaaatgattgtggtgtttactgagacaccataggccagtaaaaaaatcgctggtgcatgaggatttgcaccactgcaataggttggtatgccgcacagccacaaccacacaggcatacagtcaagactatggttgttccaattataatcaagataaagtgaaaatgcagcatgttcctaatgcactgtatttgtcccattagcccaacaatatgtcacgtcccctctgaactatgaaggctatggtttaccagctgaatgttctgattagcttaaccgttgtagcatggagacttgcaaacataattagggacactattcttcgagtgcctctgttaattacagtgaggaattccctattgttttttctcagatgttttgtcgatactcgggattgagttgtgtgcctaggattccatgttttttgatttgagctttacttcccagttatacttctcattctttgggttttgtacctaatgacctgtatcgaaacatctatggttactaaattgttcttaatcagatcaggtataaacttgtcatcgtggctggggacaaaacgggtgaaactgagtttgttatgtttggccggataacacagcatgtcagcatctcgtgcggaaaacggctgcagtggtgtatgccctgtcaatagaatcagcggtgtattccctacaaaatctgacaatagcatcgacggtgtatgccctatcaccggcaaggatcatggtagcaacctcaaggaaagtcgtgatcatggtgaagaaaagggcaagggtccttgtgtggtaccagcaaaatgcccatttggttatgactccaacacttccaagctaggtctgcttagcttcactgtctgccagacactgctccatgaaagtagaaaatcgcatgtatatcatgctttaaagacagtccactatgtggtgccgatatagaattcaagctcttgttcaccgattcattgatggtcatgccagaatcaagcgatcacatgctacaggggatgtggaagcagcaggatttttgtgtctaaaacattggaagtgcaaagtcaaggctcactatgtatgtagacgatatcaaggagttaaaatgttcagaagatagacctatgttcacaacttggagctgtgttaggaatgcttggggattgttggacacatttatttggcatgaggcaaacataccatatgcagtatgggaagttaccagcactcacgataattaacatactatccttcagtgctatgctcgagttaccctgtggacctaacagatcctgagtatgatcacaagtctatatttgggaggacacattctgttgtggcattcttgccaaatttaaaagctggtaaaaagaagagcttgctaggagattcaaaagagcctgaagaccaagcaccacataaggtactggctttcagggacataaacactcaagctccaacacacatcctcatcatccccaaagtcaaggatggactaactggtctgtcaaaggaaaggatgacattaaaccacaagaatacatcacaatggccaaagcacatccttaagcgtggattgtctattcaagatgaaggcactcgagctgctattgcaacacaactccaacaaaatactcttgtttatttcttcatctaggtctacgacggatccatcctgctggacaatcgctcaagcatcgtgtcagagatgttcgccacacccaacaacaactcgatgtgcgggtaccccgtagtcgatgccgtcaaggcggtgctggaggaggtttgcctaggcatcgtctcatacgttgacatactggagctgagaaagggacaaaacaaagaacgaacttcaaatcaaagctaaagaagcggatattcaaaatcttaaaaagccaccacgtggccgctcctcatcctggtgctcctcaactgcatcaagagggcatcttggggaagaagcatggtgccaccaagagcgttgtcgttcggatgtttcgcgttgttgaccagtgtgtagaggatctcaagctatcagacacagttaatgcttaatccttagagctgcatataaccaagtggtgcttacctggatttgaggacctatgatgcttgtttatctcaagagtaatgtaggccagcgagtgctcgggcagatagaagagagagagagagagagagaggagatgcagcggctcacggggcgggacatgtgggacgtggaggagtgccagagcccgcgcatgggcagcgtcatcctcggcgtcggcggcaccagcaacaccgtctgcgtctgcatccccgccgccatgcccttcaacgaccccctccccgtcctctcccgcaccgtcgccggctactccaaccacaactccgtcggagggacatatttccaagccatgtcaagctgttcgtggagaacgacgcggtggcggcgctggccagtggaaccatgggcaagctgcacggatgtgtgctgatcgcagggacagggaccatagcgtatgggttcaccagtgatggtagggaagctcgagcagcaggtgcagggccagttctgggtgactgggccagttaacgaagtggagcacctgaactagcagtcacgtctgcaatatacacaccagcaaaacactcctgtaacactaaacagttcatgcatatccttgactgaagacgatgttgcaaaggtttcagacatcagctttggcgttgacaagaaacaagatgacgagtacaatgctcctgatgagtacaacgcagtgtataaaattgctttgtactacaacgcagtgtataagtttgctttgtactgcttgagaccatctctggaaggcgttcatattttgacgatgatgtgctcctatattttcctttctgaataccaaattctttaatatgtcctcttgtgtggaatcaagttcctaatttagctagagcaatacttgaaa

SEQ ID NO: 5390 - DNA, 1968 bp, Zea Mays
caagcgatcacatgctacaggggatgtggaagcagcaggacacatttatttggcatgaggcaaacataccatatgcagtatgggaagttaccagcactcacgataattaacatactatccttcagtgctatgctcgagttaccctgtggacctaacagatcctgagtatgatcacaagtctatatttgggaggacacattctgttgtggcattcttgccaaatttaaaagctggtaaaaagaagagcttgctaggagattcaaaagagcctgaagaccaagcaccacataaggtactggctttcagggacataaacactcaagctccaacacacatcctcatcatccccaaagtcaaggatggactaactggtctgtcaaaggaaaggatgacattaaaccacaagaatacatcacaatggccaaagcacatccttaagcgtggattgtctattcaagatgaaggcactcgagctgctattgcaacacaactccaacaaaatactcttgtttatttcttcatctaggtctacgacggatccatcctgctggacaatcgctcaagcatcgtgtcagagatgttcgccacacccaacaacaactcgatgtgcgggtaccccgtagtcgatgccgtcaaggcggtgctggaggaggtttgcctaggcatcgtctcatacgttgacatactggagctgagaaagggacaaaacaaagaacgaacttcaaatcaaagctaaagaagcggatattcaaaatcttaaaaagccaccacgtggccgctcctcatcctggtgctcctcaactgcatcaagagggcatcttggggaagaagcatggtgccaccaagagcgttgtcgttcggatgtttcgcgttgttgaccagtgtgtagaggatctcaagctatcagacacagttaatgcttaatccttagagctgcatataaccaagtggtgcttacctggatttgaggacctatgatgcttgtttatctcaagagtaatgtaggccagcgagtgctcgggcagatagaagagagagagagagagagagaggagatgcagcggctcacggggcgggacatgtgggacgtggaggagtgccagagcccgcgcatgggcagcgtcatcctcggcgtcggcggcaccagcaacaccgtctgcgtctgcatccccgccgccatgcccttcaacgaccccctccccgtcctctcccgcaccgtcgccggctactccaaccacaactccgtcggagaggacagggcaagggagacgctggagagggtgatgtcgcaggcgctgctcaaggcgcgccggcgacggtcaaatgtctgcgccgtctgcttggccgtagcaggcgtcaaccatccagtcgatcagcagagaatgctggactggctcagggacatatttccaagccatgtcaagctgttcgtggagaacgacgcggtggcggcgctggccagtggaaccatgggcaagctgcacggatgtgtgctgatcgcagggacagggaccatagcgtatgggttcaccagtgatggtagggaagctcgagcagcaggtgcagggccagttctgggtgactgggccagttaacgaagtggagcacctgaactagcagtcacgtctgcaatatacacaccagcaaaacactcctgtaacactaaacagttcatgcatatccttgactgaagacgatgttgcaaaggtttcagacatcagctttggcgttgacaagaaacaagatgacgagtacaatgctcctgatgagtacaacgcagtgtataaaattgctttgtactacaacgcagtgtataagtttgctttgtactgcttgagaccatctctggaaggcgttcatattttgacgatgatgtgctcctatattttcctttctgaataccaaattctttaatatgtcctcttgtgtggaatcaagttcctaatttagctagagcaatacttgaaa

SEQ ID NO: 5391 - DNA, 2600 bp, Zea Mays
aagaataaagtcatatatgaggatgttttcatggagagatgggcttttctagcgcagcaagctgatttttgtgtctaaaacattggaagtgcaaagtcaaggctcactatgtatgtagacgatatcaaggagttaaaatgttcagaagatagacctatgttcacaacttggagctgtgttaggaatgcttggggattgttgctcgagttaccctgtggacctaacagatcctgagtatgatcacaagtctatatttgggaggacacattctgttgtggcattcttgccaaatttaaaagctggtaaaaagaagagcttgctaggagattcaaaagagcctgaagaccaagcaccacataaggttgttattttcatcctttgtcatcaagtatgtgaactactaacttgtggcattttcttttatcttccaagctaacaaatgattaacattttgtttaagaaatagaaaactaggtgattgactgagccttactgcttagaacttaagtctgtatcgttgtttgtttaatatttaggttgcttctaaaatggatgagcttgtactatttcatagtagaaaccatattatggcaatgaaaactgtaattaatcatatccccatattattttgttttctaagctttttaacttctatacaaaattattctatttaaatgggaacaagcaacctgctcttttgccaagtagccgctcttgtcattatcatgttacatgagtatagaatcaaagttagatttctaaatggcaactgtgttgagtgaactgagtgcttcattgaattatattgtttgatgctttgtgtgaatggctaaaccttcagcccaaatgcctaatgtatgattcttcttttgctatagattatgatattcacaatctatgaagtgcatcatgttttggttctaggtactggctttcagggacataaacactcaagctccaacacacatcctcatcatccccaaagtcaaggatggactaactggtctgtcaaaggaaaggatgacattaaaccacaagaatacatcacaatggccaaagcacatccttaagcgtggattgtctattcaagatgaaggcactcgagctgctattgcaacacaactccaacaaaatactcttgtttatttcttcatctaggtctacgacggatccatcctgctggacaatcgctcaagcatcgtgtcagagatgttcgccacacccaacaacaactcgatgtgcgggtaccccgtagtcgatgccgtcaaggcggtgctggaggaggtttgcctaggcatcgtctcatacgttgacatactggagctgagaaagggacaaaacaaagaacgaacttcaaatcaaagctaaagaagcggatattcaaaatcttaaaaagccaccacgtggccgctcctcatcctggtgctcctcaactgcatcaagagggcatcttggggaagaagcatggtgccaccaagagcgttgtcgttcggatgtttcgcgttgttgaccagtgtgtagaggatctcaagctatcagacacagttaatgcttaatccttagagctgcatataaccaagtggtgcttacctggatttgaggacctatgatgcttgtttatctcaagagtaatgtaggccagcgagtgctcgggcagatagaagagagagagagagagagagaggagatgcagcggctcacggggcgggacatgtgggacgtggaggagtgccagagcccgcgcatgggcagcgtcatcctcggcgtcggcggcaccagcaacaccgtctgcgtctgcatccccgccgccatgcccttcaacgaccccctccccgtcctctcccgcaccgtcgccggctactccaaccacaactccgtcggagaggacagggcaagggagacgctggagagggtgatgtcgcaggcgctgctcaaggcgcgccggcgacggtcaaatgtctgcgccgtctgcttggccgtagcaggcgtcaaccatccagtcgatcagcagagaatgctggactggctcagggacatatttccaagccatgtcaagctgttcgtggagaacgacgcggtggcggcgctggccagtggaaccatgggcaagctgcacggatgtgtgctgatcgcagggacagggaccatagcgtatgggttcaccagtgatggtagggaagctcgagcagcaggtgcagggccagttctgggtgactgggccagttaacgaagtggagcacctgaactagcagtcacgtctgcaatatacacaccagcaaaacactcctgtaacactaaacagttcatgcatatccttgactgaagacgatgttgcaaaggtttcagacatcagctttggcgttgacaagaaacaagatgacgagtacaatgctcctgatgagtacaacgcagtgtataaaattgctttgtactacaacgcagtgtataagtttgctttgtactgcttgagaccatctctggaaggcgttcatattttgacgatgatgtgctcctatattttcctttctgaataccaaattctttaatatgtcctcttgtgtggaatcaagttcctaatttagctagagcaatacttgaaa

SEQ ID NO: 5392 - DNA, 2778 bp, Zea Mays
aataaagtcatatatgaggatgttttcatggagagatgggcttttctagcgcagcaagctgatttttgtgtctaaaacattggaagtgcaaagtcaaggctcactatgtatgtagacgatatcaaggagttaaaatgttcagaagatagacctatgttcacaacttggagctgtgttaggaatgcttggggattgttgggtgcaaatggttggataactacggacatgaacacatatagctacattgtttctcaaattagaatacagataggatttcagtaaatcagatcatggtatggttgcagttttgtagtacgggtaattttgttttgttttctctgatgctaaggtagttttaagatttactttgacctttcctttggttgatgtaatcttgaagctgtagtcgttagaggtaatcataggttttgttcataagaggacttgacttttcgtggatgtggaagcatttgtttgtttttgttcgaatgcaagagagatattttagggcctggcgatcaccttgttttggtgctctgcacaatcagcattccttttaccgtgtgaataaggatctcactttaggtgtgttaaactgggtttttgaattttgaataatttgttgatgatggaagagtggttgttcgatatgtttacgctagagtggaaatgtctatgaacatgaacaacaaaatggataatgcagagttcattattattttttggtcttcccttggttagtagtcgtttttgagttgctcaacaccaaatgcatggtggatatgctgttgcatgatatgtggatgtatttgttagtgggtgacaagttcaatgattttgctaatcaggacacatttatttggcatgaggcaaacataccatatgcagtatgggaagttaccagcactcacgataattaacatactatccttcagtgctatgctcgagttaccctgtggacctaacagatcctgagtatgatcacaagtctatatttgggaggacacattctgttgtggcattcttgccaaatttaaaagctggtaaaaagaagagcttgctaggagattcaaaagagcctgaagaccaagcaccacataaggtactggctttcagggacataaacactcaagctccaacacacatcctcatcatccccaaagtcaaggatggactaactggtctgtcaaaggaaaggatgacattaaaccacaagaatacatcacaatggccaaagcacatccttaagcgtggattgtctattcaagatgaaggcactcgagctgctattgcaacacaactccaacaaaatactcttgtttatttcttcatctaggtctacgacggatccatcctgctggacaatcgctcaagcatcgtgtcagagatgttcgccacacccaacaacaactcgatgtgcgggtaccccgtagtcgatgccgtcaaggcggtgctggaggaggtttgcctaggcatcgtctcatacgttgacatactggagctgagaaagggacaaaacaaagaacgaacttcaaatcaaagctaaagaagcggatattcaaaatcttaaaaagccaccacgtggccgctcctcatcctggtgctcctcaactgcatcaagagggcatcttggggaagaagcatggtgccaccaagagcgttgtcgttcggatgtttcgcgttgttgaccagtgtgtagaggatctcaagctatcagacacagttaatgcttaatccttagagctgcatataaccaagtggtgcttacctggatttgaggacctatgatgcttgtttatctcaagagtaatgtaggccagcgagtgctcgggcagatagaagagagagagagagagagagaggagatgcagcggctcacggggcgggacatgtgggacgtggaggagtgccagagcccgcgcatgggcagcgtcatcctcggcgtcggcggcaccagcaacaccgtctgcgtctgcatccccgccgccatgcccttcaacgaccccctccccgtcctctcccgcaccgtcgccggctactccaaccacaactccgtcggagaggacagggcaagggagacgctggagagggtgatgtcgcaggcgctgctcaaggcgcgccggcgacggtcaaatgtctgcgccgtctgcttggccgtagcaggcgtcaaccatccagtcgatcagcagagaatgctggactggctcagggacatatttccaagccatgtcaagctgttcgtggagaacgacgcggtggcggcgctggccagtggaaccatgggcaagctgcacggatgtgtgctgatcgcagggacagggaccatagcgtatgggttcaccagtgatggtagggaagctcgagcagcaggtgcagggccagttctgggtgactgggccagttaacgaagtggagcacctgaactagcagtcacgtctgcaatatacacaccagcaaaacactcctgtaacactaaacagttcatgcatatccttgactgaagacgatgttgcaaaggtttcagacatcagctttggcgttgacaagaaacaagatgacgagtacaatgctcctgatgagtacaacgcagtgtataaaattgctttgtactacaacgcagtgtataagtttgctttgtactgcttgagaccatctctggaaggcgttcatattttgacgatgatgtgctcctatattttcctttctgaataccaaattctttaatatgtcctcttgtgtggaatcaagttcctaatttagctagagcaatacttgaaa

SEQ ID NO: 5393 - DNA, 2122 bp, Zea Mays
gtcatatatgaggatgttttcatggagagatgggcttttctagcgcagcaagctgatttttgtgtctaaaacattggaagtgcaaagtcaaggctcactatgtatgtagacgatatcaaggagttaaaatgttcagaagatagacctatgttcacaacttggagctgtgttaggaatgcttggggattgttggacacatttatttggcatgaggcaaacataccatatgcagtatgggaagttaccagcactcacgataattaacatactatccttcagtgctatgctcgagttaccctgtggacctaacagatcctgagtatgatcacaagtctatatttgggaggacacattctgttgtggcattcttgccaaatttaaaagctggtaaaaagaagagcttgctaggagattcaaaagagcctgaagaccaagcaccacataaggtactggctttcagggacataaacactcaagctccaacacacatcctcatcatccccaaagtcaaggatggactaactggtctgtcaaaggaaaggatgacattaaaccacaagaatacatcacaatggccaaagcacatccttaagcgtggattgtctattcaagatgaaggcactcgagctgctattgcaacacaactccaacaaaatactcttgtttatttcttcatctaggtctacgacggatccatcctgctggacaatcgctcaagcatcgtgtcagagatgttcgccacacccaacaacaactcgatgtgcgggtaccccgtagtcgatgccgtcaaggcggtgctggaggaggtttgcctaggcatcgtctcatacgttgacatactggagctgagaaagggacaaaacaaagaacgaacttcaaatcaaagctaaagaagcggatattcaaaatcttaaaaagccaccacgtggccgctcctcatcctggtgctcctcaactgcatcaagagggcatcttggggaagaagcatggtgccaccaagagcgttgtcgttcggatgtttcgcgttgttgaccagtgtgtagaggatctcaagctatcagacacagttaatgcttaatccttagagctgcatataaccaagtggtgcttacctggatttgaggacctatgatgcttgtttatctcaagagtaatgtaggccagcgagtgctcgggcagatagaagagagagagagagagagagaggagatgcagcggctcacggggcgggacatgtgggacgtggaggagtgccagagcccgcgcatgggcagcgtcatcctcggcgtcggcggcaccagcaacaccgtctgcgtctgcatccccgccgccatgcccttcaacgaccccctccccgtcctctcccgcaccgtcgccggctactccaaccacaactccgtcggagaggacagggcaagggagacgctggagagggtgatgtcgcaggcgctgctcaaggcgcgccggcgacggtcaaatgtctgcgccgtctgcttggccgtagcaggcgtcaaccatccagtcgatcagcagagaatgctggactggctcagggacatatttccaagccatgtcaagctgttcgtggagaacgacgcggtggcggcgctggccagtggaaccatgggcaagctgcacggatgtgtgctgatcgcagggacagggaccatagcgtatgggttcaccagtgatggtagggaagctcgagcagcaggtgcagggccagttctgggtgactgggccagttaacgaagtggagcacctgaactagcagtcacgtctgcaatatacacaccagcaaaacactcctgtaacactaaacagttcatgcatatccttgactgaagacgatgttgcaaaggtttcagacatcagctttggcgttgacaagaaacaagatgacgagtacaatgctcctgatgagtacaacgcagtgtataaaattgctttgtactacaacgcagtgtataagtttgctttgtactgcttgagaccatctctggaaggcgttcatattttgacgatgatgtgctcctatattttcctttctgaataccaaattctttaatatgtcctcttgtgtggaatcaagttcctaatttagctagagcaatacttgaaa

SEQ ID NO: 5394 - DNA, 2028 bp, Zea Mays
gtcatatatgaggatgttttcatggagagatgggcttttctagcgcagcaagctgatttttgtgtctaaaacattggaagtgcaaagtcaaggctcactatgtatgtagacgatatcaaggagttaaaatgttcagaagatagacctatgttcacaacttggagctgtgttaggaatgcttggggattgttgctcgagttaccctgtggacctaacagatcctgagtatgatcacaagtctatatttgggaggacacattctgttgtggcattcttgccaaatttaaaagctggtaaaaagaagagcttgctaggagattcaaaagagcctgaagaccaagcaccacataaggtactggctttcagggacataaacactcaagctccaacacacatcctcatcatccccaaagtcaaggatggactaactggtctgtcaaaggaaaggatgacattaaaccacaagaatacatcacaatggccaaagcacatccttaagcgtggattgtctattcaagatgaaggcactcgagctgctattgcaacacaactccaacaaaatactcttgtttatttcttcatctaggtctacgacggatccatcctgctggacaatcgctcaagcatcgtgtcagagatgttcgccacacccaacaacaactcgatgtgcgggtaccccgtagtcgatgccgtcaaggcggtgctggaggaggtttgcctaggcatcgtctcatacgttgacatactggagctgagaaagggacaaaacaaagaacgaacttcaaatcaaagctaaagaagcggatattcaaaatcttaaaaagccaccacgtggccgctcctcatcctggtgctcctcaactgcatcaagagggcatcttggggaagaagcatggtgccaccaagagcgttgtcgttcggatgtttcgcgttgttgaccagtgtgtagaggatctcaagctatcagacacagttaatgcttaatccttagagctgcatataaccaagtggtgcttacctggatttgaggacctatgatgcttgtttatctcaagagtaatgtaggccagcgagtgctcgggcagatagaagagagagagagagagagagaggagatgcagcggctcacggggcgggacatgtgggacgtggaggagtgccagagcccgcgcatgggcagcgtcatcctcggcgtcggcggcaccagcaacaccgtctgcgtctgcatccccgccgccatgcccttcaacgaccccctccccgtcctctcccgcaccgtcgccggctactccaaccacaactccgtcggagaggacagggcaagggagacgctggagagggtgatgtcgcaggcgctgctcaaggcgcgccggcgacggtcaaatgtctgcgccgtctgcttggccgtagcaggcgtcaaccatccagtcgatcagcagagaatgctggactggctcagggacatatttccaagccatgtcaagctgttcgtggagaacgacgcggtggcggcgctggccagtggaaccatgggcaagctgcacggatgtgtgctgatcgcagggacagggaccatagcgtatgggttcaccagtgatggtagggaagctcgagcagcaggtgcagggccagttctgggtgactgggccagttaacgaagtggagcacctgaactagcagtcacgtctgcaatatacacaccagcaaaacactcctgtaacactaaacagttcatgcatatccttgactgaagacgatgttgcaaaggtttcagacatcagctttggcgttgacaagaaacaagatgacgagtacaatgctcctgatgagtacaacgcagtgtataaaattgctttgtactacaacgcagtgtataagtttgctttgtactgcttgagaccatctctggaaggcgttcatattttgacgatgatgtgctcctatattttcctttctgaataccaaattctttaatatgtcctcttgtgtggaatcaagttcctaatttagctagagcaatacttgaaa

SEQ ID NO: 5395 - DNA, 2078 bp, Zea Mays
cgataactaagatttttgtgtctaaaacattggaagtgcaaagtcaaggctcactatgtatgtagacgatatcaaggagttaaaatgttcagaagatagacctatgttcacaacttggagctgtgttaggaatgcttggggattgttggacacatttatttggcatgaggcaaacataccatatgcagtatgggaagttaccagcactcacgataattaacatactatccttcagtgctatgctcgagttaccctgtggacctaacagatcctgagtatgatcacaagtctatatttgggaggacacattctgttgtggcattcttgccaaatttaaaagctggtaaaaagaagagcttgctaggagattcaaaagagcctgaagaccaagcaccacataaggtactggctttcagggacataaacactcaagctccaacacacatcctcatcatccccaaagtcaaggatggactaactggtctgtcaaaggaaaggatgacattaaaccacaagaatacatcacaatggccaaagcacatccttaagcgtggattgtctattcaagatgaaggcactcgagctgctattgcaacacaactccaacaaaatactcttgtttatttcttcatctaggtctacgacggatccatcctgctggacaatcgctcaagcatcgtgtcagagatgttcgccacacccaacaacaactcgatgtgcgggtaccccgtagtcgatgccgtcaaggcggtgctggaggaggtttgcctaggcatcgtctcatacgttgacatactggagctgagaaagggacaaaacaaagaacgaacttcaaatcaaagctaaagaagcggatattcaaaatcttaaaaagccaccacgtggccgctcctcatcctggtgctcctcaactgcatcaagagggcatcttggggaagaagcatggtgccaccaagagcgttgtcgttcggatgtttcgcgttgttgaccagtgtgtagaggatctcaagctatcagacacagttaatgcttaatccttagagctgcatataaccaagtggtgcttacctggatttgaggacctatgatgcttgtttatctcaagagtaatgtaggccagcgagtgctcgggcagatagaagagagagagagagagagagaggagatgcagcggctcacggggcgggacatgtgggacgtggaggagtgccagagcccgcgcatgggcagcgtcatcctcggcgtcggcggcaccagcaacaccgtctgcgtctgcatccccgccgccatgcccttcaacgaccccctccccgtcctctcccgcaccgtcgccggctactccaaccacaactccgtcggagaggacagggcaagggagacgctggagagggtgatgtcgcaggcgctgctcaaggcgcgccggcgacggtcaaatgtctgcgccgtctgcttggccgtagcaggcgtcaaccatccagtcgatcagcagagaatgctggactggctcagggacatatttccaagccatgtcaagctgttcgtggagaacgacgcggtggcggcgctggccagtggaaccatgggcaagctgcacggatgtgtgctgatcgcagggacagggaccatagcgtatgggttcaccagtgatggtagggaagctcgagcagcaggtgcagggccagttctgggtgactgggccagttaacgaagtggagcacctgaactagcagtcacgtctgcaatatacacaccagcaaaacactcctgtaacactaaacagttcatgcatatccttgactgaagacgatgttgcaaaggtttcagacatcagctttggcgttgacaagaaacaagatgacgagtacaatgctcctgatgagtacaacgcagtgtataaaattgctttgtactacaacgcagtgtataagtttgctttgtactgcttgagaccatctctggaaggcgttcatattttgacgatgatgtgctcctatattttcctttctgaataccaaattctttaatatgtcctcttgtgtggaatcaagttcctaatttagctagagcaatacttgaaa

SEQ ID NO: 5396 - DNA, 1973 bp, Zea Mays
ctcaaattagaatacagataggatttcagtaaatcagatcatggacacatttatttggcatgaggcaaacataccatatgcagtatgggaagttaccagcactcacgataattaacatactatccttcagtgctatgctcgagttaccctgtggacctaacagatcctgagtatgatcacaagtctatatttgggaggacacattctgttgtggcattcttgccaaatttaaaagctggtaaaaagaagagcttgctaggagattcaaaagagcctgaagaccaagcaccacataaggtactggctttcagggacataaacactcaagctccaacacacatcctcatcatccccaaagtcaaggatggactaactggtctgtcaaaggaaaggatgacattaaaccacaagaatacatcacaatggccaaagcacatccttaagcgtggattgtctattcaagatgaaggcactcgagctgctattgcaacacaactccaacaaaatactcttgtttatttcttcatctaggtctacgacggatccatcctgctggacaatcgctcaagcatcgtgtcagagatgttcgccacacccaacaacaactcgatgtgcgggtaccccgtagtcgatgccgtcaaggcggtgctggaggaggtttgcctaggcatcgtctcatacgttgacatactggagctgagaaagggacaaaacaaagaacgaacttcaaatcaaagctaaagaagcggatattcaaaatcttaaaaagccaccacgtggccgctcctcatcctggtgctcctcaactgcatcaagagggcatcttggggaagaagcatggtgccaccaagagcgttgtcgttcggatgtttcgcgttgttgaccagtgtgtagaggatctcaagctatcagacacagttaatgcttaatccttagagctgcatataaccaagtggtgcttacctggatttgaggacctatgatgcttgtttatctcaagagtaatgtaggccagcgagtgctcgggcagatagaagagagagagagagagagagaggagatgcagcggctcacggggcgggacatgtgggacgtggaggagtgccagagcccgcgcatgggcagcgtcatcctcggcgtcggcggcaccagcaacaccgtctgcgtctgcatccccgccgccatgcccttcaacgaccccctccccgtcctctcccgcaccgtcgccggctactccaaccacaactccgtcggagaggacagggcaagggagacgctggagagggtgatgtcgcaggcgctgctcaaggcgcgccggcgacggtcaaatgtctgcgccgtctgcttggccgtagcaggcgtcaaccatccagtcgatcagcagagaatgctggactggctcagggacatatttccaagccatgtcaagctgttcgtggagaacgacgcggtggcggcgctggccagtggaaccatgggcaagctgcacggatgtgtgctgatcgcagggacagggaccatagcgtatgggttcaccagtgatggtagggaagctcgagcagcaggtgcagggccagttctgggtgactgggccagttaacgaagtggagcacctgaactagcagtcacgtctgcaatatacacaccagcaaaacactcctgtaacactaaacagttcatgcatatccttgactgaagacgatgttgcaaaggtttcagacatcagctttggcgttgacaagaaacaagatgacgagtacaatgctcctgatgagtacaacgcagtgtataaaattgctttgtactacaacgcagtgtataagtttgctttgtactgcttgagaccatctctggaaggcgttcatattttgacgatgatgtgctcctatattttcctttctgaataccaaattctttaatatgtcctcttgtgtggaatcaagttcctaatttagctagagcaatacttgaaa

SEQ ID NO: 5397 - DNA, 568 bp, Zea Mays
aataaaatcaattaccatatcgatcaagcaccacatcagcaccactagaagatgcgttggcatcagccatggtctttcctttctctgcgtgagtagcagcacgatgctcagtaggatggtcaaccacgtgcacttcatcatcgctgtccgaatcccacaacatcgcaagaattgtgtcagcgcctccacccaactcgtcgctgtcctgcgcttgctgtcttgtggagagctttctcgcgcacagcgcttccttcacacgagatggtagttgcggcagcgtgggagtcagagggtggaagctagcagcaaatttgtgggcgtcggactcttggagttggagaacagccacacggaagaagctagcagcaaatctgaccagcgctgggctgctggcgggatggagacaatctgcaaagctgcagcctgcccgtgaccgtgaagaacgctagaacaggcgaacagcagaagccagggaaaaaaaactgaacggcggcagctgggcggctggctagcaggtggcggctggagatgttttagggttccatatttacacatgagtagtattttg

SEQ ID NO: 5398 - DNA, 1721 bp, Zea Mays
ctgggcccaccgtaactgactgggtgttctttacagacacgtgacgtcgcgcaccgggcccgtctatcgagtattcggtcccattcgtcagtgctcggacacctgactaataacaaaagaactcgctccattcagagattcagagaagacccgcctctcccgtgaggccgtgacgcgacgccggatcgtcctcgtctcctagctcgtggaatgaagggaggtggcgtcatcagggccgccggcggaggtgccggcggtgcgggtctgttgcgaacgcgactgcggcttcccgtggtgctcctctcctgctccctcttcttcctcgccggcttcttcggctcgctcctcttcacccaggatccggaggaggcggatatgccggtgccgagagagcggctgttggaggcggcgtggccggagatgccttacggcgagtccggcgaggctgcgccgtccttgatcccataccagattttgagctggcagcctcgtgctttgtactttccacaatttgcgacatcagaacagtgtgaaaatatagtaaaaacggcaaaggagagacttaagccatcaacattagccctgaggaaaggagaaaccgcagagagtacaaaaggaatcaggacaaggtaaccttaaagtccaagagtaagtgcagtaaaggaatagccaaataggttgacaaataactccacatttgttactgtggagagatcgtgcagtagctttctctgtggattgtacctatgctacaatgagcaatgccttctctgaagtcaggactgcctatttttaggagcatgtgttgtgttagtattcttgatctttagagttttcatgaaggatagtttcagaaatttttgtaccaatttatcttccacacacaatcatgaaaataactagcctgtggcattatatttgtttcattgaactgatggatccttatgccaaacagttcgggaacattccttagtgctaatgaagacccaactgaaacccttgcggaaatcgagaagaagattgcaagggctaccatgttacccagaaatcatggggagccatttaatgtcctgcggtataatattggacaaaggtatgcttcacattatgacgcatttgacccagctcagtatggtccacaaaaaaatcaaagggtggcatctttcttgctttatctcacggatgtcgaagaagggggagaaactatgttcccatacgagaacagtgagaatatggatataggctatgactatgagaagtgcattggcctaaaggtaaaaccaaggaagggtgacggactcttgttttactcccttatggtaaatgggaccattgaccggacttcacttcatggtagctgccccgtcatcaaaggcgagaaatgggtcgccaccaaatggatcagagacaatatagtgtagaaatcgaaaggctcaggtgtcatgtgccctccaaaaaaatagatcatgcgcacatatactgaccatatacttcagtgtttgttcaattgccatggacagttggaccaacggaaggaaagtgtaaccaatctatttgcatcgtgtcaatatatagcctacaacttacatgtggccaagtggcaagtggacattccatgatctctttccttttccgagatccctttttcttttccgaattcgtgctgtattgtcatacccttccatcggcactaaatagtagaaacgttcgattgcactgcc

SEQ ID NO: 5399 - DNA, 1390 bp, Zea Mays
ctgggcccaccgtaactgactgggtgttctttacagacacgtgacgtcgcgcaccgggcccgtctatcgagtattcggtcccattcgtcagtgctcggacacctgactaataacaaaagaactcgctccattcagagattcagagaagacccgcctctcccgtgaggccgtgacgcgacgccggatcgtcctcgtctcctagctcgtggaatgaagggaggtggcgtcatcagggccgccggcggaggtgccggcggtgcgggtctgttgcgaacgcgactgcggcttcccgtggtgctcctctcctgctccctcttcttcctcgccggcttcttcggctcgctcctcttcacccaggatccggaggaggcggatatgccggtgccgagagagcggctgttggaggcggcgtggccggagatgccttacggcgagtccggcgaggctgcgccgtccttgatcccataccagattttgagctggcagcctcgtgctttgtactttccacaatttgcgacatcagaacagtgtgaaaatatagtaaaaacggcaaaggagagacttaagccatcaacattagccctgaggaaaggagaaaccgcagagagtacaaaaggaatcaggacaagttcgggaacattccttagtgctaatgaagacccaactgaaacccttgcggaaatcgagaagaagattgcaagggctaccatgttacccagaaatcatggggagccatttaatgtcctgcggtataatattggacaaaggtatgcttcacattatgacgcatttgacccagctcagtatggtccacaaaaaaatcaaagggtggcatctttcttgctttatctcacggatgtcgaagaagggggagaaactatgttcccatacgagtgagaatatggatataggctatgactatgagaagtgcattggcctaaaggtaaaaccaaggaagggtgacggactcttgttttactcccttatggtaaatgggaccattgaccggacttcacttcatggtagctgccccgtcatcaaaggcgagaaatgggtcgccaccaaatggatcagagacaatatagtgtagaaatcgaaaggctcaggtgtcatgtgccctccaaaaaaatagatcatgcgcacatatactgaccatatacttcagtgtttgttcaattgccatggacagttggaccaacggaaggaaagtgtaaccaatctatttgcatcgtgtcaatatatagcctacaacttacatgtggccaagtggcaagtggacattccatgatctctttccttttccgagatccctttttcttttccgaattcgtgctgtattgtcatacccttccatcggcactaaatagtagaaacgttcgattgcactgcc

SEQ ID NO: 5400 - DNA, 2942 bp, Zea Mays
caaccacgccatgtggaggttgcgatcgcagcgcacacatgttcgcgtcgccggcggccagctagccatgccgcatacgcccaccggaccggacacgcagggcgcatgtgtctccgcagtcgcaccgcacgggccccgctctcgccatccgccctagcgcacgcatctcggcgcgtgcccccaacggagccgtccatgacgtaccgcgcgccgccgcctccgcgcattaaaaaccatcgatcactgaccggctcccgaggagacttggcttgtactgcatcgcaaaccgcaatcgcacgcggcacttgccccccgcgatcataacctcaccgcccgccaccagctgcagccacaagcgcagcgctcgacagcctcaccagccgccatcactcgcggcagtacccggccgctgggactgcaagagtggggagtgagacgctgctgctgttgccgagcgcgaggagacactactactcactcaagagtcaagactcaacagcagcaggggcgaccgagctctgcgtgcgtggggagaaccggagaaggcagcagaggagggagggagggagcgcgtggaccaggctaggcgcagcagcatgggcgccgggatcagggtcctggcggcgctcttggcggcgctcgcggcagccaccgccggcgtgacggcgcagctgcggcaggactactacgcggcggtgtgcccggacctggagagcatcgtgcgcgccgcggtgtccaagaaggtgcaggcgcagcccgtcgccgtgggcgccaccatccgcctcttcttccacgactgcttcgtcgaggtgcgcgcttcctcttcctcttcctcgacgactgcctgtgtttctgacggaccggggcgactggcgatgcttcaacttcccgcgtgcatgcagggctgcgacgcgtcggtgatcctggtgtccacggggaacaacacggcggagaaggaccacccgagcaacctctccctggccggcgacggcttcgacaccgtcatccaggccaaggcggccgtggacgccgtgccggcgtgcgccaaccaggtgtcgtgcgccgacatcctggcgctggccacccgggacgtcattgagctggctggcgggccgtcgtacgcggtggagctggggaggctggacgggctggtgtccatgtccaccaacgtcgacggcaagctgccgccgccgtccttcaacctggaccagctgacgagcattttcgccctcaacaacctgtcgcaggccgacatgattgctttatctggtgagcaaattactaccgctccagtgcgttcttcttttttcccccttcaacagctgctgtatcagcgtcagcgaagtacgcaggctagattccgttccatgtctttcaagtcaagcaaagggcccgcccaacggaccaaggccaacgctcccagcgccgcaattaactgcaaacgttttattattagtggtctctcgaagcatccgtagcgcccatagaaaatgcattatcccccctagccctaggttagtagtagtacagtggagtgtgtgtgtgtgtggcactgcagctggtcgctcgtagtcgtagatctgaaacgagtcaaccgtggcgactgtctctgtctggaatgctggctcggtagccgtgcttgcttgcacagatgcacgtgaaagaccggccagcatcgcattattgataccataccatggcctctggctgaactgagctgacgtggcgttggggttccttcctcatcggctcatcctcttgcacagcggcgcacacggtggggttcgcgcactgcagcacgttctcggaccggatccagccgcagtcggtggacccgacgatgaacgcgacgtacgcggaggacctgcaggcggcgtgcccggcgggggtggacggccgggggctcttcgcctccgaccaggtgctcttctccgacgcgcggtcgcagcccaccgtggtggcgtgggcgcagaacgccaccgccttcgagcaggccttcgtcgacgccatcaccaggctcggccgcgtcggcgtcaagaccgacccgtcgctgggggacgtccgccgcgactgcgccttcctcaactgaaaaaggatgataagcgctagctagtaggtgtaagcatcggctggcactcacctggaggaagaggccggcttttggtcagtggtgacatctgatggatgtccaatcacgcaggatgccaaaaggcccacgcctacgcatatgaacggtgaaatatagcgaactctaaatagcaaacactgctggagggctcttggacgctaagaaacgctacatcttctcgcaccttactttgttgttcttactttatagtttgatttgtggaatggaataagttaattcatcaatatttcatttctcattaactaataatcaataataatataaggaataagttcatttatagaataaactcattatacatcatatcttatcatttagaatggattaattgttcgaaccaaacactccgtgaaggaccgttggtggacaagccagctagcgtcaaaagctgcgttccgacggctgtgcatgacagtgggactccattgccggatgagtcagtcagcgcgtgcaaggagcaaggccggccgaccccggtggatgctagttgctagcctggttggactagtggggtgtgactgttcacacatacgcacgcgggccgacgcggacagggcgcgtccaaggcggactcactaggcctgggcattcggttcttcggttcggttcagttcggtttctcggttcttgtagaaattcggttcttcaaaaattagaaccgaaatagcaagataaagaaatcagaaccgactagttcagttctcggttcttcggttcggttcctcggttctaaccgaactgtaacagccaccctaaaattatgaataacgacaacttttgtgagaaatttcag

SEQ ID NO: 5401 - DNA, 2219 bp, Zea Mays
cctcaaaccccagagccccaaaaccaccgggagactccgcgagatctgaactccatggtggccgccggggcagcagcggccgcgccccggctgaacccgtcgccgtccccgcaccgccgccgagcttcctccgcgctctccccggcaaagtccaacgccaacgccaacaccaacgccggcgacgcgcggcccaagcccaaggctaaggtcgtctcctcccgctacctcgcgcccttctccaggtccacctccagctcgacctccacctccacctccaccaccaccaccacttcgagctccaactccacctcgacatcgtcgtccacgccctcccgccgcttcgcgtcgccgctgccgaggcgctcggtctccgtcgaccgcccgcgcccagccccggctggcaatgctgccgtcggggagactgggggacccaaagcgggcaccaccaccaccacgaggagcctctccgtggcgttccagggccggtccttctccttcgagacgagcaaggcgaagccggccacgtccccgtctccgtcgcggcgaccagtggcttcggcggcgggggccatcacgccggagaggactcgtccaactatggggacagtgccggagagggggaagggttttgagggggtccatgctcaccacaggtggccaatgtcggcgaggctgtcgcaggggtttgaggggaacccgcttaccaaaagcttggattgctctttgcacaagagggacgctgctgtacttgctgctgtccggtcgctgcggcagtccatggtgtttgaggagggggcacggcgatcctcgttcgacagtggggactacttgatgtcgtcggacacagagagtgtgtcatctgggagcaattcagggtctcaggatgcaggtatcggcatttcgcacagagcacgaccatccccaaagggtatgagtgtgccagcacggttcttgcaggatgctgcagtcagcaggtcacaaagattcacagatcctggcacaccatacttggcgtatacctctgggttggctgcatctccaaggacagcgccggttaagaagtcactgcaaaatggctttgtttcgtccccactgaaccggtcagtcaggcaatcttcaccaagtaagcttaccggcaatccatcgaggagggtgtcaagcccatcacggtcgagaaattgtgtggggtcgggcacttcatcttgggatcaccagggaagaaactcatctggatctggttatgctttgaatggtgaagtgaggaggaggtggcatgggggtagtaaggttgactgtgagcatctgttgagaattttatccaatcgacatttgcagtggcggtgtgtgaacgcacaggctgaagctgcactttctgcacaaaaaatgacagcagagggatgcgtaaatctgttgctcttaagaggttccagctacagttataccggaacaattggaagctcatgacagttctaaagggacagatggggtatctagaagaatggtctttgttagagagggactatgtggattctctatctgtaactgtggatgctctaactgccagcattttgtgccttcctgtcactgatggagcaaaggctgatatccaagatgtgaaaaatgctgttggttctgctgttgatatcatgcaaacaataggaagctcaatatgttcattattagctaagctggctggaacaagtattttggtttctgatctttccaaagttgctacccaagagcgcactctaatggagcagtccagagaattgctgtccacactcgcaacaatgcatgtcaaatactgtagcctacaagggcagagagtacaggcaactgacaggagctccatgcatccctagccagactactataaccccccactaaccgaagaatgtaggtgcaactgcaaattctggtggcttggctggtgcccacagagcaatcctgactcatccgaagatgctatctaggctaggctagttccagtggtcttggtggctatggcccccctagttctggttgctgatttgatgtatgctaaccaatgcagaacagatggcatgcgccatgtgtatagatgtacctcatttgttggttttagtcgaggattaggtcagatgctaactagaaagattgggttccttttgttcatcagcagatgactaacgactaccagggaaatgcaatataacttctagcggtacgttggattcctt

SEQ ID NO: 5402 - DNA, 2185 bp, Zea Mays
cctcaaaccccagagccccaaaaccaccgggagactccgcgagatctgaactccatggtggccgccggggcagcagcggccgcgccccggctgaacccgtcgccgtccccgcaccgccgccgagcttcctccgcgctctccccggcaaagtccaacgccaacgccaacaccaacgccggcgacgcgcggcccaagcccaaggctaaggtcgtctcctcccgctacctcgcgcccttctccaggtccacctccagctcgacctccacctccacctccaccaccaccaccacttcgagctccaactccacctcgacatcgtcgtccacgccctcccgccgcttcgcgtcgccgctgccgaggcgctcggtctccgtcgaccgcccgcgcccagccccggctggcaatgctgccgtcggggagactgggggacccaaagcgggcaccaccaccaccacgaggagcctctccgtggcgttccagggccggtccttctccttcgagacgagcaaggcgaagccggccacgtccccgtctccgtcgcggcgaccagtggcttcggcggcgggggccatcacgccggagaggactcgtccaactatggggacagtgccggagagggggaagggttttgagggggtccatgctcaccacaggtggccaatgtcggcgaggctgtcgcaggggtttgaggggaacccgcttaccaaaagcttggattgctctttgcacaagagggacgctgctgtacttgctgctgtccggtcgctgcggcagtccatggtgtttgaggagggggcacggcgatcctcgttcgacagtggggactacttgatgtcgtcggacacagagagtgtgtcatctgggagcaattcagggtctcaggatgcaggatgctgcagtcagcaggtcacaaagattcacagatcctggcacaccatacttggcgtatacctctgggttggctgcatctccaaggacagcgccggttaagaagtcactgcaaaatggctttgtttcgtccccactgaaccggtcagtcaggcaatcttcaccaagtaagcttaccggcaatccatcgaggagggtgtcaagcccatcacggtcgagaaattgtgtggggtcgggcacttcatcttgggatcaccagggaagaaactcatctggatctggttatgctttgaatggtgaagtgaggaggaggtggcatgggggtagtaaggttgactgtgagcatctgttgagaattttatccaatcgacatttgcagtggcggtgtgtgaacgcacaggctgaagctgcactttctgcacaaaaaatgacagcagagaagtacttatctgatgcgtggattactaccctagggatgcgtaaatctgttgctcttaagaggttccagctacagttataccggaacaattggaagctcatgacagttctaaagggacagatggggtatctagaagaatggtctttgttagagagggactatgtggattctctatctgtaactgtggatgctctaactgccagcattttgtgccttcctgtcactgatggagcaaaggctgatatccaagatgtgaaaaatgctgttggttctgctgttgatatcatgcaaacaataggaagctcaatatgttcattattagctaagctggctggaacaagtattttggtttctgatctttccaaagttgctacccaagagcgcactctaatggagcagtccagagaattgctgtccacactcgcaacaatgcatgtcaaatactgtagcctacaagggcagagagtacaggcaactgacaggagctccatgcatccctagccagactactataaccccccactaaccgaagaatgtaggtgcaactgcaaattctggtggcttggctggtgcccacagagcaatcctgactcatccgaagatgctatctaggctaggctagttccagtggtcttggtggctatggcccccctagttctggttgctgatttgatgtatgctaaccaatgcagaacagatggcatgcgccatgtgtatagatgtacctcatttgttggttttagtcgaggattaggtcagatgctaactagaaagattgggttccttttgttcatcagcagatgactaacgactaccagggaaatgcaatataacttctagcggtacgttggattcctt

SEQ ID NO: 5403 - DNA, 708 bp, Zea Mays
gtgcattgcttttgctctcgcagacgtgctcgcacgcggcggcgagcccgatagattgactgaattgagccctacgaccctcaatctcccccgcacgcccgcgccgcggtttctatggcctggggcgccctgcgcagccgtgtccttccgctcccggcacccgccgccaccgccgcgccccacggtctcttcctacgcttccttctctccaccgcggtcccgcaccacgggcaccaccaccggcgccgccgcctcgcccccacggcctacgccgccgccgcggcagctgcggctgaggcgccgctccccatgacgccgcgcttcgggcgggccacgcggcaacccggtggcgccgcctcggtggcgcgcgtctacgccgacgctaacgcccagcgccccaaggagtactgggactacgagtcgctcgacatccagtgggggaagcaggatgggtacgaggtgctgcggaaggtggggagggggaagtacagcgaggtgttcgaagggttccgggccgggagcgatgagagatgcgtcattaagatcctgaagcccgtgaagaagaagaagagatgatgaatcaaagacacctagtctgatctttgaacatgtcaacaacactgacttcaaagtactctaccctgcgttatctgattatgatatcagatactatatttttgaattattgaaggcaagaatctgaacctc

SEQ ID NO: 5404 - DNA, 715 bp, Zea Mays
gttattttagctaatatagtttataaatataaggcatatcgtaacagaggtaaacctcttaatgccatgcaacttacttggtgtaacttgttagcccctttgatcttattgtgcacacagaaaaaagataacaaattttatgagatagttccttgcctttgtttgcataagtactttggccgataagctggtgttgactaatcattgtatgttgattagtggatattagaatatggtacctctgcatctgtttggagctttagatgctctcattgagtattgagtcacttatggaacagcaattgaacctgcagaaaataatgcagatgacttacaataccttattttcttgaatatcacagttcataaattattattagattatgattagtcattgacatatactccctctgtccgcaaaagaatgcaactatgacatttgtgcccgtttaagtagttcaaatttgaccaagtttacagtgaatagtatttacatttatgtcttcaaatcagtttattatgaaagattgaaagtatatttcataattgatctaatgatatttattttgtaccataaatgttagtattttttcatacgattatggttaaacttgaaagcatttggttcctcgaaatgtgaaaattgcattatgttgtgggtggagagagtaatatcattcctgtaaaccaaatttagatatgcgtgatcaagtca

SEQ ID NO: 5405 - DNA, 2912 bp, Zea Mays
atcaacggagcttagcctgggcagcagtgagcagccgccttcccctgtgctgcggatcgctacactacaccaccactcaccactcagttactcaccacacatccatccaactatccaagcccacagtgaggcagtgagcagcatcccctctcctgtagggggagtctgtagtagcaacctgttgtcgatcctactcatcagtcatcttccctgcgcaaagcctgcagctttaccaccgccgccgccgccgccgcctcctctccttcgaaagcgcgcctcctgctagctggctgtcctgagctcgggcctgtcccgcgcacgcaatcgcgccctgcctagcaagctagacaggcgccgccagttattgcaccgggtgcgatatcgcgctagccgcggagtgcggagtagtgggcggcggataggctgcgccgctactccttcgtgcgtgtgtggggaggattagtaactgtagaggaaggcaggcacgcaaaaggacgccctcgcctccgcctcccgcccgcgcactcacgtgattcatacttgcggccttctcgctcgctcccttcttcatcaccacccctctcgcgccgcagcgggcgggcaactactatatcaagcaccaaattaaacccacccagctcctctctcgccccttcgttcctgggagaccgtaccggccggccgcgggagatggtcgaggcgccggccgtcgtggtggtggtgcgggcgtacgacgccgcgcgcgaccgcgtcggcgtggaggaggtggagcgcgcgtgcgaggtcgggtgcagcggcggcggcaagatgtgcctcttcacggacctcctcggcgacccgctctgccgcattcgccactcgccggactccctcatgctggtacgtgtacacgtgcgtacgtgctgtgctcgcgcgctctctgtctgctctatacacccacgttgtggtcgtggctgcctgcggctaagcacaggcccagcggccggccggccagatgcagcaggtgtgagatgagccgctggggctggggctgggctcgcccgacctagcctaccacctgtcctgcgcccgtccccccatgcctcccgccctcgtctccttccgcctcgtcgtgtttcgttttcgtttcgtttcgtttcgtttcttctcgttccggttccggcgccccgtacgtagtacgacgtgggtcccggccggacggaggaaacaggaaggaactcaactgaaattaatggactgcccgcgaaacgcatgtctgaacggccgggatatgcattggaaaagcaggtcgcagagacagcaaccggccccaacagcacggagatcgccggagtcgtccgcggctgcgtcaagaccgtcgtctctgctggcaccaccaccacccagcaggctaataaggacgaccccatctacaccaaggttggctacatcctcggcctccgcgtctcgcccagccaccggaggaaaggggtggggaagaagctggtggatcgtatggaggagtggttccggcaaaggggggccgagtactcgtacatggcgacggagcaggacaacgaggcgtcggtgcggctgttcacgggccgctgcggctacgccaagttccgcacgccgtccgtgctggtgcacccggtgttccggcacgccctgaggccgtcccggagcgcggccatcgtggccctggagccgcgggaggcggagctgctgtaccgctggcacttcgccggcgtggagttcttccccgccgacatcggcgccgtgctatccaacgcgctgtcgctgggcacgttcctggcgctgccgtcgtcgccggcgcggtgggagggcgcggaggcgttcgtggcggcgccgccggcgtcgtgggccgtgctgagcgtgtggaactgcatggacgccttccggctggaggtgcgcggggcgccgcgcctgatgcgcgccgcggcgggcgccacgcggctggtggaccgcgcggcgccgtggctcgggatcccctccatccccaacctgttcgcgccgttcgggctctacttcctctacggcctgggcggcgccgggcccgacgcgcccaggctcgcccgcgcgctgtgccgcagcgcgcacaacatggcgcgcgacggcgggtgcggcgtggtggccaccgaggtcggcgcctgcgagcccgtccgcgccggggtgccgcactgggcgcggctaggcgccgaggacctctggtgcatcaagcggctcgcggacggctacggctccggcccgctcggcgactggaccaaggcgccggccagacgctccatattcatcgacccgagggagttttaggctgataagtagtaaatacacttaggcctagctttagggtttttttttggttctccccgggtcgtcgtccgttggatcccgtatccgacggctcctagtagctagctctagagaaggtcccacccttttgtgtttcgtttcaaaacatgtggtaacgcgcgcttgcttaggcgtaatttctgctagcgaaccgaattagttaaccttttcgatcttttgattgatgcatgtgaaacacacagctgctacaccctttttagttgttgtaactcgttggtggaccagggtggagaccagggccagtaccttctcctttttgggtccatcagagattaagctgagaccgcgttgagacaacgatctggacaggagctgagaacatgatttcccacttctgcctctttttttttttttggttttcgtagtattgttctttacggggattatctcggatgttacgtttggcaaaagtattattgcaatcacacggaaaataagcatgatcgtggtggtgatggtggtcgtggttttgtttgtttgccaaatgatgacacccatgattggtttgaagatcatgaagctagatcatgtacaaggtg

SEQ ID NO: 5406 - DNA, 3475 bp, Zea Mays
ctcatttactttacaataaaattcagaataaatataaaaaattcactcatacgcaaaagagtaggagtgctaaaatctctactactatgaagaacgcaagaggtaggttgtctccttggttctgccattctgccatcgatgaatttagaccgtccacgcgtgatccaaccgcgctccgcccctgaccccaacccgctcattcccctccccatcctctctttctccctcgcgcttgactcccctgccaccccttcccgtctccaccccgacgccgaccgcactccgctccccgtccaccatcccagcgtgatggctgggaggaccgcgcctgccccctcccctccttctctctcacgccctactccctcgccgccccttcatcccagatctcgtcatgggcgctaccatgaccaacagttcggtggagcaggcgccgcacgctacgccatgggacggagcccgtccccacccgacaccgaccatctccaccccgagcccgtccgagaagtgagtgatttccatttcttcgattggatggcgtgcggtcgggcctccgcacctccctgtccccctcccctcctgcggcgatagcttcctcgaggagatgagcgtgccgcccccatgatcggtctacctccgccgcccccgcgcgcaccgcaaccaccacgcccctcgtgcaccttctcgcccgagaaggtggtttcctttggtgtccccacgtgtttttgtcgttgcaagttgaactcgccctttcatgcctgatattttgctcagactgcattggagaatggctacacaaagatcatgctgccaacatgtgcttctggaatagcatgccctatgctatctgcaactataaaggctaagctttaccagccgatgtcctgtatgtcgatgcacgatgggaggtacttgtggttcttcaacttcatggttgtctggcctagccgccatccgcccgcgcaaacgcggtacagctccactacagcagcaggaggcggtgacgtcgccaaaggctggcagatacttgatggctcttgataagaagcctattgcaactaaaggccaccacctttgttgtcctcaccctagccgaggacctcatctcccagctattagattcagtggcgacaaaatggtccattagtggaaacaccaagcatcatggagagctgtttcgtcaggagcttcgaacgcgagccatagacggggagttgatgccactgggcttatgggctcttcttttgggcaccaaagcaaagagcagtggataatatttggaatggtcataagtcaaactagacttccctagcgacagcgattcaacgaataagaaccaggccaacatgagaccgagagcatgaggcttcagtacctgtctactaacatcagatgcattagttgatgtcttgattagttgtagcagggaaccagcttccagtgcctcttgtaccgatcatcagcaagggagtgctagaggaggaggttatggtgagttttgtcgcgactaatggtgagcccacgactacggccacatcaaagctggtctggtggaacctcgtggagcagatgacgatgacgccgacatcctgcacctctgctgcgacgctgccgaccaggacgcgggcccctccgtcgcgcgcgctctacaagtctggatccatcatcgtgctcggcaagactgacttccttaggccagacatgtggcctgattagctacaagaagctcttgttccatggactcgatctctggaccgcactatcgttgcctcaacccctaggtcgtgctgccctctggcctcctcatcgtacaattcaccaacatctccaacgtaagtgcagcaggttcagtaatgaactcaaaagtggcatcagaatactctaagagttttttgttctttttgcctggatatataccgagggcaatgcattcaaaactcctatagatgacgaatcccatctctccctcttttcccggacatcgatcccagtctcttcttcaagcaagagatggagctttccttggtcgggctccaaaatgctaggaaaacatcacttgcagcagctcgcagcgacacccccgcctcctcatcatggaagttgtatctgtttcagaataagcaagtgtcgtatttagtaaaccagctcgtgttctaattcttttgcatgcttccattttgttgtaggctacaagaacactttgagtaggtgaagaggatttgcgacactaccacattgtctttggccatgcatcatctcagtgataagataacaagccaactagatatttcaaaattgactgacaagctacagtaagggaaggtagactcaactgcattgacaccaaaggagaagtatgaaacttggaaggagattaaaattatgagtttcagaaaaatagtttctccaatgtgggcaatgacattgcttagcttgtatgttagagttcatgtcaccatattaggcagaatctgacgcctttaatgtaaatggacacaagaccttcgttgcaatggatgattatcttgtcactgacaaaatcactgcattcatagtgcaaacgcaacatgcagcaactgaagtccttaaagaaaagcaaccaaaagactgtatgaaatggaccaagtattgcagacaatattacaaatattggacacgttcatggctctttctgaagatactcatggagaaattatcttgtacctgagaatcccccttatttttgcacaattgatggttgtgtcctgtagtggctttgataattcatcactcctaaacgattttagaaagctataccaactaatgtgtggaggacctgggcaaggggtggtagtcgcgctggttcgctatccacggcggcaagccgcctactcgaagatcccacctccgaggacgccgctacggggaggacatgggcactaatcttgaactaaaactaggggggtgtctatgacggctggttccgcctacaaccacgtggacaacttcttgcccgacatcatctcccagcttgttccacctacaaccgcgtggacaacttttcacccgacatcatctcctagctcctcgcattcgccaacaagttctgctatgagggcttgaagccaacctacgacaatcgggtcacaaccatggtgttggctcttgacgacgcctgatccctcatcgacatcggcctctaggaggcctcccacctcctcgtcacctcgtgcctctagcattcctatgggagcccccaaagtcactcacccacctagacatcgcccgtgttgttatttggtggtcagtatgtcacaatatagtcagttttttttgcttatgttgttggtactgattttattggatgtgaatttatttatcctttcattgtatattggaattcatgacattatctacatatgtacatgcttacatatctattatatttttgtataaatatttttttgatagtttttaatttgtatggcaaagcaag

SEQ ID NO: 5407 - DNA, 3236 bp, Zea Mays
ccgctcattcccctccccatcctctctttctccctcgcgcttgactcccctgccaccccttcccgtctccaccccgacgccgaccgcactccgctccccgtccaccatcccagcgtgatggctgggaggaccgcgcctgccccctcccctccttctctctcacgccctactccctcgccgccccttcatcccagatctcgtcatgggcgctaccatgaccaacagttcggtggagcaggcgccgcacgctacgccatgggacggagcccgtccccacccgacaccgaccatctccaccccgagcccgtccgagaagtgagtgatttccatttcttcgattggatggcgtgcggtcgggcctccgcacctccctgtccccctcccctcctgcggcgatagcttcctcgaggagatgagcgtgccgcccccatgatcggtctacctccgccgcccccgcgcgcaccgcaaccaccacgcccctcgtgcaccttctcgcccgagaaggtggtttcctttggtgtccccacgtgtttttgtcgttgcaagttgaactcgccctttcatgcctgatattttgctcagactgcattggagaatggctacacaaagatcatgctgccaacatgtgcttctggaatagcatgccctatgctatctgcaactataaaggctaagctttaccagccgatgtcctgtatgtcgatgcacgatgggaggtacttgtggttcttcaacttcatggttgtctggcctagccgccatccgcccgcgcaaacgcggtacagctccactacagcagcaggaggcggtgacgtcgccaaaggctggcagatacttgatggctcttgataagaagcctattgcaactaaaggccaccacctttgttgtcctcaccctagccgaggacctcatctcccagctattagattcagtggcgacaaaatggtccattagtggaaacaccaagcatcatggagagctgtttcgtcaggagcttcgaacgcgagccatagacggggagttgatgccactgggcttatgggctcttcttttgggcaccaaagcaaagagcagtggataatatttggaatggtcataagtcaaactagacttccctagcgacagcgattcaacgaataagaaccaggccaacatgtagtgagaccgagagcatgaggcttcagtacctgtctactaacatcagatgcattagttgatgtcttgattagttgtagcagggaaccagcttccagtgcctcttgtaccgatcatcagcaagggagtgctagaggaggaggttatggtgagttttgtcgcgactaatggtgagcccacgactacggccacatcaaagctggtctggtggaacctcgtggagcagatgacgatgacgccgacatcctgcacctctgctgcgacgctgccgaccaggacgcgggcccctccgtcgcgcgcgctctacaagtctggatccatcatcgtgctcggcaagactgacttccttaggccagacatggatcccataaccagatggacagccacaaagaaaagtggcctgattagctacaagaagctcttgttccatggactcgatctctggaccgcactatcgttgcctcaacccctaggtcgtgctgccctctggcctcctcatcgtacaattcaccaacatctccaacgtaagtgcagcaggttcagtaatgaactcaaaagtggcatcagaatactctaagagttttttgttctttttgcctggatatataccgagggcaatgcattcaaaactcctatagatgacgaatcccatctctccctcttttcccggacatcgatcccagtctcttcttcaagcaagagatggagctttccttggtcgggctccaaaatgctaggaaaacatcacttgcagcagctcgcagcgacacccccgcctcctcatcatggaagctacaagaacactttgagtaggtgaagaggatttgcgacactaccacattgtctttggccatgcatcatctcagtgataagataacaagccaactagatatttcaaaattgactgacaagctacagtaagggaaggtagactcaactgcattgacaccaaaggagaagtatgaaacttggaaggagattaaaattatgagtttcagaaaaatagtttctccaatgtgggcaatgacattgcttagcttgtatgttagagttcatgtcaccatattaggcagaatctgacgcctttaatgtaaatggacacaagaccttcgttgcaatggatgattatcttgtcactgacaaaatcactgcattcatagtgcaaacgcaacatgcagcaactgaagtccttaaagaaaagcaaccaaaagactgtatgaaatggaccaagtattgcagacaatattacaaatattggacacgttcatggctctttctgaagatactcatggagaaattatcttgtacctgagaatcccccttatttttgcacaattgatggttgtgtcctgtagtggctttgataattcatcactcctaaacgattttagaaagctataccaactaatgtgtggaggacctgggcaaggggtggtagtcgcgctggttcgctatccacggcggcaagccgcctactcgaagatcccacctccgaggacgccgctacggggaggacatgggcactaatcttgaactaaaactaggggggtgtctatgacggctggttccgcctacaaccacgtggacaacttcttgcccgacatcatctcccagcttgttccacctacaaccgcgtggacaacttttcacccgacatcatctcctagctcctcgcattcgccaacaagttctgctatgagggcttgaagccaacctacgacaatcgggtcacaaccatggtgttggctcttgacgacgcctgatccctcatcgacatcggcctctaggaggcctcccacctcctcgtcacctcgtgcctctagcattcctatgggagcccccaaagtcactcacccacctagacatcgcccgtgttgttatttggtggtcagtatgtcacaatatagtcagttttttttgcttatgttgttggtactgattttattggatgtgaatttatttatcctttcattgtatattggaattcatgacattatctacatatgtacatgcttacatatctattatatttttgtataaatatttttttgatagtttttaatttgtatggcaaagcaag

SEQ ID NO: 5408 - DNA, 3147 bp, Zea Mays
cgctcattcccctccccatcctctctttctccctcgcgcttgactcccctgccaccccttcccgtctccaccccgacgccgaccgcactccgctccccgtccaccatcccagcgtgatggctgggaggaccgcgcctgccccctcccctccttctctctcacgccctactccctcgccgccccttcatcccagatctcgtcatgggcgctaccatgaccaacagttcggtggagcaggcgccgcacgctacgccatgggacggagcccgtccccacccgacaccgaccatctccaccccgagcccgtccgagaagtgagtgatttccatttcttcgattggatggcgtgcggtcgggcctccgcacctccctgtccccctcccctcctgcggcgatagcttcctcgaggagatgagcgtgccgcccccatgatcggtctacctccgccgcccccgcgcgcaccgcaaccaccacgcccctcgtgcaccttctcgcccgagactgcattggagaatggctacacaaagatcatgctgccaacatgtgcttctggaatagcatgccctatgctatctgcaactataaaggctaagctttaccagccgatgtcctgtatgtcgatgcacgatgggaggtacttgtggttcttcaacttcatggttgtctggcctagccgccatccgcccgcgcaaacgcggtacagctccactacagcagcaggaggcggtgacgtcgccaaaggctggcagatacttgatggctcttgataagaagcctattgcaactaaaggccaccacctttgttgtcctcaccctagccgaggacctcatctcccagattcagtggcgacaaaatggtccattagtggaaacaccaagcatcatggagagctgtttcgtcaggagcttcgaacgcgagccatagacggggagttgatgccactgggcttatgggctcttcttttgggcaccaaagcaaagagcagtggataatatttggaatggtcataagtcaaactagacttccctagcgacagcgattcaacgaataagaaccaggccaacatgtagtgagaccgagagcatgaggcttcagtacctgtctactaacatcagatgcattagttgatgtcttgattagttgtagcagggaaccagcttccagtgcctcttgtaccgatcatcagcaagggagtgctagaggaggaggttatggtgagttttgtcgcgactaatggtgagcccacgactacggccacatcaaagctggtctggtggaacctcgtggagcagatgacgatgacgccgacatcctgcacctctgctgcgacgctgccgaccaggacgcgggcccctccgtcgcgcgcgctctacaagtctggatccatcatcgtgctcggcaagactgacttccttaggccagacatggatcccataaccagatggacagccacaaagaaaagtggcctgattagctacaagaagctcttgttccatggactcgatctctggaccgcactatcgttgcctcaacccctaggtcgtgctgccctctggcctcctcatcgtacaattcaccaacatctccaacgtaagtgcagcaggttcagtaatgaactcaaaagtggcatcagaatactctaagagttttttgttctttttgcctggatatataccgagggcaatgcattcaaaactcctatagatgacgaatcccatctctccctcttttcccggacatcgatcccagtctcttcttcaagcaagagatggagctttccttggtcgggctccaaaatgctaggaaaacatcacttgcagcagctcgcagcgacacccccgcctcctcatcatggaagctacaagaacactttgagtaggtgaagaggatttgcgacactaccacattgtctttggccatgcatcatctcagtgataagataacaagccaactagatatttcaaaattgactgacaagctacagtaagggaaggtagactcaactgcattgacaccaaaggagaagtatgaaacttggaaggagattaaaattatgagtttcagaaaaatagtttctccaatgtgggcaatgacattgcttagcttgtatgttagagttcatgtcaccatattaggcagaatctgacgcctttaatgtaaatggacacaagaccttcgttgcaatggatgattatcttgtcactgacaaaatcactgcattcatagtgcaaacgcaacatgcagcaactgaagtccttaaagaaaagcaaccaaaagactgtatgaaatggaccaagtattgcagacaatattacaaatattggacacgttcatggctctttctgaagatactcatggagaaattatcttgtacctgagaatcccccttatttttgcacaattgatggttgtgtcctgtagtggctttgataattcatcactcctaaacgattttagaaagctataccaactaatgtgtggaggacctgggcaaggggtggtagtcgcgctggttcgctatccacggcggcaagccgcctactcgaagatcccacctccgaggacgccgctacggggaggacatgggcactaatcttgaactaaaactaggggggtgtctatgacggctggttccgcctacaaccacgtggacaacttcttgcccgacatcatctcccagcttgttccacctacaaccgcgtggacaacttttcacccgacatcatctcctagctcctcgcattcgccaacaagttctgctatgagggcttgaagccaacctacgacaatcgggtcacaaccatggtgttggctcttgacgacgcctgatccctcatcgacatcggcctctaggaggcctcccacctcctcgtcacctcgtgcctctagcattcctatgggagcccccaaagtcactcacccacctagacatcgcccgtgttgttatttggtggtcagtatgtcacaatatagtcagttttttttgcttatgttgttggtactgattttattggatgtgaatttatttatcctttcattgtatattggaattcatgacattatctacatatgtacatgcttacatatctattatatttttgtataaatatttttttgatagtttttaatttgtatggcaaagcaag

SEQ ID NO: 5409 - DNA, 3216 bp, Zea Mays
cccctccccatcctctctttctccctcgcgcttgactcccctgccaccccttcccgtctccaccccgacgccgaccgcactccgctccccgtccaccatcccagcgtgatggctgggaggaccgcgcctgccccctcccctccttctctctcacgccctactccctcgccgccccttcatcccagatctcgtcatgggcgctaccatgaccaacagttcggtggagcaggcgccgcacgctacgccatgggacggagcccgtccccacccgacaccgaccatctccaccccgagcccgtccgagaagtgagtgatttccatttcttcgattggatggcgtgcggtcgggcctccgcacctccctgtccccctcccctcctgcggcgatagcttcctcgaggagatgagcgtgccgcccccatgatcggtctacctccgccgcccccgcgcgcaccgcaaccaccacgcccctcgtgcaccttctcgcccgagaaggtggtttcctttggtgtccccacgtgtttttgtcgttgcaagttgaactcgccctttcatgcctgatattttgctcagactgcattggagaatggctacacaaagatcatgctgccaacatgtgcttctggaatagcatgccctatgctatctgcaactataaaggctaagctttaccagccgatgtcctgtatgtcgatgcacgatgggaggtacttgtggttcttcaacttcatggttgtctggcctagccgccatccgcccgcgcaaacgcggtacagctccactacagcagcaggaggcggtgacgtcgccaaaggctggcagatacttgatggctcttgataagaagcctattgcaactaaaggccaccacctttgttgtcctcaccctagccgaggacctcatctcccagattcagtggcgacaaaatggtccattagtggaaacaccaagcatcatggagagctgtttcgtcaggagcttcgaacgcgagccatagacggggagttgatgccactgggcttatgggctcttcttttgggcaccaaagcaaagagcagtggataatatttggaatggtcataagtcaaactagacttccctagcgacagcgattcaacgaataagaaccaggccaacatgtagtgagaccgagagcatgaggcttcagtacctgtctactaacatcagatgcattagttgatgtcttgattagttgtagcagggaaccagcttccagtgcctcttgtaccgatcatcagcaagggagtgctagaggaggaggttatggtgagttttgtcgcgactaatggtgagcccacgactacggccacatcaaagctggtctggtggaacctcgtggagcagatgacgatgacgccgacatcctgcacctctgctgcgacgctgccgaccaggacgcgggcccctccgtcgcgcgcgctctacaagtctggatccatcatcgtgctcggcaagactgacttccttaggccagacatggatcccataaccagatggacagccacaaagaaaagtggcctgattagctacaagaagctcttgttccatggactcgatctctggaccgcactatcgttgcctcaacccctaggtcgtgctgccctctggcctcctcatcgtacaattcaccaacatctccaacgtaagtgcagcaggttcagtaatgaactcaaaagtggcatcagaatactctaagagttttttgttctttttgcctggatatataccgagggcaatgcattcaaaactcctatagatgacgaatcccatctctccctcttttcccggacatcgatcccagtctcttcttcaagcaagagatggagctttccttggtcgggctccaaaatgctaggaaaacatcacttgcagcagctcgcagcgacacccccgcctcctcatcatggaagctacaagaacactttgagtaggtgaagaggatttgcgacactaccacattgtctttggccatgcatcatctcagtgataagataacaagccaactagatatttcaaaattgactgacaagctacagtaagggaaggtagactcaactgcattgacaccaaaggagaagtatgaaacttggaaggagattaaaattatgagtttcagaaaaatagtttctccaatgtgggcaatgacattgcttagcttgtatgttagagttcatgtcaccatattagaatctgacgcctttaatgtaaatggacacaagaccttcgttgcaatggatgattatcttgtcactgacaaaatcactgcattcatagtgcaaacgcaacatgcagcaactgaagtccttaaagaaaagcaaccaaaagactgtatgaaatggaccaagtattgcagacaatattacaaatattggacacgttcatggctctttctgaagatactcatggagaaattatcttgtacctgagaatcccccttatttttgcacaattgatggttgtgtcctgtagtggctttgataattcatcactcctaaacgattttagaaagctataccaactaatgtgtggaggacctgggcaaggggtggtagtcgcgctggttcgctatccacggcggcaagccgcctactcgaagatcccacctccgaggacgccgctacggggaggacatgggcactaatcttgaactaaaactaggggggtgtctatgacggctggttccgcctacaaccacgtggacaacttcttgcccgacatcatctcccagcttgttccacctacaaccgcgtggacaacttttcacccgacatcatctcctagctcctcgcattcgccaacaagttctgctatgagggcttgaagccaacctacgacaatcgggtcacaaccatggtgttggctcttgacgacgcctgatccctcatcgacatcggcctctaggaggcctcccacctcctcgtcacctcgtgcctctagcattcctatgggagcccccaaagtcactcacccacctagacatcgcccgtgttgttatttggtggtcagtatgtcacaatatagtcagttttttttgcttatgttgttggtactgattttattggatgtgaatttatttatcctttcattgtatattggaattcatgacattatctacatatgtacatgcttacatatctattatatttttgtataaatatttttttgatagtttttaatttgtatggcaaagcaag

SEQ ID NO: 5410 - DNA, 3956 bp, Zea Mays
ccccatcctctctttctccctcgcgcttgactcccctgccaccccttcccgtctccaccccgacgccgaccgcactccgctccccgtccaccatcccagcgtgatggctgggaggaccgcgcctgccccctcccctccttctctctcacgccctactccctcgccgccccttcatcccagatctcgtcatgggcgctaccatgaccaacagttcggtggagcaggcgccgcacgctacgccatgggacggagcccgtccccacccgacaccgaccatctccaccccgagcccgtccgagaagtgagtgatttccatttcttcgattggatggcgtgcggtcgggcctccgcacctccctgtccccctcccctcctgcggcgatagcttcctcgaggagatgagcgtgccgcccccatgatcggtctacctccgccgcccccgcgcgcaccgcaaccaccacgcccctcgtgcaccttctcgcccgagaaggtggtttcctttggtgtccccacgtgtttttgtcgttgcaagttgaactcgccctttcatgcctgatattttgctcagactgcattggagaatggctacacaaagatcatgctgccaacatgtgcttctggaatagcatgccctatgctatctgcaactataaaggctaagctttaccagccgatgtcctgtatgtcgatgcacgatgggaggtacttgtggttcttcaacttcatggttgtctggcctagccgccatccgcccgcgcaaacgcggtacagctccactacagcagcaggaggcggtgacgtcgccaaaggctggcagatacttgatggctcttgataagaagcctattgcaactaaaggccaccacctttgttgtcctcaccctagccgaggacctcatctcccagattcagtggcgacaaaatggtccattagtggaaacaccaagcatcatggagagctgtttcgtcaggagcttcgaacgcgagccatagacggggagttgatgccactgggcttatgggctcttcttttgggcaccaaagcaaagagcagtggataatatttggaatggtcataagtcaaactagacttccctagcgacagcgattcaacgaataagaaccaggccaacatgtagtgagaccgagagcatgaggcttcagtacctgtctactaacatcagatgcattagttgatgtcttgattagttgtagcagggaaccagcttccagtgcctcttgtaccgatcatcagcaagggagtgctagaggaggaggttatggtgagttttgtcgcgactaatggtgagcccacgactacggccacatcaaagctggtctggtggaacctcgtggagcagatgacgatgacgccgacatcctgcacctctgctgcgacgctgccgaccaggacgcgggcccctccgtcgcgcgcgctctacaagtctggatccatcatcgtgctcggcaagactgacttccttaggccagacatggatcccataaccagatggacagccacaaagaaaagtggcctgattagctacaagaagctcttgttccatggactcgatctctggaccgcactatcgttgcctcaacccctaggtcgtgctgccctctggcctcctcatcgtacaattcaccaacatctccaacgtaagtgcagcaggttcagtaatgaactcaaaagtggcatcagaatactctaagagttttttgttctttttgcctggatatataccgagggcaatgcattcaaaactcctatagatgacgaatcccatctctccctcttttcccggacatcgatcccagtctcttcttcaagcaagagatggagctttccttggtcgggctccaaaatgctaggaaaacatcacttgcagcagctcgcagcgacacccccgcctcctcatcatggaagctacaagaacactttgagtaggtgaagaggatttgcgacactaccacattgtctttggccatgcatcatctcagtgataagataacaagccaactagatatttcaaaattgactgacaagctacagtaagggaaggtagactcaactgcattgacaccaaaggagaagtttcagaaaaatagtttctccaatgtgggcaatgacattgcttagcttgtatgttagagttcatgtcaccatattaggcagaatctgacgcctttaatgtaaatggacacaagaccttcgttgcaatggatgattatcttgtcactgacaaaatcactgcattcatagtgcaaacgcaacatgcagcaactgaagtccttaaagaaaagcaaccaaaagactgtatgaaatggaccaagtattgcagacaatattacaaatattggacacgttcatggctctttctgaagatactcatggagaaattatcttgtacctgagaatcccccttatttttgcacaattgatggttgtgtcctgtagtggctttgataattcatcactcctaaacgattttagaaagctataccaactaatgtgtggaggacctgggcaaggggtggtagtcgcgctggttcgctatccacggcggcaagccgcctactcgaagatcccacctccgaggacgccgctacggggaggacatgggcactaatcttgaactaaaactaggggggtgtctatgtaagttaatactttctctcacatttgcatcaaaatttgttttccgataatcaacagatcttgacatgtttctatgtactttctctcacattgagagttttttagattcagtgcaagccatctttatttgcttaatgagtcatcgatcttgacacatttttcatattcatcatagtttttactcattctttacatgtttttgtccttttcagattcagtacatgtaagctttctttgcttggacaatctatttctctttacttggatattttcttttagattaagataggccacctttatttgcttaacgtgtggttgatcttgacatgtttttcagattaatcatatttttattcattcttgacatgcttttgtctgtttttatattagtttttattcattcttgatatgctttcgtctgttttctcagattagtttttattcattcttgacatgcttttgacttttttgaaatttagatcagtacatgtaagctttctttgctcgtacacctgaccccacatgtgttagcagtctctaggtcatgttcatattattcatccatctctgttatatagatagtcgacacatccatttatatctttttatagggctaatcattgagatatctcttcctcttggtcctcgtgaattttttgttcgttctatgatgagaaatcacaaattcatatctttttttttattttgggggcttcacttttttaaaaataaaatgtaaatatttggaccccgtacgtcgcgatcgcatccaggacggctggttccgcctacaaccacgtggacaacttcttgcccgacatcatctcccagcttgttccacctacaaccgcgtggacaacttttcacccgacatcatctcctagctcctcgcattcgccaacaagttctgctatgagggcttgaagccaacctacgacaatcgggtcacaaccatggtgttggctcttgacgacgcctgatccctcatcgacatcggcctctaggaggcctcccacctcctcgtcacctcgtgcctctagcattcctatgggagcccccaaagtcactcacccacctagacatcgcccgtgttgttatttggtggtcagtatgtcacaatatagtcagttttttttgcttatgttgttggtactgattttattggatgtgaatttatttatcctttcattgtatattggaattcatgacattatctacatatgtacatgcttacatatctattatatttttgtataaatatttttttgatagtttttaatttgtatggcaaagcaag

SEQ ID NO: 5411 - DNA, 2861 bp, Zea Mays
ccccatcctctctttctccctcgcgcttgactcccctgccaccccttcccgtctccaccccgacgccgaccgcactccgctccccgtccaccatcccagcgtgatggctgggaggaccgcgcctgccccctcccctccttctctctcacgccctactccctcgccgccccttcatcccagatctcgtcatgggcgctaccatgaccaacagttcggtggagcaggcgccgcacgctacgccatgggacggagcccgtccccacccgacaccgaccatctccaccccgagcccgtccgagaagtgagtgatttccatttcttcgattggatggcgtgcggtcgggcctccgcacctccctgtccccctcccctcctgcggcgatagcttcctcgaggagatgagcgtgccgcccccatgatcggtctacctccgccgcccccgcgcgcaccgcaaccaccacgcccctcgtgcaccttctcgcccgagaaggtggtttcctttggtgtccccacgtgtttttgtcgttgcaagttgaactcgccctttcatgcctgatattttgctcagactgcattggagaatggctacacaaagatcatgctgccaacatgtgcttctggaatagcatgccctatgctatctgcaactataaaggctaagctttaccagccgatgtcctgtatgtcgatgcacgatgggaggtacttgtggttcttcaacttcatggttgtctggcctagccgccatccgcccgcgcaaacgcggtacagctccactacagcagcaggaggcggtgacgtcgccaaaggctggcagatacttgatggctcttgataagaagcctattgcaactaaaggccaccacctttgttgtcctcaccctagccgaggacctcatctcccagggaaccagcttccagtgcctcttgtaccgatcatcagcaagggagtgctagaggaggaggttatggtgagttttgtcgcgactaatggtgagcccacgactacggccacatcaaagctggtctggtggaacctcgtggagcagatgacgatgacgccgacatcctgcacctctgctgcgacgctgccgaccaggacgcgggcccctccgtcgcgcgcgctctacaagtctggatccatcatcgtgctcggcaagactgacttccttaggccagacatgctacaagaagctcttgttccatggactcgatctctggaccgcactatcgttgcctcaacccctaggtcgtgctgccctctggcctcctcatcgtacaattcaccaacatctccaacgtaagtgcagcaggttcagtaatgaactcaaaagtggcatcagaatactctaagagttttttgttctttttgcctggatatataccgagggcaatgcattcaaaactcctatagatgacgaatcccatctctccctcttttcccggacatcgatcccagtctcttcttcaagcaagagatggagctttccttggtcgggctccaaaatgctaggaaaacatcacttgcagcagctcgcagcgacacccccgcctcctcatcatggaagctacaagaacactttgagtaggtgaagaggatttgcgacactaccacattgtctttggccatgcatcatctcagtgataagataacaagccaactagatatttcaaaattgactgacaagctacagtaagggaaggtagactcaactgcattgacaccaaaggagaagtatgaaacttggaaggagattaaaattatgagtatggtttcagaaaaatagtttctccaatgtgggcaatgacattgcttagcttgtatgttagagttcatgtcaccatattaggcagaatctgacgcctttaatgtaaatggacacaagaccttcgttgcaatggatgattatcttgtcactgacaaaatcactgcattcatagtgcaaacgcaacatgcagcaactgaagtccttaaagaaaagcaaccaaaagactgtatgaaatggaccaagtattgcagacaatattacaaatattggacacgttcatggctctttctgaagatactcatggagaaattatcttgtacctgagaatcccccttatttttgcacaattgatggttgtgtcctgtagtggctttgataattcatcactcctaaacgattttagaaagctataccaactaatgtgtggaggacctgggcaaggggtggtagtcgcgctggttcgctatccacggcggcaagccgcctactcgaagatcccacctccgaggacgccgctacggggaggacatgggcactaatcttgaactaaaactaggggggtgtctatgacggctggttccgcctacaaccacgtggacaacttcttgcccgacatcatctcccagcttgttccacctacaaccgcgtggacaacttttcacccgacatcatctcctagctcctcgcattcgccaacaagttctgctatgagggcttgaagccaacctacgacaatcgggtcacaaccatggtgttggctcttgacgacgcctgatccctcatcgacatcggcctctaggaggcctcccacctcctcgtcacctcgtgcctctagcattcctatgggagcccccaaagtcactcacccacctagacatcgcccgtgttgttatttggtggtcagtatgtcacaatatagtcagttttttttgcttatgttgttggtactgattttattggatgtgaatttatttatcctttcattgtatattggaattcatgacattatctacatatgtacatgcttacatatctattatatttttgtataaatatttttttgatagtttttaatttgtatggcaaagcaag

SEQ ID NO: 5412 - DNA, 2903 bp, Zea Mays
ccccatcctctctttctccctcgcgcttgactcccctgccaccccttcccgtctccaccccgacgccgaccgcactccgctccccgtccaccatcccagcgtgatggctgggaggaccgcgcctgccccctcccctccttctctctcacgccctactccctcgccgccccttcatcccagatctcgtcatgggcgctaccatgaccaacagttcggtggagcaggcgccgcacgctacgccatgggacggagcccgtccccacccgacaccgaccatctccaccccgagcccgtccgagaagtgagtgatttccatttcttcgattggatggcgtgcggtcgggcctccgcacctccctgtccccctcccctcctgcggcgatagcttcctcgaggagatgagcgtgccgcccccatgatcggtctacctccgccgcccccgcgcgcaccgcaaccaccacgcccctcgtgcaccttctcgcccgagaaggtggtttcctttggtgtccccacgtgtttttgtcgttgcaagttgaactcgccctttcatgcctgatattttgctcagactgcattggagaatggctacacaaagatcatgctgccaacatgtgcttctggaatagcatgccctatgctatctgcaactataaaggctaagctttaccagccgatgtcctgtatgtcgatgcacgatgggaggtacttgtggttcttcaacttcatggttgtctggcctagccgccatccgcccgcgcaaacgcggtacagctccactacagcagcaggaggcggtgacgtcgccaaaggctggcagatacttgatggctcttgataagaagcctattgcaactaaaggccaccacctttgttgtcctcaccctagccgaggacctcatctcccagggaaccagcttccagtgcctcttgtaccgatcatcagcaagggagtgctagaggaggaggttatggtgagttttgtcgcgactaatggtgagcccacgactacggccacatcaaagctggtctggtggaacctcgtggagcagatgacgatgacgccgacatcctgcacctctgctgcgacgctgccgaccaggacgcgggcccctccgtcgcgcgcgctctacaagtctggatccatcatcgtgctcggcaagactgacttccttaggccagacatggatcccataaccagatggacagccacaaagaaaagtggcctgattagctacaagaagctcttgttccatggactcgatctctggaccgcactatcgttgcctcaacccctaggtcgtgctgccctctggcctcctcatcgtacaattcaccaacatctccaacgtaagtgcagcaggttcagtaatgaactcaaaagtggcatcagaatactctaagagttttttgttctttttgcctggatatataccgagggcaatgcattcaaaactcctatagatgacgaatcccatctctccctcttttcccggacatcgatcccagtctcttcttcaagcaagagatggagctttccttggtcgggctccaaaatgctaggaaaacatcacttgcagcagctcgcagcgacacccccgcctcctcatcatggaagctacaagaacactttgagtaggtgaagaggatttgcgacactaccacattgtctttggccatgcatcatctcagtgataagataacaagccaactagatatttcaaaattgactgacaagctacagtaagggaaggtagactcaactgcattgacaccaaaggagaagtatgaaacttggaaggagattaaaattatgagtttcagaaaaatagtttctccaatgtgggcaatgacattgcttagcttgtatgttagagttcatgtcaccatattaggcagaatctgacgcctttaatgtaaatggacacaagaccttcgttgcaatggatgattatcttgtcactgacaaaatcactgcattcatagtgcaaacgcaacatgcagcaactgaagtccttaaagaaaagcaaccaaaagactgtatgaaatggaccaagtattgcagacaatattacaaatattggacacgttcatggctctttctgaagatactcatggagaaattatcttgtacctgagaatcccccttatttttgcacaattgatggttgtgtcctgtagtggctttgataattcatcactcctaaacgattttagaaagctataccaactaatgtgtggaggacctgggcaaggggtggtagtcgcgctggttcgctatccacggcggcaagccgcctactcgaagatcccacctccgaggacgccgctacggggaggacatgggcactaatcttgaactaaaactaggggggtgtctatgacggctggttccgcctacaaccacgtggacaacttcttgcccgacatcatctcccagcttgttccacctacaaccgcgtggacaacttttcacccgacatcatctcctagctcctcgcattcgccaacaagttctgctatgagggcttgaagccaacctacgacaatcgggtcacaaccatggtgttggctcttgacgacgcctgatccctcatcgacatcggcctctaggaggcctcccacctcctcgtcacctcgtgcctctagcattcctatgggagcccccaaagtcactcacccacctagacatcgcccgtgttgttatttggtggtcagtatgtcacaatatagtcagttttttttgcttatgttgttggtactgattttattggatgtgaatttatttatcctttcattgtatattggaattcatgacattatctacatatgtacatgcttacatatctattatatttttgtataaatatttttttgatagtttttaatttgtatggcaaagcaag

SEQ ID NO: 5413 - DNA, 3210 bp, Zea Mays
ccccatcctctctttctccctcgcgcttgactcccctgccaccccttcccgtctccaccccgacgccgaccgcactccgctccccgtccaccatcccagcgtgatggctgggaggaccgcgcctgccccctcccctccttctctctcacgccctactccctcgccgccccttcatcccagatctcgtcatgggcgctaccatgaccaacagttcggtggagcaggcgccgcacgctacgccatgggacggagcccgtccccacccgacaccgaccatctccaccccgagcccgtccgagaagtgagtgatttccatttcttcgattggatggcgtgcggtcgggcctccgcacctccctgtccccctcccctcctgcggcgatagcttcctcgaggagatgagcgtgccgcccccatgatcggtctacctccgccgcccccgcgcgcaccgcaaccaccacgcccctcgtgcaccttctcgcccgagaaggtggtttcctttggtgtccccacgtgtttttgtcgttgcaagttgaactcgccctttcatgcctgatattttgctcagactgcattggagaatggctacacaaagatcatgctgccaacatgtgcttctggaatagcatgccctatgctatctgcaactataaaggctaagctttaccagccgatgtcctgtatgtcgatgcacgatgggaggtacttgtggttcttcaacttcatggttgtctggcctagccgccatccgcccgcgcaaacgcggtacagctccactacagcagcaggaggcggtgacgtcgccaaaggctggcagatacttgatggctcttgataagaagcctattgcaactaaaggccaccacctttgttgtcctcaccctagccgaggacctcatctcccagattcagtggcgacaaaatggtccattagtggaaacaccaagcatcatggagagctgtttcgtcaggagcttcgaacgcgagccatagacggggagttgatgccactgggcttatgggctcttcttttgggcaccaaagcaaagagcagtggataatatttggaatggtcataagtcaaactagacttccctagcgacagcgattcaacgaataagaaccaggccaacatgagaccgagagcatgaggcttcagtacctgtctactaacatcagatgcattagttgatgtcttgattagttgtagcagggaaccagcttccagtgcctcttgtaccgatcatcagcaagggagtgctagaggaggaggttatggtgagttttgtcgcgactaatggtgagcccacgactacggccacatcaaagctggtctggtggaacctcgtggagcagatgacgatgacgccgacatcctgcacctctgctgcgacgctgccgaccaggacgcgggcccctccgtcgcgcgcgctctacaagtctggatccatcatcgtgctcggcaagactgacttccttaggccagacatggatcccataaccagatggacagccacaaagaaaagtggcctgattagctacaagaagctcttgttccatggactcgatctctggaccgcactatcgttgcctcaacccctaggtcgtgctgccctctggcctcctcatcgtacaattcaccaacatctccaacgtaagtgcagcaggttcagtaatgaactcaaaagtggcatcagaatactctaagagttttttgttctttttgcctggatatataccgagggcaatgcattcaaaactcctatagatgacgaatcccatctctccctcttttcccggacatcgatcccagtctcttcttcaagcaagagatggagctttccttggtcgggctccaaaatgctaggaaaacatcacttgcagcagctcgcagcgacacccccgcctcctcatcatggaagctacaagaacactttgagtaggtgaagaggatttgcgacactaccacattgtctttggccatgcatcatctcagtgataagataacaagccaactagatatttcaaaattgactgacaagctacagtaagggaaggtagactcaactgcattgacaccaaaggagaagtatgaaacttggaaggagattaaaattatgagtttcagaaaaatagtttctccaatgtgggcaatgacattgcttagcttgtatgttagagttcatgtcaccatattaggcagaatctgacgcctttaatgtaaatggacacaagaccttcgttgcaatggatgattatcttgtcactgacaaaatcactgcattcatagtgcaaacgcaacatgcagcaactgaagtccttaaagaaaagcaaccaaaagactgtatgaaatggaccaagtattgcagacaatattacaaatattggacacgttcatggctctttctgaagatactcatggagaaattatcttgtacctgagaatcccccttatttttgcacaattgatggttgtgtcctgtagtggctttgataattcatcactcctaaacgattttagaaagctataccaactaatgtgtggaggacctgggcaaggggtggtagtcgcgctggttcgctatccacggcggcaagccgcctactcgaagatcccacctccgaggacgccgctacggggaggacatgggcactaatcttgaactaaaactaggggggtgtctatgacggctggttccgcctacaaccacgtggacaacttcttgcccgacatcatctcccagcttgttccacctacaaccgcgtggacaacttttcacccgacatcatctcctagctcctcgcattcgccaacaagttctgctatgagggcttgaagccaacctacgacaatcgggtcacaaccatggtgttggctcttgacgacgcctgatccctcatcgacatcggcctctaggaggcctcccacctcctcgtcacctcgtgcctctagcattcctatgggagcccccaaagtcactcacccacctagacatcgcccgtgttgttatttggtggtcagtatgtcacaatatagtcagttttttttgcttatgttgttggtactgattttattggatgtgaatttatttatcctttcattgtatattggaattcatgacattatctacatatgtacatgcttacatatctattatatttttgtataaatatttttttgatagtttttaatttgtatggcaaagcaag

SEQ ID NO: 5414 - DNA, 3302 bp, Zea Mays
ccccatcctctctttctccctcgcgcttgactcccctgccaccccttcccgtctccaccccgacgccgaccgcactccgctccccgtccaccatcccagcgtgatggctgggaggaccgcgcctgccccctcccctccttctctctcacgccctactccctcgccgccccttcatcccagatctcgtcatgggcgctaccatgaccaacagttcggtggagcaggcgccgcacgctacgccatgggacggagcccgtccccacccgacaccgaccatctccaccccgagcccgtccgagaagtgagtgatttccatttcttcgattggatggcgtgcggtcgggcctccgcacctccctgtccccctcccctcctgcggcgatagcttcctcgaggagatgagcgtgccgcccccatgatcggtctacctccgccgcccccgcgcgcaccgcaaccaccacgcccctcgtgcaccttctcgcccgagaaggtggtttcctttggtgtccccacgtgtttttgtcgttgcaagttgaactcgccctttcatgcctgatattttgctcagactgcattggagaatggctacacaaagatcatgctgccaacatgtgcttctggaatagcatgccctatgctatctgcaactataaaggctaagctttaccagccgatgtcctgtatgtcgatgcacgatgggaggtacttgtggttcttcaacttcatggttgtctggcctagccgccatccgcccgcgcaaacgcggtacagctccactacagcagcaggaggcggtgacgtcgccaaaggctggcaggtcttcttgggatgatacttgatggctcttgataagaagcctattgcaactaaaggccaccacctttgttgtcctcaccctagccgaggacctcatctcccagattcagtggcgacaaaatggtccattagtggaaacaccaagcatcatggagagctgtttcgtcaggagcttcgaacgcgagccatagacggggagttgatgccactgggcttatgggctcttcttttgggcaccaaagcaaagagcagtggagtaaggtcctcaatttttgttgcatgttggagatgggttcaattgggtgacaaatcttaacccaagtcagaagtaatatttggaatggtcataagtcaaactagacttccctagcgacagcgattcaacgaataagaaccaggccaacatgtagtgagaccgagagcatgaggcttcagtacctgtctactaacatcagatgcattagttgatgtcttgattagttgtagcagggaaccagcttccagtgcctcttgtaccgatcatcagcaagggagtgctagaggaggaggttatggtgagttttgtcgcgactaatggtgagcccacgactacggccacatcaaagctggtctggtggaacctcgtggagcagatgacgatgacgccgacatcctgcacctctgctgcgacgctgccgaccaggacgcgggcccctccgtcgcgcgcgctctacaagtctggatccatcatcgtgctcggcaagactgacttccttaggccagacatggatcccataaccagatggacagccacaaagaaaagtggcctgattagctacaagaagctcttgttccatggactcgatctctggaccgcactatcgttgcctcaacccctaggtcgtgctgccctctggcctcctcatcgtacaattcaccaacatctccaacgtaagtgcagcaggttcagtaatgaactcaaaagtggcatcagaatactctaagagttttttgttctttttgcctggatatataccgagggcaatgcattcaaaactcctatagatgacgaatcccatctctccctcttttcccggacatcgatcccagtctcttcttcaagcaagagatggagctttccttggtcgggctccaaaatgctaggaaaacatcacttgcagcagctcgcagcgacacccccgcctcctcatcatggaagctacaagaacactttgagtaggtgaagaggatttgcgacactaccacattgtctttggccatgcatcatctcagtgataagataacaagccaactagatatttcaaaattgactgacaagctacagtaagggaaggtagactcaactgcattgacaccaaaggagaagtatgaaacttggaaggagattaaaattatgagtttcagaaaaatagtttctccaatgtgggcaatgacattgcttagcttgtatgttagagttcatgtcaccatattaggcagaatctgacgcctttaatgtaaatggacacaagaccttcgttgcaatggatgattatcttgtcactgacaaaatcactgcattcatagtgcaaacgcaacatgcagcaactgaagtccttaaagaaaagcaaccaaaagactgtatgaaatggaccaagtattgcagacaatattacaaatattggacacgttcatggctctttctgaagatactcatggagaaattatcttgtacctgagaatcccccttatttttgcacaattgatggttgtgtcctgtagtggctttgataattcatcactcctaaacgattttagaaagctataccaactaatgtgtggaggacctgggcaaggggtggtagtcgcgctggttcgctatccacggcggcaagccgcctactcgaagatcccacctccgaggacgccgctacggggaggacatgggcactaatcttgaactaaaactaggggggtgtctatgacggctggttccgcctacaaccacgtggacaacttcttgcccgacatcatctcccagcttgttccacctacaaccgcgtggacaacttttcacccgacatcatctcctagctcctcgcattcgccaacaagttctgctatgagggcttgaagccaacctacgacaatcgggtcacaaccatggtgttggctcttgacgacgcctgatccctcatcgacatcggcctctaggaggcctcccacctcctcgtcacctcgtgcctctagcattcctatgggagcccccaaagtcactcacccacctagacatcgcccgtgttgttatttggtggtcagtatgtcacaatatagtcagttttttttgcttatgttgttggtactgattttattggatgtgaatttatttatcctttcattgtatattggaattcatgacattatctacatatgtacatgcttacatatctattatatttttgtataaatatttttttgatagtttttaatttgtatggcaaagcaag

SEQ ID NO: 5415 - DNA, 3386 bp, Zea Mays
ccccatcctctctttctccctcgcgcttgactcccctgccaccccttcccgtctccaccccgacgccgaccgcactccgctccccgtccaccatcccagcgtgatggctgggaggaccgcgcctgccccctcccctccttctctctcacgccctactccctcgccgccccttcatcccagatctcgtcatgggcgctaccatgaccaacagttcggtggagcaggcgccgcacgctacgccatgggacggagcccgtccccacccgacaccgaccatctccaccccgagcccgtccgagaagtgagtgatttccatttcttcgattggatggcgtgcggtcgggcctccgcacctccctgtccccctcccctcctgcggcgatagcttcctcgaggagatgagcgtgccgcccccatgatcggtctacctccgccgcccccgcgcgcaccgcaaccaccacgcccctcgtgcaccttctcgcccgagaaggtggtttcctttggtgtccccacgtgtttttgtcgttgcaagttgaactcgccctttcatgcctgatattttgctcagactgcattggagaatggctacacaaagatcatgctgccaacatgtgcttctggaatagcatgccctatgctatctgcaactataaaggctaagctttaccagccgatgtcctgtatgtcgatgcacgatgggaggtacttgtggttcttcaacttcatggttgtctggcctagccgccatccgcccgcgcaaacgcggtacagctccactacagcagcaggaggcggtgacgtcgccaaaggctggcaggtcttcttgggatgatacttgatggctcttgataagaagcctattgcaactaaaggccaccacctttgttgtcctcaccctagccgaggacctcatctcccagctattagattcagtggcgacaaaatggtccattagtggaaacaccaagcatcatggagagctgtttcgtcaggagcttcgaacgcgagccatagacggggagttgatgccactgggcttatgggctcttcttttgggcaccaaagcaaagagcagtggagtaaggtcctcaatttttgttgcatgttggagatgggttcaattgggtgacaaatcttaacccaagtcagaaggcaatgaccaccattaatttcttttctatcagtataaaactataccaatgggtagtgagcctgcaacgttgtgtatgtatacatggggaaaatatttggtttgtggcttgtgtgaaaggataatttagtaatatttggaatggtcataagtcaaactagacttccctagcgacagcgattcaacgaataagaaccaggccaacagttatgtagtgcagagatctactcccagtcccgggaaccagcttccagtgcctcttgtaccgatcatcagcaagggagtgctagaggaggaggttatggtgagttttgtcgcgactaatggtgagcccacgactacggccacatcaaagctggtctggtggaacctcgtggagcagatgacgatgacgccgacatcctgcacctctgctgcgacgctgccgaccaggacgcgggcccctccgtcgcgcgcgctctacaagtctggatccatcatcgtgctcggcaagactgacttccttaggccagacatggatcccataaccagatggacagccacaaagaaaagtggcctgattagctacaagaagctcttgttccatggactcgatctctggaccgcactatcgttgcctcaacccctaggtcgtgctgccctctggcctcctcatcgtacaattcaccaacatctccaacgtaagtgcagcaggttcagtaatgaactcaaaagtggcatcagaatactctaagagttttttgttctttttgcctggatatataccgagggcaatgcattcaaaactcctatagatgacgaatcccatctctccctcttttcccggacatcgatcccagtctcttcttcaagcaagagatggagctttccttggtcgggctccaaaatgctaggaaaacatcacttgcagcagctcgcagcgacacccccgcctcctcatcatggaagctacaagaacactttgagtaggtgaagaggatttgcgacactaccacattgtctttggccatgcatcatctcagtgataagataacaagccaactagatatttcaaaattgactgacaagctacagtaagggaaggtagactcaactgcattgacaccaaaggagaagtatgaaacttggaaggagattaaaattatgagtttcagaaaaatagtttctccaatgtgggcaatgacattgcttagcttgtatgttagagttcatgtcaccatattaggcagaatctgacgcctttaatgtaaatggacacaagaccttcgttgcaatggatgattatcttgtcactgacaaaatcactgcattcatagtgcaaacgcaacatgcagcaactgaagtccttaaagaaaagcaaccaaaagactgtatgaaatggaccaagtattgcagacaatattacaaatattggacacgttcatggctctttctgaagatactcatggagaaattatcttgtacctgagaatcccccttatttttgcacaattgatggttgtgtcctgtagtggctttgataattcatcactcctaaacgattttagaaagctataccaactaatgtgtggaggacctgggcaaggggtggtagtcgcgctggttcgctatccacggcggcaagccgcctactcgaagatcccacctccgaggacgccgctacggggaggacatgggcactaatcttgaactaaaactaggggggtgtctatgacggctggttccgcctacaaccacgtggacaacttcttgcccgacatcatctcccagcttgttccacctacaaccgcgtggacaacttttcacccgacatcatctcctagctcctcgcattcgccaacaagttctgctatgagggcttgaagccaacctacgacaatcgggtcacaaccatggtgttggctcttgacgacgcctgatccctcatcgacatcggcctctaggaggcctcccacctcctcgtcacctcgtgcctctagcattcctatgggagcccccaaagtcactcacccacctagacatcgcccgtgttgttatttggtggtcagtatgtcacaatatagtcagttttttttgcttatgttgttggtactgattttattggatgtgaatttatttatcctttcattgtatattggaattcatgacattatctacatatgtacatgcttacatatctattatatttttgtataaatatttttttgatagtttttaatttgtatggcaaagcaag

SEQ ID NO: 5416 - DNA, 3220 bp, Zea Mays
ccccatcctctctttctccctcgcgcttgactcccctgccaccccttcccgtctccaccccgacgccgaccgcactccgctccccgtccaccatcccagcgtgatggctgggaggaccgcgcctgccccctcccctccttctctctcacgccctactccctcgccgccccttcatcccagatctcgtcatgggcgctaccatgaccaacagttcggtggagcaggcgccgcacgctacgccatgggacggagcccgtccccacccgacaccgaccatctccaccccgagcccgtccgagaagtgagtgatttccatttcttcgattggatggcgtgcggtcgggcctccgcacctccctgtccccctcccctcctgcggcgatagcttcctcgaggagatgagcgtgccgcccccatgatcggtctacctccgccgcccccgcgcgcaccgcaaccaccacgcccctcgtgcaccttctcgcccgagaaggtggtttcctttggtgtccccacgtgtttttgtcgttgcaagttgaactcgccctttcatgcctgatattttgctcagactgcattggagaatggctacacaaagatcatgctgccaacatgtgcttctggaatagcatgccctatgctatctgcaactataaaggctaagctttaccagccgatgtcctgtatgtcgatgcacgatgggaggtacttgtggttcttcaacttcatggttgtctggcctagccgccatccgcccgcgcaaacgcggtacagctccactacagcagcaggaggcggtgacgtcgccaaaggctggcagatacttgatggctcttgataagaagcctattgcaactaaaggccaccacctttgttgtcctcaccctagccgaggacctcatctcccagattcagtggcgacaaaatggtccattagtggaaacaccaagcatcatggagagctgtttcgtcaggagcttcgaacgcgagccatagacggggagttgatgccactgggcttatgggctcttcttttgggcaccaaagcaaagagcagtggataatatttggaatggtcataagtcaaactagacttccctagcgacagcgattcaacgaataagaaccaggccaacatgtagtgagaccgagagcatgaggcttcagtacctgtctactaacatcagatgcattagttgatgtcttgattagttgtagcagggaaccagcttccagtgcctcttgtaccgatcatcagcaagggagtgctagaggaggaggttatggtgagttttgtcgcgactaatggtgagcccacgactacggccacatcaaagctggtctggtggaacctcgtggagcagatgacgatgacgccgacatcctgcacctctgctgcgacgctgccgaccaggacgcgggcccctccgtcgcgcgcgctctacaagtctggatccatcatcgtgctcggcaagactgacttccttaggccagacatggatcccataaccagatggacagccacaaagaaaagtggcctgattagctacaagaagctcttgttccatggactcgatctctggaccgcactatcgttgcctcaacccctaggtcgtgctgccctctggcctcctcatcgtacaattcaccaacatctccaacgtaagtgcagcaggttcagtaatgaactcaaaagtggcatcagaatactctaagagttttttgttctttttgcctggatatataccgagggcaatgcattcaaaactcctatagatgacgaatcccatctctccctcttttcccggacatcgatcccagtctcttcttcaagcaagagatggagctttccttggtcgggctccaaaatgctaggaaaacatcacttgcagcagctcgcagcgacacccccgcctcctcatcatggaagctacaagaacactttgagtaggtgaagaggatttgcgacactaccacattgtctttggccatgcatcatctcagtgataagataacaagccaactagatatttcaaaattgactgacaagctacagtaagggaaggtagactcaactgcattgacaccaaaggagaagtatgaaacttggaaggagattaaaattatgagtatggtttcagaaaaatagtttctccaatgtgggcaatgacattgcttagcttgtatgttagagttcatgtcaccatattaggcagaatctgacgcctttaatgtaaatggacacaagaccttcgttgcaatggatgattatcttgtcactgacaaaatcactgcattcatagtgcaaacgcaacatgcagcaactgaagtccttaaagaaaagcaaccaaaagactgtatgaaatggaccaagtattgcagacaatattacaaatattggacacgttcatggctctttctgaagatactcatggagaaattatcttgtacctgagaatcccccttatttttgcacaattgatggttgtgtcctgtagtggctttgataattcatcactcctaaacgattttagaaagctataccaactaatgtgtggaggacctgggcaaggggtggtagtcgcgctggttcgctatccacggcggcaagccgcctactcgaagatcccacctccgaggacgccgctacggggaggacatgggcactaatcttgaactaaaactaggggggtgtctatgacggctggttccgcctacaaccacgtggacaacttcttgcccgacatcatctcccagcttgttccacctacaaccgcgtggacaacttttcacccgacatcatctcctagctcctcgcattcgccaacaagttctgctatgagggcttgaagccaacctacgacaatcgggtcacaaccatggtgttggctcttgacgacgcctgatccctcatcgacatcggcctctaggaggcctcccacctcctcgtcacctcgtgcctctagcattcctatgggagcccccaaagtcactcacccacctagacatcgcccgtgttgttatttggtggtcagtatgtcacaatatagtcagttttttttgcttatgttgttggtactgattttattggatgtgaatttatttatcctttcattgtatattggaattcatgacattatctacatatgtacatgcttacatatctattatatttttgtataaatatttttttgatagtttttaatttgtatggcaaagcaag

SEQ ID NO: 5417 - DNA, 2884 bp, Zea Mays
ccccatcctctctttctccctcgcgcttgactcccctgccaccccttcccgtctccaccccgacgccgaccgcactccgctccccgtccaccatcccagcgtgatggctgggaggaccgcgcctgccccctcccctccttctctctcacgccctactccctcgccgccccttcatcccagatctcgtcatgggcgctaccatgaccaacagttcggtggagcaggcgccgcacgctacgccatgggacggagcccgtccccacccgacaccgaccatctccaccccgagcccgtccgagaagtgagtgatttccatttcttcgattggatggcgtgcggtcgggcctccgcacctccctgtccccctcccctcctgcggcgatagcttcctcgaggagatgagcgtgccgcccccatgatcggtctacctccgccgcccccgcgcgcaccgcaaccaccacgcccctcgtgcaccttctcgcccgagactgcattggagaatggctacacaaagatcatgctgccaacatgtgcttctggaatagcatgccctatgctatctgcaactataaaggctaagctttaccagccgatgtcctgtatgtcgatgcacgatgggaggtacttgtggttcttcaacttcatggttgtctggcctagccgccatccgcccgcgcaaacgcggtacagctccactacagcagcaggaggcggtgacgtcgccaaaggctggcagatacttgatggctcttgataagaagcctattgcaactaaaggccaccacctttgttgtcctcaccctagccgaggacctcatctcccagctattagattcagtggcgacaaaatggtccattagtggaaacaccaagcatcatggagagctgtttcgtcaggagcttcgaacgcgagccatagacggggagttgatgccactgggcttatgggctcttcttttgggcaccaaagcaaagagcagtggataatatttggaatggtcataagtcaaactagacttccctagcgacagcgattcaacgaataagaaccaggccaacagttatgtagtgcagagatctactcccagtcccgggaaccagcttccagtgcctcttgtaccgatcatcagcaagggagtgctagaggaggaggttatggtgagttttgtcgcgactaatggtgagcccacgactacggccacatcaaagctggtctggtggaacctcgtggagcagatgacgatgacgccgacatcctgcacctctgctgcgacgctgccgaccaggacgcgggcccctccgtcgcgcgcgctctacaagtctggatccatcatcgtgctcggcaagactgacttccttaggccagacatgctacaagaagctcttgttccatggactcgatctctggaccgcactatcgttgcctcaacccctaggtcgtgctgccctctggcctcctcatcgtacaattcaccaacatctccaactctcttcttcaagcaagagatggagctttccttggtcgggctccaaaatgctaggaaaacatcacttgcagcagctcgcagcgacacccccgcctcctcatcatggaagctacaagaacactttgagtaggtgaagaggatttgcgacactaccacattgtctttggccatgcatcatctcagtgataagataacaagccaactagatatttcaaaattgactgacaagctacagtaagggaaggtagactcaactgcattgacaccaaaggagaagtatgaaacttggaaggagattaaaattatgagtttcagaaaaatagtttctccaatgtgggcaatgacattgcttagcttgtatgttagagttcatgtcaccatattaggcagaatctgacgcctttaatgtaaatggacacaagaccttcgttgcaatggatgattatcttgtcactgacaaaatcactgcattcatagtgcaaacgcaacatgcagcaactgaagtccttaaagaaaagcaaccaaaagactgtatgaaatggaccaagtattgcagacaatattacaaatattggacacgttcatggctctttctgaagatactcatggagaaattatcttgtacctgagaatcccccttatttttgcacaattgatggttgtgtcctgtagtggctttgataattcatcactcctaaacgattttagaaagctataccaactaatgtgtggaggacctgggcaaggggtggtagtcgcgctggttcgctatccacggcggcaagccgcctactcgaagatcccacctccgaggacgccgctacggggaggacatgggcactaatcttgaactaaaactaggggggtgtctatgacggctggttccgcctacaaccacgtggacaacttcttgcccgacatcatctcccagcttgttccacctacaaccgcgtggacaacttttcacccgacatcatctcctagctcctcgcattcgccaacaagttctgctatgagggcttgaagccaacctacgacaatcgggtcacaaccatggtgttggctcttgacgacgcctgatccctcatcgacatcggcctctaggaggcctcccacctcctcgtcacctcgtgcctctagcattcctatgggagcccccaaagtcactcacccacctagacatcgcccgtgttgttatttggtggtcagtatgtcacaatatagtcagttttttttgcttatgttgttggtactgattttattggatgtgaatttatttatcctttcattgtatattggaattcatgacattatctacatatgtacatgcttacatatctattatatttttgtataaatatttttttgatagtttttaatttgtatggcaaagcaag

SEQ ID NO: 5418 - DNA, 3013 bp, Zea Mays
ccccatcctctctttctccctcgcgcttgactcccctgccaccccttcccgtctccaccccgacgccgaccgcactccgctccccgtccaccatcccagcgtgatggctgggaggaccgcgcctgccccctcccctccttctctctcacgccctactccctcgccgccccttcatcccagatctcgtcatgggcgctaccatgaccaacagttcggtggagcaggcgccgcacgctacgccatgggacggagcccgtccccacccgacaccgaccatctccaccccgagcccgtccgagaagtgagtgatttccatttcttcgattggatggcgtgcggtcgggcctccgcacctccctgtccccctcccctcctgcggcgatagcttcctcgaggagatgagcgtgccgcccccatgatcggtctacctccgccgcccccgcgcgcaccgcaaccaccacgcccctcgtgcaccttctcgcccgagaaggtggtttcctttggtgtccccacgtgtttttgtcgttgcaagttgaactcgccctttcatgcctgatattttgctcagactgcattggagaatggctacacaaagatcatgctgccaacatgtgcttctggaatagcatgccctatgctatctgcaactataaaggctaagctttaccagccgatgtcctgtatgtcgatgcacgatgggaggtacttgtggttcttcaacttcatggttgtctggcctagccgccatccgcccgcgcaaacgcggtacagctccactacagcagcaggaggcggtgacgtcgccaaaggctggcagatacttgatggctcttgataagaagcctattgcaactaaaggccaccacctttgttgtcctcaccctagccgaggacctcatctcccagattcagtggcgacaaaatggtccattagtggaaacaccaagcatcatggagagctgtttcgtcaggagcttcgaacgcgagccatagacggggagttgatgccactgggcttatgggctcttcttttgggcaccaaagcaaagagcagtggataatatttggaatggtcataagtcaaactagacttccctagcgacagcgattcaacgaataagaaccaggccaacagttatgtagtgcagagatctactcccagtcccgggaaccagcttccagtgcctcttgtaccgatcatcagcaagggagtgctagaggaggaggttatggtgagttttgtcgcgactaatggtgagcccacgactacggccacatcaaagctggtctggtggaacctcgtggagcagatgacgatgacgccgacatcctgcacctctgctgcgacgctgccgaccaggacgcgggcccctccgtcgcgcgcgctctacaagtctggatccatcatcgtgctcggcaagactgacttccttaggccagacatgctacaagaagctcttgttccatggactcgatctctggaccgcactatcgttgcctcaacccctaggtcgtgctgccctctggcctcctcatcgtacaattcaccaacatctccaactctcttcttcaagcaagagatggagctttccttggtcgggctccaaaatgctaggaaaacatcacttgcagcagctcgcagcgacacccccgcctcctcatcatggaagttgtatctgtttcagaataagcaagtgtcgtatttagtaaaccagctcgtgttctaattcttttgcatgcttccattttgttgtaggctacaagaacactttgagtaggtgaagaggatttgcgacactaccacattgtctttggccatgcatcatctcagtgataagataacaagccaactagatatttcaaaattgactgacaagctacagtaagggaaggtagactcaactgcattgacaccaaaggagaagtttcagaaaaatagtttctccaatgtgggcaatgacattgcttagcttgtatgttagagttcatgtcaccatattaggcagaatctgacgcctttaatgtaaatggacacaagaccttcgttgcaatggatgattatcttgtcactgacaaaatcactgcattcatagtgcaaacgcaacatgcagcaactgaagtccttaaagaaaagcaaccaaaagactgtatgaaatggaccaagtattgcagacaatattacaaatattggacacgttcatggctctttctgaagatactcatggagaaattatcttgtacctgagaatcccccttatttttgcacaattgatggttgtgtcctgtagtggctttgataattcatcactcctaaacgattttagaaagctataccaactaatgtgtggaggacctgggcaaggggtggtagtcgcgctggttcgctatccacggcggcaagccgcctactcgaagatcccacctccgaggacgccgctacggggaggacatgggcactaatcttgaactaaaactaggggggtgtctatgacggctggttccgcctacaaccacgtggacaacttcttgcccgacatcatctcccagcttgttccacctacaaccgcgtggacaacttttcacccgacatcatctcctagctcctcgcattcgccaacaagttctgctatgagggcttgaagccaacctacgacaatcgggtcacaaccatggtgttggctcttgacgacgcctgatccctcatcgacatcggcctctaggaggcctcccacctcctcgtcacctcgtgcctctagcattcctatgggagcccccaaagtcactcacccacctagacatcgcccgtgttgttatttggtggtcagtatgtcacaatatagtcagttttttttgcttatgttgttggtactgattttattggatgtgaatttatttatcctttcattgtatattggaattcatgacattatctacatatgtacatgcttacatatctattatatttttgtataaatatttttttgatagtttttaatttgtatggcaaagcaag

SEQ ID NO: 5419 - DNA, 3223 bp, Zea Mays
ccccatcctctctttctccctcgcgcttgactcccctgccaccccttcccgtctccaccccgacgccgaccgcactccgctccccgtccaccatcccagcgtgatggctgggaggaccgcgcctgccccctcccctccttctctctcacgccctactccctcgccgccccttcatcccagatctcgtcatgggcgctaccatgaccaacagttcggtggagcaggcgccgcacgctacgccatgggacggagcccgtccccacccgacaccgaccatctccaccccgagcccgtccgagaagtgagtgatttccatttcttcgattggatggcgtgcggtcgggcctccgcacctccctgtccccctcccctcctgcggcgatagcttcctcgaggagatgagcgtgccgcccccatgatcggtctacctccgccgcccccgcgcgcaccgcaaccaccacgcccctcgtgcaccttctcgcccgagaaggtggtttcctttggtgtccccacgtgtttttgtcgttgcaagttgaactcgccctttcatgcctgatattttgctcagactgcattggagaatggctacacaaagatcatgctgccaacatgtgcttctggaatagcatgccctatgctatctgcaactataaaggctaagctttaccagccgatgtcctgtatgtcgatgcacgatgggaggtacttgtggttcttcaacttcatggttgtctggcctagccgccatccgcccgcgcaaacgcggtacagctccactacagcagcaggaggcggtgacgtcgccaaaggctggcaggtcttcttgggatggttattcaaccgcgctcccagtacttttcgtgtgaatttgagaatccaagagtacttcacttcattcaaatcgcgcttgtgaattgtaccagatacttgatggctcttgataagaagcctattgcaactaaaggccaccacctttgttgtcctcaccctagccgaggacctcatctcccagctattagattcagtggcgacaaaatggtccattagtggaaacaccaagcatcatggagagctgtttcgtcaggagcttcgaacgcgagccatagacggggagttgatgccactgggcttatgggctcttcttttgggcaccaaagcaaagagcagtggataatatttggaatggtcataagtcaaactagacttccctagcgacagcgattcaacgaataagaaccaggccaacagttatgtagtgcagagatctactcccagtcccgggaaccagcttccagtgcctcttgtaccgatcatcagcaagggagtgctagaggaggaggttatggtgagttttgtcgcgactaatggtgagcccacgactacggccacatcaaagctggtctggtggaacctcgtggagcagatgacgatgacgccgacatcctgcacctctgctgcgacgctgccgaccaggacgcgggcccctccgtcgcgcgcgctctacaagtctggatccatcatcgtgctcggcaagactgacttccttaggccagacatgtggcctgattagctacaagaagctcttgttccatggactcgatctctggaccgcactatcgttgcctcaacccctaggtcgtgctgccctctggcctcctcatcgtacaattcaccaacatctccaactctcttcttcaagcaagagatggagctttccttggtcgggctccaaaatgctaggaaaacatcacttgcagcagctcgcagcgacacccccgcctcctcatcatggaagttgtatctgtttcagaataagcaagtgtcgtatttagtaaaccagctcgtgttctaattcttttgcatgcttccattttgttgtaggctacaagaacactttgagtaggtgaagaggatttgcgacactaccacattgtctttggccatgcatcatctcagtgataagataacaagccaactagatatttcaaaattgactgacaagctacagtaagggaaggtagactcaactgcattgacaccaaaggagaagtatgaaacttggaaggagattaaaattatgagtttcagaaaaatagtttctccaatgtgggcaatgacattgcttagcttgtatgttagagttcatgtcaccatattaggtacccatctctacttggattttgcccagtgtacaaatggtgcacagttacaagcagaatctgacgcctttaatgtaaatggacacaagaccttcgttgcaatggatgattatcttgtcactgacaaaatcactgcattcatagtgcaaacgcaacatgcagcaactgaagtccttaaagaaaagcaaccaaaagactgtatgaaatggaccaagtattgcagacaatattacaaatattggacacgttcatggctctttctgaagatactcatggagaaattatcttgtacctgagaatcccccttatttttgcacaattgatggttgtgtcctgtagtggctttgataattcatcactcctaaacgattttagaaagctataccaactaatgtgtggaggacctgggcaaggggtggtagtcgcgctggttcgctatccacggcggcaagccgcctactcgaagatcccacctccgaggacgccgctacggggaggacatgggcactaatcttgaactaaaactaggggggtgtctatgacggctggttccgcctacaaccacgtggacaacttcttgcccgacatcatctcccagcttgttccacctacaaccgcgtggacaacttttcacccgacatcatctcctagctcctcgcattcgccaacaagttctgctatgagggcttgaagccaacctacgacaatcgggtcacaaccatggtgttggctcttgacgacgcctgatccctcatcgacatcggcctctaggaggcctcccacctcctcgtcacctcgtgcctctagcattcctatgggagcccccaaagtcactcacccacctagacatcgcccgtgttgttatttggtggtcagtatgtcacaatatagtcagttttttttgcttatgttgttggtactgattttattggatgtgaatttatttatcctttcattgtatattggaattcatgacattatctacatatgtacatgcttacatatctattatatttttgtataaatatttttttgatagtttttaatttgtatggcaaagcaag

SEQ ID NO: 5420 - DNA, 4551 bp, Zea Mays
ccccatcctctctttctccctcgcgcttgactcccctgccaccccttcccgtctccaccccgacgccgaccgcactccgctccccgtccaccatcccagcgtgatggctgggaggaccgcgcctgccccctcccctccttctctctcacgccctactccctcgccgccccttcatcccagatctcgtcatgggcgctaccatgaccaacagttcggtggagcaggcgccgcacgctacgccatgggacggagcccgtccccacccgacaccgaccatctccaccccgagcccgtccgagaagtgagtgatttccatttcttcgattggatggcgtgcggtcgggcctccgcacctccctgtccccctcccctcctgcggcgatagcttcctcgaggagatgagcgtgccgcccccatgatcggtctacctccgccgcccccgcgcgcaccgcaaccaccacgcccctcgtgcaccttctcgcccgagaaggtggtttcctttggtgtccccacgtgtttttgtcgttgcaagttgaactcgccctttcatgcctgatattttgctcagactgcattggagaatggctacacaaagatcatgctgccaacatgtgcttctggaatagcatgccctatgctatctgcaactataaaggctaagctttaccagccgatgtcctgtatgtcgatgcacgatgggaggtacttgtggttcttcaacttcatggttgtctggcctagccgccatccgcccgcgcaaacgcggtacagctccactacagcagcaggaggcggtgacgtcgccaaaggctggcagatacttgatggctcttgataagaagcctattgcaactaaaggccaccacctttgttgtcctcaccctagccgaggacctcatctcccagattcagtggcgacaaaatggtccattagtggaaacaccaagcatcatggagagctgtttcgtcaggagcttcgaacgcgagccatagacggggagttgatgccactgggcttatgggctcttcttttgggcaccaaagcaaagagcagtggataatatttggaatggtcataagtcaaactagacttccctagcgacagcgattcaacgaataagaaccaggccaacatgtagtgagaccgagagcatgaggcttcagtacctgtctactaacatcagatgcattagttgatgtcttgattagttgtagcagggaaccagcttccagtgcctcttgtaccgatcatcagcaagggagtgctagaggaggaggttatggtgagttttgtcgcgactaatggtgagcccacgactacggccacatcaaagctggtctggtggaacctcgtggagcagatgacgatgacgccgacatcctgcacctctgctgcgacgctgccgaccaggacgcgggcccctccgtcgcgcgcgctctacaagtctggatccatcatcgtgctcggcaagactgacttccttaggccagacatggatcccataaccagatggacagccacaaagaaaagtggcctgattagctacaagaagctcttgttccatggactcgatctctggaccgcactatcgttgcctcaacccctaggtcgtgctgccctctggcctcctcatcgtacaattcaccaacatctccaacgtaagtgcagcaggttcagtaatgaactcaaaagtggcatcagaatactctaagagttttttgttctttttgcctggatatataccgagggcaatgcattcaaaactcctatagatgacgaatcccatctctccctcttttcccggacatcgatcccagtctcttcttcaagcaagagatggagctttccttggtcgggctccaaaatgctaggaaaacatcacttgcagcagctcgcagcgacacccccgcctcctcatcatggaagctacaagaacactttgagtaggtgaagaggatttgcgacactaccacattgtctttggccatgcatcatctcagtgataagataacaagccaactagatatttcaaaattgactgacaagctacagtaagggaaggtagactcaactgcattgacaccaaaggagaagtatgaaacttggaaggagattaaaattatgagtttcagaaaaatagtttctccaatgtgggcaatgacattgcttagcttgtatgttagagttcatgtcaccatattaggcagaatctgacgcctttaatgtaaatggacacaagaccttcgttgcaatggatgattatcttgtcactgacaaaatcactgcattcatagtgcaaacgcaacatgcagcaactgaagtccttaaagaaaagcaaccaaaagactgtatgaaatggaccaagtattgcagacaatattacaaatattggacacgttcatggctctttctgaagatactcatggagaaattatcttgtacctgagaatcccccttatttttgcacaattgatggggtggtagtcgcgctggttcgctatccacggcggcaagccgcctactcgaagatcccacctccgaggacgccgctacggggaggacatgggcactaatcttgaactaaaactaggggggtgtctatggagacagaaaaggcaacagtcgactctcgcccagggcacgtgagtgacggtgtatttgggcggcccaacgcccgcaagctgccacatttcagcccacgcaaaccaagccaggcgaaaacccggcaccggtgcgccagcccagccacaggctcccaaaccgaccgggcggcgatggtgttggtgtcggactcggagctggtggagcggctgcaggaggtgctgcggtcgtcggacctcaacaccacgaccaccgctgccctgcgccgccgcctcgaggaggacttcggcgccgacctctcccacaaaaaggccttcattcgggagcaggtcgacctcttcctcgccgaggtcgccgccaaggccgagccgcaggagcccaaggaggaggagcccgaggaggcgccggtgcctaaggaggaggagccagaggagctcgagggggtggaggaggagggcgagggggaggacgaagaagaagaagaggaggaggaggaggaggaggaatgcgaggatgagaatagcagcggcgcccggaagaagcagcggggtaatgatggcaaaaagaggggtggtggctttacaaaattatgcagtctttcaccggcacttcaagagtttgtcggcgcctctgagttagccaggacagaggttgtcaagaagctttgggcatatattcgagaaaataatcttcaagaccaaaacaataggaggaagattttgccggatgagagattgaagaagatcttcaatgtcaattccattgatatgtttcaaatgaataaagctttgaccaagcatatctggccattgaattctgagggtcctgtctctcctgatagatcaacacccaaagagaagccacaaaagagagacaggagtgaaggaaagaagcaaaagggtggctcttcaggagctggatctggttttctcgtgccccttcaactttcggatgatttagtaaaatttatcggcactggtgagagcatgttatcacgatctgatgtcgtgaagaaaatgtgggattacataaaagggaacaacctgcaggcccttttatttcagtcgccttccagaaataggctgtatgcctatccactatggccaatagccagagttctaaattgcagcagcaaccagccaattactgtcagtaactggaaaaattctagggcacttttgacatgttatgttggacttcttgaaaaccgtcgtgaaagaaaataagagaacataatgcagtgagatgtctcctggctcccagcaaaagaattatttggagtttatagtcattgagactgatcctgtggaaatagtagatccttctgaccggaggaaaataatctgcgatgagaagctgaaggacctatttggagtggaaacattcaccggctttactgtttcgaagctgcttgcccctcattttaccaagacgaagtagcaacctgccatccacatcttctaaaaccaaaaaggcttgggacataaaattatctgtgcggtgtggcttctagtgcgttcttcccgagttcatggtccaccatttttcatgctcagggttgaggatgacattgctcggtctcctcagatgaccctagtggtcatggaaccgtaaagacaaggggggagcactagcgcttgtcgcctagggtttcagggttctccacttgccagtgaatctttcatcctttttagctcctgatatggatgaagtttgtagcactagcgcaaccgccttttgctgttccttcccactcacttggtaccggttgttcagaggacgccagtttatatttgtatggaccacctaaactgaagctgttttgtcatgtgggtggcatggcgaagtgggtcgatatcgcgacggttctgtaacgcgatcttgcgctgtttccaactgctggtgccatttgcctgtcagttcaaagttaaattgtgttcagattctgg

SEQ ID NO: 5421 - DNA, 4306 bp, Zea Mays
ccccatcctctctttctccctcgcgcttgactcccctgccaccccttcccgtctccaccccgacgccgaccgcactccgctccccgtccaccatcccagcgtgatggctgggaggaccgcgcctgccccctcccctccttctctctcacgccctactccctcgccgccccttcatcccagatctcgtcatgggcgctaccatgaccaacagttcggtggagcaggcgccgcacgctacgccatgggacggagcccgtccccacccgacaccgaccatctccaccccgagcccgtccgagaagtgagtgatttccatttcttcgattggatggcgtgcggtcgggcctccgcacctccctgtccccctcccctcctgcggcgatagcttcctcgaggagatgagcgtgccgcccccatgatcggtctacctccgccgcccccgcgcgcaccgcaaccaccacgcccctcgtgcaccttctcgcccgagactgcattggagaatggctacacaaagatcatgctgccaacatgtgcttctggaatagcatgccctatgctatctgcaactataaaggctaagctttaccagccgatgtcctgtatgtcgatgcacgatgggaggtacttgtggttcttcaacttcatggttgtctggcctagccgccatccgcccgcgcaaacgcggtacagctccactacagcagcaggaggcggtgacgtcgccaaaggctggcagatacttgatggctcttgataagaagcctattgcaactaaaggccaccacctttgttgtcctcaccctagccgaggacctcatctcccagattcagtggcgacaaaatggtccattagtggaaacaccaagcatcatggagagctgtttcgtcaggagcttcgaacgcgagccatagacggggagttgatgccactgggcttatgggctcttcttttgggcaccaaagcaaagagcagtggataatatttggaatggtcataagtcaaactagacttccctagcgacagcgattcaacgaataagaaccaggccaacatgtagtgagaccgagagcatgaggcttcagtacctgtctactaacatcagatgcattagttgatgtcttgattagttgtagcagggaaccagcttccagtgcctcttgtaccgatcatcagcaagggagtgctagaggaggaggttatggtgagttttgtcgcgactaatggtgagcccacgactacggccacatcaaagctggtctggtggaacctcgtggagcagatgacgatgacgccgacatcctgcacctctgctgcgacgctgccgaccaggacgcgggcccctccgtcgcgcgcgctctacaagtctggatccatcatcgtgctcggcaagactgacttccttaggccagacatggatcccataaccagatggacagccacaaagaaaagtggcctgattagctacaagaagctcttgttccatggactcgatctctggaccgcactatcgttgcctcaacccctaggtcgtgctgccctctggcctcctcatcgtacaattcaccaacatctccaacgtaagtgcagcaggttcagtaatgaactcaaaagtggcatcagaatactctaagagttttttgttctttttgcctggatatataccgagggcaatgcattcaaaactcctatagatgacgaatcccatctctccctcttttcccggacatcgatcccagtctcttcttcaagcaagagatggagctttccttggtcgggctccaaaatgctaggaaaacatcacttgcagcagctcgcagcgacacccccgcctcctcatcatggaagctacaagaacactttgagtaggtgaagaggatttgcgacactaccacattgtctttggccatgcatcatctcagtgataagataacaagccaactagatatttcaaaattgactgacaagctacagtaagggaaggtagactcaactgcattgacaccaaaggagaagtatgaaacttggaaggagattaaaattatgagtttcagaaaaatagtttctccaatgtgggcaatgacattgcttagcttgtatgttagagttcatgtcaccatattaggcagaatctgacgcctttaatgtaaatggacacaagaccttcgttgcaatggatgattatcttgtcactgacaaaatcactgcattcatagtgcaaacgcaacatgcagcaactgaagtccttaaagaaaagcaaccaaaagactgtatgaaatggaccaagtattgcagacaatattacaaatattggacacgttcatggctctttctgaagatactcatggagaaattatcttgtacctgagaatcccccttatttttgcacaattgatggttgtgtcctgtagtggctttgataattcatcactcctaaacgattttagaaagctataccaactaatgtgtggaggacctgggcaaggggtggtagtcgcgctggttcgctatccacggcggcaagccgcctactcgaagatcccacctccgaggacgccgctacggggaggacatgggcactaatcttgaactaaaactaggggggtgtctattttcttaccgacacagggagacagaaaaggcaacagtcgactctcgcccagggcacgtgagtgacggtgtatttgggcggcccaacgcccgcaagctgccacatttcagcccacgcaaaccaagccaggcgaaaacccggcaccggtgcgccagcccagccacaggctcccaaaccgaccgggcggcgatggtgttggtgtcggactcggagctggtggagcggctgcaggaggtgctgcggtcgtcggacctcaacaccacgaccaccgctgccctgcgccgccgcctcgaggaggacttcggcgccgacctctcccacaaaaaggccttcattcgggagcaggtcgacctcttcctcgccgaggtcgccgccaaggccgagccgcaggagcccaaggaggaggagcccgaggaggcgccggtgcctaaggaggaggagccagaggagctcgagggggtggaggaggagggcgagggggaggacgaagaagaagaagaggaggaggaggaggaggaggaatgcgaggatgagaatagcagcggcgcccggaagaagcagcggggtaatgatggcaaaaagaggggtggtggctttacaaaattatgcagtctttcaccggcacttcaagagtttgtcggcgcctctgagttagccaggacagaggttgtcaagaagctttgggcatatattcgagaaaataatcttcaagaccaaaacaataggaggaagattttgccggatgagagattgaagaagatcttcaatgtcaattccattgatatgtttcaaatgaataaagctttgaccaagcatatctggccattgaattctgagggtcctgtctctcctgatagatcaacacccaaagagaagccacaaaagagagacaggagtgaaggaaagaagcaaaagggtggctcttcaggagctggatctggttttctcgtgccccttcaactttcggatgatttagtaaaatttatcggcactggtgagagcatgttatcacgatctgatgtcgtgaagaaaatgtgggattacataaaagggaacaacctgcaggatccttctgaccggaggaaaataatctgcgatgagaagctgaaggacctatttggagtggaaacattcaccggctttactgtttcgaagctgcttgcccctcattttaccaagacgaagtagcaacctgccatccacatcttctaaaaccaaaaaggcttgggacataaaattatctgtgcggtgtggcttctagtgcgttcttcccgagttcatggtccaccatttttcatgctcagggttgaggatgacattgctcggtctcctcagatgaccctagtggtcatggaaccgtaaagacaaggggggagcactagcgcttgtcgcctagggtttcagggttctccacttgccagtgaatctttcatcctttttagctcctgatatggatgaagtttgtagcactagcgcaaccgccttttgctgttccttcccactcacttggtaccggttgttcagaggacgccagtttatatttgtatggaccacctaaactgaagctgttttgtcatgtgggtggcatggcgaagtgggtcgatatcgcgacggttctgtaacgcgatcttgcgctgtttccaactgctggtgccatttgcctgtcagttcaaagttaaattgtgttcagattctgg

SEQ ID NO: 5422 - DNA, 1963 bp, Zea Mays
gttgtgtatgtatacatggggaaaatatttggtttgtggcttgtgtgaaaggataatttagtaatatttggaatggtcataagtcaaactagacttccctagcgacagcgattcaacgaataagaaccaggccaacagttatgtagtgcagagatctactcccagtcccgggaaccagcttccagtgcctcttgtaccgatcatcagcaagggagtgctagaggaggaggttatgatgacgatgacgccgacatcctgcacctctgctgcgacgctgccgaccaggacgcgggcccctccgtcgcgcgcgctctacaagtctggatccatcatcgtgctcggcaagactgacttccttaggccagacatgctacaagaagctcttgttccatggactcgatctctggaccgcactatcgttgcctcaacccctaggtcgtgctgccctctggcctcctcatcgtacaattcaccaacatctccaactctcttcttcaagcaagagatggagctttccttggtcgggctccaaaatgctaggaaaacatcacttgcagcagctcgcagcgacacccccgcctcctcatcatggaagttgtatctgtttcagaataagcaagtgtcgtatttagtaaaccagctcgtgttctaattcttttgcatgcttccattttgttgtaggctacaagaacactttgagtaggtgaagaggatttgcgacactaccacattgtctttggccatgcatcatctcagtgataagataacaagccaactagatatttcaaaattgactgacaagctacagtaagggaaggtagactcaactgcattgacaccaaaggagaagtatgaaacttggaaggagattaaaattatgaaaaaatagtttctccaatgtgggcaatgacattgcttagcttgtatgttagagttcatgtcaccatattaggcagaatctgacgcctttaatgtaaatggacacaagaccttcgttgcaatggatgattatcttgtcactgacaaaatcactgcattcatagtgcaaacgcaacatgcagcaactgaagtccttaaagaaaagcaaccaaaagactgtatgaaatggaccaagtattgcagacaatattacaaatattggacacgttcatggctctttctgaagatactcatggagaaattatcttgtacctgagaatcccccttatttttgcacaattgatggttgtgtcctgtagtggctttgataattcatcactcctaaacgattttagaaagctataccaactaatgtgtggaggacctgggcaaggggtggtagtcgcgctggttcgctatccacggcggcaagccgcctactcgaagatcccacctccgaggacgccgctacggggaggacatgggcactaatcttgaactaaaactaggggggtgtctatgacggctggttccgcctacaaccacgtggacaacttcttgcccgacatcatctcccagcttgttccacctacaaccgcgtggacaacttttcacccgacatcatctcctagctcctcgcattcgccaacaagttctgctatgagggcttgaagccaacctacgacaatcgggtcacaaccatggtgttggctcttgacgacgcctgatccctcatcgacatcggcctctaggaggcctcccacctcctcgtcacctcgtgcctctagcattcctatgggagcccccaaagtcactcacccacctagacatcgcccgtgttgttatttggtggtcagtatgtcacaatatagtcagttttttttgcttatgttgttggtactgattttattggatgtgaatttatttatcctttcattgtatattggaattcatgacattatctacatatgtacatgcttacatatctattatatttttgtataaatatttttttgatagtttttaatttgtatggcaaagcaag

SEQ ID NO: 5423 - DNA, 2142 bp, Zea Mays
ctcatctgatgtaaacaataatttttagtctggtaatggtgtaaaggcaaatgtggcatcatcacatatctaggcttccattgcttctcaatctatagtgaagatgaataatatttggaatggtcataagtcaaactagacttccctagcgacagcgattcaacgaataagaaccaggccaacagttatgtagtgcagagatctactcccagtcccgggaaccagcttccagtgcctcttgtaccgatcatcagcaagggagtgctagaggaggaggttatggtgagttttgtcgcgactaatggtgagcccacgactacggccacatcaaagctggtctggtggaacctcgtggagcagatgacgatgacgccgacatcctgcacctctgctgcgacgctgccgaccaggacgcgggcccctccgtcgcgcgcgctctacaagtctggatccatcatcgtgctcggcaagactgacttccttaggccagacatggatcccataaccagatggacagccacaaagaaaagtggcctgattagctacaagaagctcttgttccatggactcgatctctggaccgcactatcgttgcctcaacccctaggtcgtgctgccctctggcctcctcatcgtacaattcaccaacatctccaactctcttcttcaagcaagagatggagctttccttggtcgggctccaaaatgctaggaaaacatcacttgcagcagctcgcagcgacacccccgcctcctcatcatggaagttgtatctgtttcagaataagcaagtgtcgtatttagtaaaccagctcgtgttctaattcttttgcatgcttccattttgttgtaggctacaagaacactttgagtaggtgaagaggatttgcgacactaccacattgtctttggccatgcatcatctcagtgataagataacaagccaactagatatttcaaaattgactgacaagctacagtaagggaaggtagactcaactgcattgacaccaaaggagaagtatgaaacttggaaggagattaaaattatgagtttcagaaaaatagtttctccaatgtgggcaatgacattgcttagcttgtatgttagagttcatgtcaccatattaggcagaatctgacgcctttaatgtaaatggacacaagaccttcgttgcaatggatgattatcttgtcactgacaaaatcactgcattcatagtgcaaacgcaacatgcagcaactgaagtccttaaagaaaagcaaccaaaagactgtatgaaatggaccaagtattgcagacaatattacaaatattggacacgttcatggctctttctgaagatactcatggagaaattatcttgtacctgagaatcccccttatttttgcacaattgatggttgtgtcctgtagtggctttgataattcatcactcctaaacgattttagaaagctataccaactaatgtgtggaggacctgggcaaggggtggtagtcgcgctggttcgctatccacggcggcaagccgcctactcgaagatcccacctccgaggacgccgctacggggaggacatgggcactaatcttgaactaaaactaggggggtgtctatgacggctggttccgcctacaaccacgtggacaacttcttgcccgacatcatctcccagcttgttccacctacaaccgcgtggacaacttttcacccgacatcatctcctagctcctcgcattcgccaacaagttctgctatgagggcttgaagccaacctacgacaatcgggtcacaaccatggtgttggctcttgacgacgcctgatccctcatcgacatcggcctctaggaggcctcccacctcctcgtcacctcgtgcctctagcattcctatgggagcccccaaagtcactcacccacctagacatcgcccgtgttgttatttggtggtcagtatgtcacaatatagtcagttttttttgcttatgttgttggtactgattttattggatgtgaatttatttatcctttcattgtatattggaattcatgacattatctacatatgtacatgcttacatatctattatatttttgtataaatatttttttgatagtttttaatttgtatggcaaagcaag

SEQ ID NO: 5424 - DNA, 2589 bp, Zea Mays
gtgcagagatctactcccagtcccgggaaccagcttccagtgcctcttgtaccgatcatcagcaagggagtgctagaggaggaggttatggtgagttttgtcgcgactaatggtgagcccacgactacggccacatcaaagctggtctggtggaacctcgtggagcagatgacgatgacgccgacatcctgcacctctgctgcgacgctgccgaccaggacgcgggcccctccgtcgcgcgcgctctacaagtctggatccatcatcgtgctcggcaagactgacttccttaggccagacatgctacaagaagctcttgttccatggactcgatctctggaccgcactatcgttgcctcaacccctaggtcgtgctgccctctggcctcctcatcgtacaattcaccaacatctccaactctcttcttcaagcaagagatggagctttccttggtcgggctccaaaatgctaggaaaacatcacttgcagcagctcgcagcgacacccccgcctcctcatcatggaagctacaagaacactttgagtaggtgaagaggatttgcgacactaccacattgtctttggccatgcatcatctcagtgataagataacaagccaactagatatttcaaaattgactgacaagctacagtaagggaaggtagactcaactgcattgacaccaaaggagaagtatgaaacttggaaggagattaaaattatgagtttcagaaaaatagtttctccaatgtgggcaatgacattgcttagcttgtatgttagagttcatgtcaccatattaggcagaatctgacgcctttaatgtaaatggacacaagaccttcgttgcaatggatgattatcttgtcactgacaaaatcactgcattcatagtgcaaacgcaacatgcagcaactgaagtccttaaagaaaagcaaccaaaagactgtatgaaatggaccaagtattgcagacaatattacaaatattggacacgttcatggctctttctgaagatactcatggagaaattatcttgtacctgagaatcccccttatttttgcacaattgatggttgtgtcctgtagtggctttgataattcatcactcctaaacgattttagaaagctataccaactaatgtgtggaggacctgggcaaggggtggtagtcgcgctggttcgctatccacggcggcaagccgcctactcgaagatcccacctccgaggacgccgctacggggaggacatgggcactaatcttgaactaaaactaggggggtgtctatgtaagttaatactttctctcacatttgcatcaaaatttgttttccgataatcaacagatcttgacatgtttctatgtactttctctcacattgagagttttttagattcagtgcaagccatctttatttgcttaatgagtcatcgatcttgacacatttttcatattcatcatagtttttactcattctttacatgtttttgtccttttcagattcagtacatgtaagctttctttgcttggacaatctatttctctttacttggatattttcttttagattaagataggccacctttatttgcttaacgtgtggttgatcttgacatgtttttcagattaatcatatttttattcattcttgacatgcttttgtctgtttttatattagtttttattcattcttgatatgctttcgtctgttttctcagattagtttttattcattcttgacatgcttttgacttttttgaaatttagatcagtacatgtaagctttctttgctcgtacacctgaccccacatgtgttagcagtctctaggtcatgttcatattattcatccatctctgttatatagatagtcgacacatccatttatatctttttatagggctaatcattgagatatctcttcctcttggtcctcgtgaattttttgttcgttctatgatgagaaatcacaaattcatatctttttttttattttgggggcttcacttttttaaaaataaaatgtaaatatttggaccccgtacgtcgcgatcgcatccaggacggctggttccgcctacaaccacgtggacaacttcttgcccgacatcatctcccagcttgttccacctacaaccgcgtggacaacttttcacccgacatcatctcctagctcctcgcattcgccaacaagttctgctatgagggcttgaagccaacctacgacaatcgggtcacaaccatggtgttggctcttgacgacgcctgatccctcatcgacatcggcctctaggaggcctcccacctcctcgtcacctcgtgcctctagcattcctatgggagcccccaaagtcactcacccacctagacatcgcccgtgttgttatttggtggtcagtatgtcacaatatagtcagttttttttgcttatgttgttggtactgattttattggatgtgaatttatttatcctttcattgtatattggaattcatgacattatctacatatgtacatgcttacatatctattatatttttgtataaatatttttttgatagtttttaatttgtatggcaaagcaag

SEQ ID NO: 5425 - DNA, 2629 bp, Zea Mays
gatctactcccagtcccgggaaccagcttccagtgcctcttgtaccgatcatcagcaagggagtgctagaggaggaggttatggtgagttttgtcgcgactaatggtgagcccacgactacggccacatcaaagctggtctggtggaacctcgtggagcagatgacgatgacgccgacatcctgcacctctgctgcgacgctgccgaccaggacgcgggcccctccgtcgcgcgcgctctacaagtctggatccatcatcgtgctcggcaagactgacttccttaggccagacatggatcccataaccagatggacagccacaaagaaaagtggcctgattagctacaagaagctcttgttccatggactcgatctctggaccgcactatcgttgcctcaacccctaggtcgtgctgccctctggcctcctcatcgtacaattcaccaacatctccaactctcttcttcaagcaagagatggagctttccttggtcgggctccaaaatgctaggaaaacatcacttgcagcagctcgcagcgacacccccgcctcctcatcatggaagctacaagaacactttgagtaggtgaagaggatttgcgacactaccacattgtctttggccatgcatcatctcagtgataagataacaagccaactagatatttcaaaattgactgacaagctacagtaagggaaggtagactcaactgcattgacaccaaaggagaagtatgaaacttggaaggagattaaaattatgagtttcagaaaaatagtttctccaatgtgggcaatgacattgcttagcttgtatgttagagttcatgtcaccatattaggcagaatctgacgcctttaatgtaaatggacacaagaccttcgttgcaatggatgattatcttgtcactgacaaaatcactgcattcatagtgcaaacgcaacatgcagcaactgaagtccttaaagaaaagcaaccaaaagactgtatgaaatggaccaagtattgcagacaatattacaaatattggacacgttcatggctctttctgaagatactcatggagaaattatcttgtacctgagaatcccccttatttttgcacaattgatggttgtgtcctgtagtggctttgataattcatcactcctaaacgattttagaaagctataccaactaatgtgtggaggacctgggcaaggggtggtagtcgcgctggttcgctatccacggcggcaagccgcctactcgaagatcccacctccgaggacgccgctacggggaggacatgggcactaatcttgaactaaaactaggggggtgtctatgtaagttaatactttctctcacatttgcatcaaaatttgttttccgataatcaacagatcttgacatgtttctatgtactttctctcacattgagagttttttagattcagtgcaagccatctttatttgcttaatgagtcatcgatcttgacacatttttcatattcatcatagtttttactcattctttacatgtttttgtccttttcagattcagtacatgtaagctttctttgcttggacaatctatttctctttacttggatattttcttttagattaagataggccacctttatttgcttaacgtgtggttgatcttgacatgtttttcagattaatcatatttttattcattcttgacatgcttttgtctgtttttatattagtttttattcattcttgatatgctttcgtctgttttctcagattagtttttattcattcttgacatgcttttgacttttttgaaatttagatcagtacatgtaagctttctttgctcgtacacctgaccccacatgtgttagcagtctctaggtcatgttcatattattcatccatctctgttatatagatagtcgacacatccatttatatctttttatagggctaatcattgagatatctcttcctcttggtcctcgtgaattttttgttcgttctatgatgagaaatcacaaattcatatctttttttttattttgggggcttcacttttttaaaaataaaatgtaaatatttggaccccgtacgtcgcgatcgcatccaggacggctggttccgcctacaaccacgtggacaacttcttgcccgacatcatctcccagcttgttccacctacaaccgcgtggacaacttttcacccgacatcatctcctagctcctcgcattcgccaacaagttctgctatgagggcttgaagccaacctacgacaatcgggtcacaaccatggtgttggctcttgacgacgcctgatccctcatcgacatcggcctctaggaggcctcccacctcctcgtcacctcgtgcctctagcattcctatgggagcccccaaagtcactcacccacctagacatcgcccgtgttgttatttggtggtcagtatgtcacaatatagtcagttttttttgcttatgttgttggtactgattttattggatgtgaatttatttatcctttcattgtatattggaattcatgacattatctacatatgtacatgcttacatatctattatatttttgtataaatatttttttgatagtttttaatttgtatggcaaagcaag

SEQ ID NO: 5426 - DNA, 2953 bp, Zea Mays
ctcccagtcccgtgtagtgagaccgagagcatgaggcttcagtacctgtctactaacatcagatgcattagttgatgtcttgattagttgtagcagggaaccagcttccagtgcctcttgtaccgatcatcagcaagggagtgctagaggaggaggttatggtgagttttgtcgcgactaatggtgagcccacgactacggccacatcaaagctggtctggtggaacctcgtggagcagatgacgatgacgccgacatcctgcacctctgctgcgacgctgccgaccaggacgcgggcccctccgtcgcgcgcgctctacaagtctggatccatcatcgtgctcggcaagactgacttccttaggccagacatggatcccataaccagatggacagccacaaagaaaagtggcctgattagctacaagaagctcttgttccatggactcgatctctggaccgcactatcgttgcctcaacccctaggtcgtgctgccctctggcctcctcatcgtacaattcaccaacatctccaacgtaagtgcagcaggttcagtaatgaactcaaaagtggcatcagaatactctaagagttttttgttctttttgcctggatatataccgagggcaatgcattcaaaactcctatagatgacgaatcccatctctccctcttttcccggacatcgatcccagtctcttcttcaagcaagagatggagctttccttggtcgggctccaaaatgctaggaaaacatcacttgcagcagctcgcagcgacacccccgcctcctcatcatggaagttgtatctgtttcagaataagcaagtgtcgtatttagtaaaccagctcgtgttctaattcttttgcatgcttccattttgttgtaggctacaagaacactttgagtaggtgaagaggatttgcgacactaccacattgtctttggccatgcatcatctcagtgataagataacaagccaactagatatttcaaaattgactgacaagctacagtaagggaaggtagactcaactgcattgacaccaaaggagaagtatgaaacttggaaggagattaaaattatgagtttcagaaaaatagtttctccaatgtgggcaatgacattgcttagcttgtatgttagagttcatgtcaccatattaggcagaatctgacgcctttaatgtaaatggacacaagaccttcgttgcaatggatgattatcttgtcactgacaaaatcactgcattcatagtgcaaacgcaacatgcagcaactgaagtccttaaagaaaagcaaccaaaagactgtatgaaatggaccaagtattgcagacaatattacaaatattggacacgttcatggctctttctgaagatactcatggagaaattatcttgtacctgagaatcccccttatttttgcacaattgatggttgtgtcctgtagtggctttgataattcatcactcctaaacgattttagaaagctataccaactaatgtgtggaggacctgggcaaggggtggtagtcgcgctggttcgctatccacggcggcaagccgcctactcgaagatcccacctccgaggacgccgctacggggaggacatgggcactaatcttgaactaaaactaggggggtgtctatgtaagttaatactttctctcacatttgcatcaaaatttgttttccgataatcaacagatcttgacatgtttctatgtactttctctcacattgagagttttttagattcagtgcaagccatctttatttgcttaatgagtcatcgatcttgacacatttttcatattcatcatagtttttactcattctttacatgtttttgtccttttcagattcagtacatgtaagctttctttgcttggacaatctatttctctttacttggatattttcttttagattaagataggccacctttatttgcttaacgtgtggttgatcttgacatgtttttcagattaatcatatttttattcattcttgacatgcttttgtctgtttttatattagtttttattcattcttgatatgctttcgtctgttttctcagattagtttttattcattcttgacatgcttttgacttttttgaaatttagatcagtacatgtaagctttctttgctcgtacacctgaccccacatgtgttagcagtctctaggtcatgttcatattattcatccatctctgttatatagatagtcgacacatccatttatatctttttatagggctaatcattgagatatctcttcctcttggtcctcgtgaattttttgttcgttctatgatgagaaatcacaaattcatatctttttttttattttgggggcttcacttttttaaaaataaaatgtaaatatttggaccccgtacgtcgcgatcgcatccaggacggctggttccgcctacaaccacgtggacaacttcttgcccgacatcatctcccagcttgttccacctacaaccgcgtggacaacttttcacccgacatcatctcctagctcctcgcattcgccaacaagttctgctatgagggcttgaagccaacctacgacaatcgggtcacaaccatggtgttggctcttgacgacgcctgatccctcatcgacatcggcctctaggaggcctcccacctcctcgtcacctcgtgcctctagcattcctatgggagcccccaaagtcactcacccacctagacatcgcccgtgttgttatttggtggtcagtatgtcacaatatagtcagttttttttgcttatgttgttggtactgattttattggatgtgaatttatttatcctttcattgtatattggaattcatgacattatctacatatgtacatgcttacatatctattatatttttgtataaatatttttttgatagtttttaatttgtatggcaaagcaag

SEQ ID NO: 5427 - DNA, 1728 bp, Zea Mays
aagaaactaggactgcttagggtcggagtgaggagtggcctgattagctacaagaagctcttgttccatggactcgatctctggaccgcactatcgttgcctcaacccctaggtcgtgctgccctctggcctcctcatcgtacaattcaccaacatctccaacgtaagtgcagcaggttcagtaatgaactcaaaagtggcatcagaatactctaagagttttttgttctttttgcctggatatataccgagggcaatgcattcaaaactcctatagatgacgaatcccatctctccctcttttcccggacatcgatcccagtctcttcttcaagcaagagatggagctttccttggtcgggctccaaaatgctaggaaaacatcacttgcagcagctcgcagcgacacccccgcctcctcatcatggaagttgtatctgtttcagaataagcaagtgtcgtatttagtaaaccagctcgtgttctaattcttttgcatgcttccattttgttgtaggctacaagaacactttgagtaggtgaagaggatttgcgacactaccacattgtctttggccatgcatcatctcagtgataagataacaagccaactagatatttcaaaattgactgacaagctacagtaagggaaggtagactcaactgcattgacaccaaaggagaagtatgaaacttggaaggagattaaaattatgagcagaatctgacgcctttaatgtaaatggacacaagaccttcgttgcaatggatgattatcttgtcactgacaaaatcactgcattcatagtgcaaacgcaacatgcagcaactgaagtccttaaagaaaagcaaccaaaagactgtatgaaatggaccaagtattgcagacaatattacaaatattggacacgttcatggctctttctgaagatactcatggagaaattatcttgtacctgagaatcccccttatttttgcacaattgatggttgtgtcctgtagtggctttgataattcatcactcctaaacgattttagaaagctataccaactaatgtgtggaggacctgggcaaggggtggtagtcgcgctggttcgctatccacggcggcaagccgcctactcgaagatcccacctccgaggacgccgctacggggaggacatgggcactaatcttgaactaaaactaggggggtgtctatgacggctggttccgcctacaaccacgtggacaacttcttgcccgacatcatctcccagcttgttccacctacaaccgcgtggacaacttttcacccgacatcatctcctagctcctcgcattcgccaacaagttctgctatgagggcttgaagccaacctacgacaatcgggtcacaaccatggtgttggctcttgacgacgcctgatccctcatcgacatcggcctctaggaggcctcccacctcctcgtcacctcgtgcctctagcattcctatgggagcccccaaagtcactcacccacctagacatcgcccgtgttgttatttggtggtcagtatgtcacaatatagtcagttttttttgcttatgttgttggtactgattttattggatgtgaatttatttatcctttcattgtatattggaattcatgacattatctacatatgtacatgcttacatatctattatatttttgtataaatatttttttgatagtttttaatttgtatggcaaagcaag

SEQ ID NO: 5428 - DNA, 1039 bp, Zea Mays
cctcctcattctatgctcaagcattttcgcagaatctgacgcctttaatgtaaatggacacaagaccttcgttgcaatggatgattatcttgtcactgacaaaatcactgcattcatagtgcaaacgcaacatgcagcaactgaagtccttaaagaaaagcaaccaaaagactgtatgaaatggaccaagtattgcagacaatattacaaatattggacacgttcatggctctttctgaagatactcatggagaaattatcttgtacctgagaatcccccttatttttgcacaattgatggttgtgtcctgtagtggctttgataattcatcactcctaaacgattttagaaagctataccaactaatgtgtggaggacctgggcaaggggtggtagtcgcgctggttcgctatccacggcggcaagccgcctactcgaagatcccacctccgaggacgccgctacggggaggacatgggcactaatcttgaactaaaactaggggggtgtctatgacggctggttccgcctacaaccacgtggacaacttcttgcccgacatcatctcccagcttgttccacctacaaccgcgtggacaacttttcacccgacatcatctcctagctcctcgcattcgccaacaagttctgctatgagggcttgaagccaacctacgacaatcgggtcacaaccatggtgttggctcttgacgacgcctgatccctcatcgacatcggcctctaggaggcctcccacctcctcgtcacctcgtgcctctagcattcctatgggagcccccaaagtcactcacccacctagacatcgcccgtgttgttatttggtggtcagtatgtcacaatatagtcagttttttttgcttatgttgttggtactgattttattggatgtgaatttatttatcctttcattgtatattggaattcatgacattatctacatatgtacatgcttacatatctattatatttttgtataaatatttttttgatagtttttaatttgtatggcaaagcaag

SEQ ID NO: 5429 - DNA, 1971 bp, Zea Mays
gagacagaaaaggcaacagtcgactctcgcccagggcacgtgagtgacggtgtatttgggcggcccaacgcccgcaagctgccacatttcagcccacgcaaaccaagccaggcgaaaacccggcaccggtgcgccagcccagccacaggctcccaaaccgaccgggcggcgatggtgttggtgtcggactcggagctggtggagcggctgcaggaggtgctgcggtcgtcggacctcaacaccacgaccaccgctgccctgcgccgccgcctcgaggaggacttcggcgccgacctctcccacaaaaaggccttcattcgggagcaggtcgacctcttcctcgccgaggtcgccgccaaggccgagccgcaggagcccaaggaggaggagcccgaggaggcgccggtgcctaaggaggaggagccagaggagctcgagggggtggaggaggagggcgagggggaggacgaagaagaagaagaggaggaggaggaggaggaggaatgcgaggatgagaatagcagcggcgcccggaagaagcagcggggtaatgatggcaaaaagaggggtggtggctttacaaaattatgcagtctttcaccggcacttcaagagtttgtcggcgcctctgagttagccaggacagaggttgtcaagaagctttgggcatatattcgagaaaataatcttcaagaccaaaacaataggaggaagattttgccggatgagagattgaagaagatcttcaatgtcaattccattgatatgtttcaaatgaataaagctttgaccaagcatatctggccattgaattctgagggtcctgtctctcctgatagatcaacacccaaagagaagccacaaaagagagacaggagtgaaggaaagaagcaaaagggtggctcttcaggagctggatctggttttctcgtgccccttcaactttcggatgatttagtaaaatttatcggcactggtgagagcatgttatcacgatctgatgtcgtgaagaaaatgtgggattacataaaagggaacaacctgcaggcccttttatttcagtcgccttccagaaataggctgtatgcctatccactatggccaatagccagagttctaaattgcagcagcaaccagccaattactgatccttctgaccggaggaaaataatctgcgatgagaagctgaaggacctatttggagtggaaacattcaccggctttactgtttcgaagctgcttgcccctcattttaccaagacgaagtagcaacctgccatccacatcttctaaaaccaaaaaggcttggtaattttgtttttgcagaatgtgtaatcatggaacagttaggagctatgtgggtggtgtgaatttttttttgtttacctatgggagtcgatggcactttttcgaacattaccagtaaagtaggctccttcctcaatgtctaatggaagttatcaactggtcactaaccatttcgcgctctccaaaaatgtagggacataaaattatctgtgcggtgtggcttctagtgcgttcttcccgagttcatggtccaccatttttcatgctcagggttgaggatgacattgctcggtctcctcagatgaccctagtggtcatggaaccgtaaagacaaggggggagcactagcgcttgtcgcctagggtttcagggttctccacttgccagtgaatctttcatcctttttagctcctgatatggatgaagtttgtagcactagcgcaaccgccttttgctgttccttcccactcacttggtaccggttgttcagaggacgccagtttatatttgtatggaccacctaaactgaagctgttttgtcatgtgggtggcatggcgaagtgggtcgatatcgcgacggttctgtaacgcgatcttgcgctgtttccaactgctggtgccatttgcctgtcagttcaaagttaaattgtgttcagattctgg

SEQ ID NO: 5430 - DNA, 1893 bp, Zea Mays
gaaaaggcaacagtcgactctcgcccagggcacgtgagtgacggtgtatttgggcggcccaacgcccgcaagctgccacatttcagcccacgcaaaccaagccaggcgaaaacccggcaccggtgcgccagcccagccacaggctcccaaaccgaccgggcggcgatggtgttggtgtcggactcggagctggtggagcggctgcaggaggtgctgcggtcgtcggacctcaacaccacgaccaccgctgccctgcgccgccgcctcgaggaggacttcggcgccgacctctcccacaaaaaggccttcattcgggagcaggtcgacctcttcctcgccgaggtcgccgccaaggccgagccgcaggagcccaaggaggaggagcccgaggaggcgccggtgcctaaggaggaggagccagaggagctcgagggggtggaggaggagggcgagggggaggacgaagaagaagaagaggaggaggaggaggaggaggaatgcgaggatgagaatagcagcggcgcccggaagaagcagcggggtaatgatggcaaaaagaggggtggtggctttacaaaattatgcagtctttcaccggcacttcaagagtttgtcggcgcctctgagttagccaggacagaggttgtcaagaagctttgggcatatattcgagaaaataatcttcaagaccaaaacaataggaggaagattttgccggatgagagattgaagaagatcttcaatgtcaattccattgatatgtttcaaatgaataaagctttgaccaagcatatctggccattgaattctgagggtcctgtctctcctgatagatcaacacccaaagagaagccacaaaagagagacaggagtgaaggaaagaagcaaaagggtggctcttcaggagctggatctggttttctcgtgccccttcaactttcggatgatttagtaaaatttatcggcactggtgagagcatgttatcacgatctgatgtcgtgaagaaaatgtgggattacataaaagggaacaacctgcaggcccttttatttcagtcgccttccagaaataggctgtatgcctatccactatggccaatagccagagttctaaattgcagcagcaaccagccaattactgtcagtaactggaaaaattctagggcacttttgacatgttatgttggacttcttgaaaaccgtcgtgaaagaaaataagagaacataatgcagtgagatgtctcctggctcccagcaaaaggatccttctgaccggaggaaaataatctgcgatgagaagctgaaggacctatttggagtggaaacattcaccggctttactgtttcgaagctgcttgcccctcattttaccaagacgaagtagcaacctgccatccacatcttctaaaaccaaaaaggcttgggacataaaattatctgtgcggtgtggcttctagtgcgttcttcccgagttcatggtccaccatttttcatgctcagggttgaggatgacattgctcggtctcctcagatgaccctagtggtcatggaaccgtaaagacaaggggggagcactagcgcttgtcgcctagggtttcagggttctccacttgccagtgaatctttcatcctttttagctcctgatatggatgaagtttgtagcactagcgcaaccgccttttgctgttccttcccactcacttggtaccggttgttcagaggacgccagtttatatttgtatggaccacctaaactgaagctgttttgtcatgtgggtggcatggcgaagtgggtcgatatcgcgacggttctgtaacgcgatcttgcgctgtttccaactgctggtgccatttgcctgtcagttcaaagttaaattgtgttcagattctgg

SEQ ID NO: 5431 - DNA, 1625 bp, Zea Mays
ccaagccaggcgaaaacccggcaccggtgcgccagcccagccacaggctcccaaaccgaccgggcggcgatggtgttggtgtcggactcggagctggtggagcggctgcaggaggtgctgcggtcgtcggacctcaacaccacgaccaccgctgccctgcgccgccgcctcgaggaggacttcggcgccgacctctcccacaaaaaggccttcattcgggagcaggtcgacctcttcctcgccgaggtcgccgccaaggccgagccgcaggagcccaaggaggaggagcccgaggaggcgccggtgcctaaggaggaggagccagaggagctcgagggggtggaggaggagggcgagggggaggacgaagaagaagaagaggaggaggaggaggaggaggaatgcgaggatgagaatagcagcggcgcccggaagaagcagcggggtaatgatggcaaaaagaggggtggtggctttacaaaattatgcagtctttcaccggcacttcaagagtttgtcggcgcctctgagttagccaggacagaggttgtcaagaagctttgggcatatattcgagaaaataatcttcaagaccaaaacaataggaggaagattttgccggatgagagattgaagaagatcttcaatgtcaattccattgatatgtttcaaatgaataaagctttgaccaagcatatctggccattgaattctgagggtcctgtctctcctgatagatcaacacccaaagagaagccacaaaagagagacaggagtgaaggaaagaagcaaaagggtggctcttcaggagctggatctggttttctcgtgccccttcaactttcggatgatttagtaaaatttatcggcactggtgagagcatgttatcacgatctgatgtcgtgaagaaaatgtgggattacataaaagggaacaacctgcagaattatttggagtttatagtcattgagactgatcctgtggaaatagtagatccttctgaccggaggaaaataatctgcgatgagaagctgaaggacctatttggagtggaaacattcaccggctttactgtttcgaagctgcttgcccctcattttaccaagacgaagtagcaacctgccatccacatcttctaaaaccaaaaaggcttgggacataaaattatctgtgcggtgtggcttctagtgcgttcttcccgagttcatggtccaccatttttcatgctcagggttgaggatgacattgctcggtctcctcagatgaccctagtggtcatggaaccgtaaagacaaggggggagcactagcgcttgtcgcctagggtttcagggttctccacttgccagtgaatctttcatcctttttagctcctgatatggatgaagtttgtagcactagcgcaaccgccttttgctgttccttcccactcacttggtaccggttgttcagaggacgccagtttatatttgtatggaccacctaaactgaagctgttttgtcatgtgggtggcatggcgaagtgggtcgatatcgcgacggttctgtaacgcgatcttgcgctgtttccaactgctggtgccatttgcctgtcagttcaaagttaaattgtgttcagattctgg

SEQ ID NO: 5432 - DNA, 1357 bp, Zea Mays
attccttcctggaggtttctggatcgcgcggggtaatgatggcaaaaagaggggtggtggctttacaaaattatgcagtctttcaccggcacttcaagagtttgtcggcgcctctgagttagccaggacagaggttgtcaagaagctttgggcatatattcgagaaaataatcttcaagaccaaaacaataggaggaagattttgccggatgagagattgaagaagatcttcaatgtcaattccattgatatgtttcaaatgaataaagctttgaccaagcatatctggccattgaattctgagggtcctgtctctcctgatagatcaacacccaaagagaagccacaaaagagagacaggagtgaaggaaagaagcaaaagggtggctcttcaggagctggatctggttttctcgtgccccttcaactttcggatgatttagtaaaatttatcggcactggtgagagcatgttatcacgatctgatgtcgtgaagaaaatgtgggattacataaaagggaacaacctgcaggatccttctgaccggaggaaaataatctgcgatgagaagctgaaggacctatttggagtggaaacattcaccggctttactgtttcgaagctgcttgcccctcattttaccaagacgaagtagcaacctgccatccacatcttctaaaaccaaaaaggcttggtaattttgtttttgcagaatgtgtaatcatggaacagttaggagctatgtgggtggtgtgaatttttttttgtttacctatgggagtcgatggcactttttcgaacattaccagtaaagtaggctccttcctcaatgtctaatggaagttatcaactggtcactaaccatttcgcgctctccaaaaatgtagggacataaaattatctgtgcggtgtggcttctagtgcgttcttcccgagttcatggtccaccatttttcatgctcagggttgaggatgacattgctcggtctcctcagatgaccctagtggtcatggaaccgtaaagacaaggggggagcactagcgcttgtcgcctagggtttcagggttctccacttgccagtgaatctttcatcctttttagctcctgatatggatgaagtttgtagcactagcgcaaccgccttttgctgttccttcccactcacttggtaccggttgttcagaggacgccagtttatatttgtatggaccacctaaactgaagctgttttgtcatgtgggtggcatggcgaagtgggtcgatatcgcgacggttctgtaacgcgatcttgcgctgtttccaactgctggtgccatttgcctgtcagttcaaagttaaattgtgttcagattctgg

SEQ ID NO: 5433 - DNA, 1096 bp, Zea Mays
gagccattaaagaactcttcttggacacataaaaaacttttcatgtcctgtctctcctgatagatcaacacccaaagagaagccacaaaagagagacaggagtgaaggaaagaagcaaaagggtggctcttcaggagctggatctggttttctcgtgccccttcaactttcggatgatttagtaaaatttatcggcactggtgagagcatgttatcacgatctgatgtcgtgaagaaaatgtgggattacataaaagggaacaacctgcaggatccttctgaccggaggaaaataatctgcgatgagaagctgaaggacctatttggagtggaaacattcaccggctttactgtttcgaagctgcttgcccctcattttaccaagacgaagtagcaacctgccatccacatcttctaaaaccaaaaaggcttggtaattttgtttttgcagaatgtgtaatcatggaacagttaggagctatgtgggtggtgtgaatttttttttgtttacctatgggagtcgatggcactttttcgaacattaccagtaaagtaggctccttcctcaatgtctaatggaagttatcaactggtcactaaccatttcgcgctctccaaaaatgtagggacataaaattatctgtgcggtgtggcttctagtgcgttcttcccgagttcatggtccaccatttttcatgctcagggttgaggatgacattgctcggtctcctcagatgaccctagtggtcatggaaccgtaaagacaaggggggagcactagcgcttgtcgcctagggtttcagggttctccacttgccagtgaatctttcatcctttttagctcctgatatggatgaagtttgtagcactagcgcaaccgccttttgctgttccttcccactcacttggtaccggttgttcagaggacgccagtttatatttgtatggaccacctaaactgaagctgttttgtcatgtgggtggcatggcgaagtgggtcgatatcgcgacggttctgtaacgcgatcttgcgctgtttccaactgctggtgccatttgcctgtcagttcaaagttaaattgtgttcagattctgg

SEQ ID NO: 5434 - DNA, 948 bp, Zea Mays
gaacgtcagctcagtagtaacacaaagatcaaatctttggaagtaatgtcgcaatcggtgttctcgtaaataatatcaggggtgtttctgcagatgcattgtcattagggtgtcagccacaaggatccttctgaccggaggaaaataatctgcgatgagaagctgaaggacctatttggagtggaaacattcaccggctttactgtttcgaagctgcttgcccctcattttaccaagacgaagtagcaacctgccatccacatcttctaaaaccaaaaaggcttggtaattttgtttttgcagaatgtgtaatcatggaacagttaggagctatgtgggtggtgtgaatttttttttgtttacctatgggagtcgatggcactttttcgaacattaccagtaaagtaggctccttcctcaatgtctaatggaagttatcaactggtcactaaccatttcgcgctctccaaaaatgtagggacataaaattatctgtgcggtgtggcttctagtgcgttcttcccgagttcatggtccaccatttttcatgctcagggttgaggatgacattgctcggtctcctcagatgaccctagtggtcatggaaccgtaaagacaaggggggagcactagcgcttgtcgcctagggtttcagggttctccacttgccagtgaatctttcatcctttttagctcctgatatggatgaagtttgtagcactagcgcaaccgccttttgctgttccttcccactcacttggtaccggttgttcagaggacgccagtttatatttgtatggaccacctaaactgaagctgttttgtcatgtgggtggcatggcgaagtgggtcgatatcgcgacggttctgtaacgcgatcttgcgctgtttccaactgctggtgccatttgcctgtcagttcaaagttaaattgtgttcagattctgg

SEQ ID NO: 5435 - DNA, 1874 bp, Zea Mays
acccggtaaaacaactgcggcaaaactcaccaagcccccaaactgttaacaggtgataaagcttttctctctcttggccggccagtgacatcagacatcaccaactcgtcgacggtagagagagcaagctcttcggcgatttgagaagaatcgaggagcgagcgagcgagcgagcgagagaggaggaggaggagctggggcttgagcctgcgcccgggggccccgggtcacggaatcctaccattaccaaccctagccttcgttgatcgccgtctcaggtcatggcagggccggcgccggatcgggccgccctgactgtggggccgggcatggacatgccaatcatgcacgacagcgaccggtacgagctcgtgcgcgacatcggctccggcaacttcggcgttgcccgcctcatgcgcgaccgccgcaccagcgaactcgtcgccgtcaagtacatcgagcgcggcgagaagatagatgagaatgtccagcgtgagataattaaccatagatcattgaagcaccctaacattattaggtttaaagaggtgagttgggattgtgatgctgtttctccccagaattccattgttaaacatttttttattcttctttgtatgtctaggttattttaacaccgacccatcttgctattgtcatggaatatgcctctggcggtgagctttttgagaggatatgtaagaacgtgcgattcagtgaagatgagcttatttcaggagtaagctactgccattcaatgcaagtatgccaccgtgatttgaagttggagaacacacttctagatgggagtgacgctcctcgcttgaagatttgcgatttcggttattccaagtcatctgttcttcattcccagccgaagtccactgttggaacacctgcttatattgcacctgaagttttgttgaaaaaagaatatgatggcaagattgctgacgtttggtcatgtggtgtaaccctctatgtaatggttgttggcgcatatccttttgaagatccagaagagcctaagaacttccgcaagacaattcagcgtatcttgaatgttcagtacgcaattccagacaacgtgaacatatctccagagtgcaggcatctaatttcgaggatttttgttggcgatcctgctacgcgaataacaatccctgaaatccggaatcatagttggttcctgaagaaccttcctgctgatctgatggatgatgatagcatgagcaaccaatatgaggagcctgaccagccaatgcagaccatggatcagatcatgcagattttaacagaggccaccataccacctgcctgttctcgcagtataaatgtcctagctgatggactggacatggatgacgacatggatgatcttgattccgactcagatcttgatgttgacagcagcggtgagattgtgtacgcaatgtgagtaacatctcagcagccatctcagcagtcaaccaaggaaccaatcaggcatgggatgccctgttgtatactctggcaaagggcatgcttccttttgtgaaaaacatccatgtagttttctcaaggaatcgcaatgtgttctgtggaacacatatgttgtagtcaaactcgggttactcagcttgtaaaactagcctcctcttgcttcctggttactgggctttggatactctcaggcttcgacttgtgtgttgctgttaaatatgtataagaaacttctactcaggttgatctgtgaatctggattccggtagtggttttgctcagtgttgggtgtattcccgatttctgcatttcaaactctgatgattaggtcttgtatttaggcggtttctggatttcaaaatttgtgtttttttgtgcaatttacattttcg

SEQ ID NO: 5436 - DNA, 1453 bp, Zea Mays
attgtaagttaatgagttgaagttgtacagtgaaccatctcccacctttgacacttcgcgctccccatccaaacggtaccgatccgccggccgccgttctccatttcaaattgcaaacccgttctccttttccgcctcctcgacgcaactcgtcgccgtcttctccaactcgcacctcgttcctcgccccaccatttgccgctcccgcctacgatgccgacgagtgaggtgtggagcttgtccgattttgaaatcagcaagtacatcgctgagggcaggttcggcaaggtctacctcgcccgcgagaagcagagcgggtacgtggtggcgctcaaggtgatatttaaggcgaaactgaagaagcaccgcttccacgcgcacctgcggcgggagatcgagatccagcagagtctcgatcaccctaacgtgctccgcctcttcacctggttccacgacgaagagcgagtcgtcctcgtcctcgagtacgcggcccgtggcgagctctacaaggtccttcgcgctgctggccgcttcaccgagcgcacgtccgccacgtatgtagcgagtcttgctggtgcactggcatactgtcacaaaaagcaagtcattcatagggacatcaagcctgagaatttgctaatcgacatcgagggccggcttaaaattgcagattttggatgggcggctcgttcaaatgctaaacgccacacactctgtggcacaatcgattatctggcaccagagatggtagagaaaagagctcatgaccatgctgtggacaactggacattaggaatcctgtgctatgagttcttatatggttcacctccttttgaagctgatgaacaggatgataccttgagaaggatagttagggtggatttggcattcccttcatctccttgtgtatcttcagaggctaaggatctcatttccaagcttctagttaaggattcaagcaagaggctttgccttgaagacatcatgaagcatccatggataaagaagaatgcagacccttcaggcagttgcattaagcaaaaagatgtcacaagatcaaaggtaaaacgataagtgaatatgcaagatatcttctgagcaacagactagtgttcttgttccttggagataaccatggtgtttagtgtcagtagaagccagtctatgtactgtgatcttagttatggaccatgtgtcgaagttgctaaacttctgttgcttgcctcatctggggaggcaattaatcttagcttttgtgtgtatacagtagttccatatttttcagcccctctgtgatatatagatgtttggcgggtgggcgcttttattttgctattatggactcattgacattgtgcttgggtaatgaaatttgggcttaccgttgtaaaaaaacacactggtgttatctgattactctgctgagtatgaaaaatatataagttaattttaa

SEQ ID NO: 5437 - DNA, 1863 bp, Zea Mays
attgtaagttaatgggccgaagttgtacagtgaaccatctcccacctttgacacttcgcgctccccatccaaaccgtactgatccgccggccgccgttctccatttcaaattgcaaacctatactccttttccgcctcctcgacgcaactcgtcgccgtcttctccaactcgcacttcgtccctcgccccacccaggggcggatctccacccggggctgcctgggctgcagcccctgtcggcagtcgcggcccagtccatcatcgcgcgacatgacctagcagtagcagcagacgtcctacgtccagccccagccgccgccgtttggctcctgcgttcgatctcgctgcgtcctggtcctgcgccctgcggtccagcctcctctccaagactccacttctccagcgcgctcgcccgcgccagccgccagggccgccaccggccaccgccattgggccccaccatttgccgctcccgcctacgatgccgacgagtgaggtgtggagcttgtccgattttgaaatcagcaagtacatcgctgagggcaggttcggcaaggtctacctcgcccgcgagaagcagagcgggtacgtggtggcgctcaaggtgatatttaaggcgaaactgaagaagcaccgcttccacgcgcacctacggcgggagatcgagatccagcagagtctcgaccaccctaacgtgctccgcctcttcacctggttccacgacgaagagcgagtcgtcctcgtcctcgagtacgcggcccgtggcgagctctacaaggtccttcgcgctgctggccgcttcaccgagcgcacgtccgccacagtaaaaaaccccccgttttccttttgcttcacttttatttcccggttgtgcctacggctggattgccattcctcctactgttattaacctaaatcatgttaacctgaaccataataaccgatgcaaagtctcatgtgacagcgactgtgtacatacaaagttccctaggcagctagaccatgagccgagtagttatatggttggtaattctgtgatattacttctattcaggtcatgaatggtagcaagaaagttttgagtaatggcctaacttgattttactggaatcagatatcgtgtatgacaggagtcatcaattgctggtacattgtgtgcaatggtcaatggttacaagttacatcaaaggcagttgacattgaacaaaattcgatatttgcaaattcttagtgccatttaataagctttcaaaatgatattttggattttatggatctttgcattatctgattgcagcattaagtactctttagaaactcttaatgtatttcctaggagtataagttaagctgaaccaaatgtttatgtgaactgctaatcatgtgtcacacatgcagtgcgctctgcagtttatgactttattgccgtgaacccatacatttatacacaaaacatagagagaatgcatgacatctcttttaacatgacactgtctcagtctcaacttgtgatgatgccattattgccaagaacttgtgctgccattggcataccacaccctagagcatggtgtgtgtgtgtgtgtatgcaggtttccttctggtttgccattcttttgttagattgtgataaccatgaatcttatgtgttttagtatgtagcgagtcttgctggtgcactggcatactgtcacaaaaagcaagtcattcatagggacatcaagcctgagaatttgctaatcgacatcgagaccatctcagcaggtcgagaaaacccctgccccacccatacacggcgaaaccgtagcccatataagaacgaccgcgactcgggctagaccttagacctgtgctttggcgtg

SEQ ID NO: 5438 - DNA, 2645 bp, Zea Mays
attgtaagttaatgggccgaagttgtacagtgaaccatctcccacctttgacacttcgcgctccccatccaaaccgtactgatccgccggccgccgttctccatttcaaattgcaaacctatactccttttccgcctcctcgacgcaactcgtcgccgtcttctccaactcgcacttcgtccctcgccccacccaggggcggatctccacccggggctgcctgggctgcagcccctgtcggcagtcgcggcccagtccatcatcgcgcgacatgacctagcagtagcagcagacgtcctacgtccagccccagccgccgccgtttggctcctgcgttcgatctcgctgcgtcctggtcctgcgccctgcggtccagcctcctctccaagactccacttctccagcgcgctcgcccgcgccagccgccagggccgccaccggccaccgccattgggccccaccatttgccgctcccgcctacgatgccgacgagtgaggtgtggagcttgtccgattttgaaatcagcaagtacatcgctgagggcaggttcggcaaggtctacctcgcccgcgagaagcagagcgggtacgtggtggcgctcaaggtgatatttaaggcgaaactgaagaagcaccgcttccacgcgcacctacggcgggagatcgagatccagcagagtctcgaccaccctaacgtgctccgcctcttcacctggttccacgacgaagagcgagtcgtcctcgtcctcgagtacgcggcccgtggcgagctctacaaggtccttcgcgctgctggccgcttcaccgagcgcacgtccgccacagtaaaaaaccccccgttttccttttgcttcacttttatttcccggttgtgcctacggctggattgccattcctcctactgttattaacctaaatcatgttaacctgaaccataataaccgatgcaaagtctcatgtgacagcgactgtgtacatacaaagttccctaggcagctagaccatgagccgagtagttatatggttggtaattctgtgatattacttctattcaggtcatgaatggtagcaagaaagttttgagtaatggcctaacttgattttactggaatcagatatcgtgtatgacaggagtcatcaattgctggtacattgtgtgcaatggtcaatggttacaagttacatcaaaggcagttgacattgaacaaaattcgatatttgcaaattcttagtgccatttaataagctttcaaaatgatattttggattttatggatctttgcattatctgattgcagcattaagtactctttagaaactcttaatgtatttcctaggagtataagttaagctgaaccaaatgtttatgtgaactgctaatcatgtgtcacacatgcagtgcgctctgcagtttatgactttattgccgtgaacccatacatttatacacaaaacatagagagaatgcatgacatctcttttaacatgacactgtctcagtctcaacttgtgatgatgccattattgccaagaacttgtgctgccattggcataccacaccctagagcatggtgtgtgtgtgtgtgtatgcaggtttccttctggtttgccattcttttgttagattgtgataaccatgaatcttatgtgttttagtatgtagcgagtcttgctggtgcactggcatactgtcacaaaaagcaagtcattcatagggacatcaagcctgagaatttgctaatcgacatcgagggccggcttaaaattgcagattttggatgggcggctcgttcaaatgctaaacgccacacactctgtggcacaatcgattatctggcaccagagatggtagagaaaaaagctcatgaccatgctgtggacaactggacattaggaatcctgtgctatgagttcttatatggttcacctccttttgaagctgatgaacaggatgataccttgagaaggatagttagggtggatttggcattcccttcatctccttgtgtatcttcagaggctaaggatctcatttccaagcttctagttaaggattcaagcaagaggctttgccttgaagacatcatgaagcatccatggataaagaagaatgcagacccttcaggcagttgcattaagcaaaaagatgtcacaagatcaaagcttctgtaatatcagtacaacctgcttgccagtgggcaagaatcttctgatgtggtgccaaactcgtcactactggaggacaaatatgatgacatgttgtagttttaagttccgatagttctggagtggattggtgtgtgtccctgcaagctttctcctacaggctggagttctagttctgatgcagcgtttgtgtttcccttttgaactgagtcgtgaaaaccaatgttcactggagaggaatgtagttttctactgagttgttgaaccttcgcaaattggagggtcaatggtctgtggagactggagaggaacgtggctttcgctgtggcgatcgtattttgtaattgtcgaatctgcagtattttggcctttagcaatgatatatggaatggagatgcacgtagttttttctatgacgcgaaaagggagggaaaaactggtaatttcaaatggccatatatctattattatgagtttaa

SEQ ID NO: 5439 - DNA, 964 bp, Zea Mays
atcacatctatactactctttaagacaatagtgtaggcgtccatatccacggttatgcccctatcctccgcgatccccaagcgcgcaaatcccgtctctagcgcactcgtcgctcgcgagatctcgacgccgccgccgaggccccagcaccgatcgtggcagcagaggaagagagggaggtggtgggcttgtccagggcgacagcacctgcaccgatcgtggcagcaaatgatgaagggagggaggcggcgggcttgtccacggcgaaaatggccatctccggcatggtcgcccctagctctagagacggtgccgtggtagggtgggctgcgcgtggcggctgcccaggtgccgaggtgcggtcgtgatgctcgggagccgcaacagccagccgccacctcccccgtggccctgcccccaaacccgcgatcctctcgagccgcccccaccccgccccaccgttctctagcagtctggctccatccgcaagccccgcacgtctccatgattccacgccccccgccaccagctctacacccggtgctccgcctccatgccgcagatcgatcacgtccccactccccaaggctttggtttacaccggcaactattcgcccttccctactaaatctgcgatcatttcttctcgattgtgaccatggcgactcaggtatccctcgtcatgtggagggcggtcttctcagcgctaggcttgctcgtggtggccacgctggtgtacacattggccactgacggctcgctgttccatcctgagctggttacgccaaatggagcagcaacatttggacgatccacaacctgttgcggccctacctgcaagcctgcacctgtggtctctctagctattgtggactaagatgccacaagttcaattgctggagaggcagggacggtgatgccaggagccacgactcccaatctttaccgagtgctgattcttcct

SEQ ID NO: 5440 - DNA, 3485 bp, Zea Mays
cttcctcgtctgtcctctccccttcagcccttcctctttcactcctccgcctgtccggctgtccctttgctctctgctccgttccttgatccagattccgcggcggtgagggcacccagcccgatcgtccgtctctgtcgatctcccgaagccctaagtggaacccttctccgcgtcggattcgatcgcgggctgatttgatccagagaattcgcggggggcgccggcggcggggaataggatgctgtaggagggagagaggaaggaggaaacgtcccggatttctgggcgcgcgcgcgggcggccatgcatctgtcgctgtggaagccgctctcccactgcgccgcgctgctcttggacaagaaaaaccgcccgccgcggccgccgcaggcgggggcgggggcgggcgcggggtccggcggcgggcggcggctgcaggagagcaagctgcgggaggcgctggaggaggcgtccgaggacgggtccctcgccaagtcccgcgacgcggcgctcctcgatggaggggacggtgcggaggaggcgtccgtggggcggtcccgctcgctggcgcggctccacgcgcagcgggacttcctgcgcgcgacggccatggccgcagagcgcgcgttccagtcgccggacgcgctcccgatgctggaggaggcgctggccaggttcctcgccatgtaccccagctacgcgtccgcctcggacgtggaccgcctccgcgccgacgagtacccgcacctggacaagcaaccatgcgctctacggcgccgccgagaagggcaccgcggagcacgacatcaagaaccgcatcatggattacctcaacatccccgagtccgagtactgcctcgtcttcacggtcagccgcggctcggccttccggctgctcgctgagtgctaccccttcggcaccaacatgcgcctgctcaccatgttcgaccatgagtcccagtccgtgaactggatgacgcaggccgcgcgtgacaagggagccaaggcgtactccgcctggtttaagtggcccacgctcaagatctgcaccaccgagctccggaagctgatctccaccaagaagcggcggcgcaaggactccgccactggtctgttcgtgttccctgtgcagtcgagggtgacgggtgccaagtactcctaccagtggatggcattggctcagcaaaatcactggcatgtcctgctcgatgctggggctctggggcctaaggacatggactcgctggggctgtctctgttccggccagacttcatcatcacttcattttacagggtgtttggggctgaaccaactggttttggatgcttgctgatcaagaagtcggtaatggcatgcttgcagagcccgagcggtgggacgggggcagggatggtgcggattgtgccggtcttcccacagtatctcagtgattcagttgatgggtttgaaggtgtcctggatgggctggaggatgataatatcattcaaattgaggaggggtcggtgttgaacagtcaccatgcaccccatttgcctgcattctcaggtgcatattcatcagcgcaagtgagggaggttattgagagtgaaatggatcaggacagttcagatagagatggtgccagcaccatatatgaagagagcgagagtgtttctgttggagaggtgatgaagagccctgtgttcagtgaggatgagtcatcggagaactccttctgggttgatttgggacagagtccacttggttcagaccattcagagcaatcaagcaagggaaaattgggctctccattgccagcatcctggttttctggcaggaagagtgctaagaaggcgtcaccaaaggtgccatccaaactgtcaaggagtcctattcatgataaccatgttatgtcatttgatgcagccgtgaggtcggtatcacaagagccagggccggagaaaggggatctggatgaagataattcacatattaacatcaagaatactcctatcagcgagattgaagaagataataaagatgctaaagtaaataagaggtttgtaaaattttcttgtgccaacgacactgctgaaggtgaaggctgtgcaacctctgtttttgggagctgtaccacccgtgagaatggctccacatccgagattttctcagaaagtcaagcagaaaccaaagatagtgcaatcagaagagaaaatgaaggtgacttccgtctactgggaaggagggaagcatacaatggcagattcaatggtggaagattctttggagtagaagaatcggaacgagtgccaagtatggggcacaatgtatcattcactttggatgatagcaagctttgtcgtaatgcagatgctggggaaacatctgggtatggaatggcagatgacgatgacgacgacgacgatgcatacagtgactatgatgaggctctggatggcaggaaagaacctgaaattatctgcaaacatcttgatcatgtgaatatgcttggacttagcaagaccacacttagattacgatacctaatcaattggttggtgacctcattactgcagctccggttgcctgattcaggggatggcgagggggtaccccttgtttatatatatggtccaaagatcaaatatgaccgtggagcagcagttgcattcaatataaaggactgcaacactggaacctccctgataaatcctgaaactgtacagaaactggcagaaaaagaaggcctctccttgggcgtcgggttcctaagtcatatacgcctcatagacaaccagaaacatggtgcggttgatgtggggttaagttcttcctggccagcggcaaatggccgtcgtgaaaagaaaaatagcaagaatgctattattgggaccgaagtggtcactgcatctcttgggttccttacaaattttgaggatgtctacaggttgtgggcatttgctgcaaaatttcttgattcatcatttcttgagcaagagaggctatcatctattcctgaggatgcagaaagatagtattagatggttccagtttatggctattgcagctacttcataatagaggagggtggcaccagtgtaattgaaacgaggatagtagaagagatgtcatgttgcttctgcgtattgttttttaacgtctcagcatggagtcaaggggcaatacttggtagtgcggcttttatatttcttcattcttatttccatccttttctaggcatgcaacgtttttgtttgtagattttttttttggagatctatatgtaccagctaattattttgagcatcctttccatgtacttgcttgtaagttgtaaattggctccattggacatgaaatagatttgctcgcttgtatgattcttgcaacatgaatagcatgatgataggtgactgtacccttttcagttttgttgttgaatcctcagctgtcctaagatgttagtgtctgctatagttctgtcatgaatttgtctacttaagt

SEQ ID NO: 5441 - DNA, 273 bp, Zea Mays
atgcacaccgcaataataataaacaaatgtttcagatcaaacgcctacatgagcatctgttatagaataactcatttcaggcatgtgtttctgctctacagctcacaagttacaacagatgttctaagtaaaatgttctgtaaccgaacgccaagaagaagagttgtagctcaaagttcaaaggatcttcctaattcttctgacgtactcaggagcttcaaattgcacgtaaaattggcagtggtatggatgtcttgttacatcggtctctga

SEQ ID NO: 5442 - DNA, 1735 bp, Zea Mays
cgaagtcccgaacccgcgcggctaaagcagccaagtaaaaaaaaaatacaagagctagtaacagctcaagaaccttctttagagcgagtgcgtagagcgaagcgccgaagcgaggggacctgccagtgccacggcctcgagtgcagcagcagccagcagggatggctggcgcggtcgctgtgtggctgctgggggcgttcgccaagagtggacgcctgccggaggcgccggcgcaggctgctgccgatgcggaagacgcgcggcgccaccgcggagatgatggcgttggcgcggttgcgcgcgtcagcaacggtcgacgagtccaggagaagaggcggcgggatagcggcgcgctctccggctcggaggagaccgtcgtgtgcatgctcatggacctctacgccccggcgtgacgtacgtgtaacgtgcgggggacggcggtgttgtttctgggcgcgtagcgcttatgaatctacatctcataagctgggtttcattcagcaaaggtctccagttactacaggaatgatggtttcatttgcaaaaaatgttgctgatttcataaatagcatcgggaagaaccatattgtcattatatcaagtttagattctggaaagaggagagtgattgatgcatccaggtaactgaaacgtctaactgctgcagttctcttataggattgattctctgtcaatgtcgatatcattaactaacaatgtttaataatgtagtgacatgcaggtgtattacctttcaagttgcaatgaagatggttctgatccagaatatgagaaattggggtggaaaaagcttgaggattatgatccatctcagaaacggtggaattgtcttgctagcctagttgagggtggtggtctttcagaagatctggatgatgatactgatgagatgacaataaatgattactatgcaagcctgccatttgcagcactattctctgcctgcaaggctaaaggcttgaaagtttcttgtgtactgtgctactgctcggaaggcgacaacatgccagaatctttccagttagctgaagcaatatgcaaacttctaggtcatggccctgagaaattccatggaaatgggtcaaatggatggatcgttcccttgtcatggaaatcagtatatggaccaccacctgatatgtctatcttttagtgttgaattatgatcagttttataggtgaagttgccatcacggaaaatgctgagtagaatcgaggatgttgaactcttaatttagacagtgtaccagaagtatccaggagggcaccatgatacttaacccttaaatgcatgaatcagaatatttttgtaactggtactgtggctactaagagtcagatctttgtcaactcaggtctgctaggtgcttacgcatgttgcttaccatcataccatgtgccgtttccattctaaccatggaattccaagcttctcgtctgccgttttggcagttttgcccatttggtttggttgattttgatgtggtggaagaatctttgctagtgcgtacccctttatgaaaagttgctactgaatggtggaactgttcggtgaggcaattccgtcggcgatgcctggttgtctgtgttaagtaaccctagttagggttatgtgggcaaataccgactttgcccctgaggggtctcatatctctatataaggaacctgtacaccccttcataagatagagaacagaaagaggccagaggccca

SEQ ID NO: 5443 - DNA, 1565 bp, Zea Mays
gctaaagcagccaagtaaaaaaaaaatacaagagctagtaacagctcaagaaccttctttagagcgagtgcgtagagcgaagcgccgaagcgaggggacctgccagtgccacggcctcgagtgcagcagcagccagcagggatggctggcgcggtcgctgtgtggctgctgggggcgttcgccaagagtggacgcctgccggaggcgccggcgcaggctgctgccgatgcggaagacgcgcggcgccaccgcggagatgatggcgttggcgcggttgcgcgcgtcagcaacggtcgacgagtccaggagaagaggcggcgggatagcggcgcgctctccggctcggaggagaccgtcgtgtgcatgctcatggacctctacgccccggcgtgacgtacgtgtaacgtgcgggggacggcggtgttgtttctgggcgcgtagcgggaatgatggtttcatttgcaaaaaatgttgctgatttcataaatagcatcgggaagaaccatattgtcattatatcaagtttagattctggaaagaggagagtgattgatgcatccagtgacatgcaggtgtattacctttcaagttgcaatgaagatggttctgatccagaatatgagaaattggggtggaaaaagcttgaggattatgatccatctcagaaacggtggaattgtcttgctagcctagttgagggtggtggtctttcagaagatctggatgatgatactgatgagatgacaataaatgattactatgcaagcctgccatttgcagcactattctctgcctgcaaggctaaaggcttgaaagtttcttgtgtactgtgctactgctcggaaggcgacaacatgccagaatctttccagttagctgaagcaatatgcaaacttctaggtcatggccctgagaaattccatggaaatgggtcaaatggatggatcgttcccttgtcatggaaatcagtatatggaccaccacctgatatgtctatcttttagtgttgaattatgatcagttttataggtgaagttgccatcacggaaaatgctgagtagaatcgaggatgttgaactcttaatttagacagtgtaccagaagtatccaggagggcaccatgatacttaacccttaaatgcatgaatcagaatatttttgtaactggtactgtggctactaagagtcagatctttgtcaactcaggtctgctaggtgcttacgcatgttgcttaccatcataccatgtgccgtttccattctaaccatggaattccaagcttctcgtctgccgttttggcagttttgcccatttggtttggttgattttgatgtggtggaagaatctttgctagtgcgtacccctttatgaaaagttgctactgaatggtggaactgttcggtgaggcaattccgtcggcgatgcctggttgtctgtgttaagtaaccctagttagggttatgtgggcaaataccgactttgcccctgaggggtctcatatctctatataaggaacctgtacaccccttcataagatagagaacagaaagaggccagaggccca

SEQ ID NO: 5444 - DNA, 1147 bp, Zea Mays
aaggaagcaagatagctattgcactttcaagcaaaggaatgatggtttcatttgcaaaaaatgttgctgatttcataaatagcatcgggaagaaccatattgtcattatatcaagtttagattctggaaagaggagagtgattgatgcatccaggtgtattacctttcaagttgcaatgaagatggttctgatccagaatatgagaaattggggtggaaaaagcttgaggattatgatccatctcagaaacggtggaattgtcttgctagcctagttgagggtggtggtctttcagaagatctggatgatgatactgatgagatgacaataaatgattactatgcaagcctgccatttgcagcactattctctgcctgcaaggctaaaggcttgaaagtttcttgtgtactgtgctactgctcggaaggcgacaacatgccagaatctttccagttagctgaagcaatatgcaaacttctaggtcatggccctgagaaattccatggaaatgggtcaaatggatggatcgttcccttgtcatggaaatcagtatatggaccaccacctgatatgtctatcttttagtgttgaattatgatcagttttataggtgaagttgccatcacggaaaatgctgagtagaatcgaggatgttgaactcttaatttagacagtgtaccagaagtatccaggagggcaccatgatacttaacccttaaatgcatgaatcagaatatttttgtaactggtactgtggctactaagagtcagatctttgtcaactcaggtctgctaggtgcttacgcatgttgcttaccatcataccatgtgccgtttccattctaaccatggaattccaagcttctcgtctgccgttttggcagttttgcccatttggtttggttgattttgatgtggtggaagaatctttgctagtgcgtacccctttatgaaaagttgctactgaatggtggaactgttcggtgaggcaattccgtcggcgatgcctggttgtctgtgttaagtaaccctagttagggttatgtgggcaaataccgactttgcccctgaggggtctcatatctctatataaggaacctgtacaccccttcataagatagagaacagaaagaggccagaggccca

SEQ ID NO: 5445 - DNA, 1144 bp, Zea Mays
agctattgcactttcaagcaaaggaatgatggtttcatttgcaaaaaatgttgctgatttcataaatagcatcgggaagaaccatattgtcattatatcaagtttagattctggaaagaggagagtgattgatgcatccagtgacatgcaggtgtattacctttcaagttgcaatgaagatggttctgatccagaatatgagaaattggggtggaaaaagcttgaggattatgatccatctcagaaacggtggaattgtcttgctagcctagttgagggtggtggtctttcagaagatctggatgatgatactgatgagatgacaataaatgattactatgcaagcctgccatttgcagcactattctctgcctgcaaggctaaaggcttgaaagtttcttgtgtactgtgctactgctcggaaggcgacaacatgccagaatctttccagttagctgaagcaatatgcaaacttctaggtcatggccctgagaaattccatggaaatgggtcaaatggatggatcgttcccttgtcatggaaatcagtatatggaccaccacctgatatgtctatcttttagtgttgaattatgatcagttttataggtgaagttgccatcacggaaaatgctgagtagaatcgaggatgttgaactcttaatttagacagtgtaccagaagtatccaggagggcaccatgatacttaacccttaaatgcatgaatcagaatatttttgtaactggtactgtggctactaagagtcagatctttgtcaactcaggtctgctaggtgcttacgcatgttgcttaccatcataccatgtgccgtttccattctaaccatggaattccaagcttctcgtctgccgttttggcagttttgcccatttggtttggttgattttgatgtggtggaagaatctttgctagtgcgtacccctttatgaaaagttgctactgaatggtggaactgttcggtgaggcaattccgtcggcgatgcctggttgtctgtgttaagtaaccctagttagggttatgtgggcaaataccgactttgcccctgaggggtctcatatctctatataaggaacctgtacaccccttcataagatagagaacagaaagaggccagaggccca

SEQ ID NO: 5446 - DNA, 158 bp, Zea Mays
aagaaacagaggttctcatttcattctcgcacagtttctactttacacgttatcagcacttgctttacaaaagagagaaaattagttttataatccgactacatttaataccctgaacggaggtttaaacattcgatgtgataggggctaaattttag

SEQ ID NO: 5447 - DNA, 344 bp, Zea Mays
ggcagactcaactttcgcatcttgctcaccctgtgaaagaaaagaaataccactcactccacacttctcattgggtgattggcatataacctagcaagagtaagtataatgaccaagactgcaaaattccaccaacttgtttgtgccttctaccgtctacacaggatgggagctctaatatactgattttgctcgaaattgctctgaaaaatactaatatccacgggttcatttcgcgaattcgcatgcatgaaagtaaacataccagaacttcaggtagatgggtctttgacgtgccataaaaagtttaaaacgcaccgtctgtggctccgcggagtcgggcg

SEQ ID NO: 5448 - DNA, 2873 bp, Zea Mays
ggcggccgttggttcagcaaactttgcctgccattcactcgcacgtacccgtcggaccacgcgtggtggccggcacattcctcctcgcccggcccttatcctctgcccaactgcaacaggagagaagcgatgcgatattcctgttctgtaacagatcgaattctccagcatcttcagttgtgcggttgagctgagtggtcagataatccatccattccttttacgttgcatacatgtccaggttgagcttccacatgttctttattaacagtcacgatcagcgtggagcagcgtgtggttacgtgcaccagtttagcttagcagctgaagaaaagcaacgagacatggggaggatgagtgtgcgacgcgaggtcaaaagcagcaataaccatggcgagcagaaagaaagcatttcgcggaaaagaaagaatcaccccgtcgtccctgcagtctgcaggtgcggtagcggtgccccgtctccatccatcgcaaagcccccgggctttcgatcccgtcccctgcttttgttcccgcccgccagattccttccaacatcccggctgcactgcactgcaccacgactccacgagctgaggtgaaaagcaagcgagaaacgcgccgccccggggaggaggcgaggggtgagtcgggtcgggtgtgccgtgcgcgcgcgtatgggaatggcatgatcgtccggcggcgcgtggactccgtggatggataacggggacaggtcgggcgctggcgcgggcgccgtcggcagcgccggcagcctcggtctccgcgtcgggcaggcggtcttctcgtcggcgtcgctgctgttcatgtcggtcggtgtcgagttcttcagctacaccgccttctgcttcctggtgacgatcatggggctggtcatcccctggagctgcacgctggccatgatcgacgtgtactccgtgttcgtgggatgccctctgcgcgtgccgggcgtcatggtcatcgtcgtggccctgtcgatagtctcgttcgccgccgcctgctcgagcgccgcggtgatcgacctcctcctccagctccatggatcccacagctccccgacgttctgcgggaggtaccagctgtctgccatgatggcgttcttgtcctggctcctcatggccgcctctgccaccttcaacctctggttcgtcgcctcacggtggtaaagctgcagcaggccacttttttttttgtttcgtagatagcgcacataatttggctttggagagcgtatgtgttagctactggatgctactgggattcgagggagagaagatcagagaagagagtagcgtgtgggagagtgggagagaatgacaggaagatggcgatagatgtattcctttacccaaattcttcttgtcctgattattacagactcagtacttatactaccctgggacgcagcccatactcatttggtacactctggccatgaacacgcttgttcggacgacgcatacgactggacgcgtcttttcttctcccgcgtcttcagtatcagtagcttcactcaccggactgctaacattccctaccgcttgaaatgcggcttgcccccaagccgctgatagtgtagacaatgattgatgactctacttcagctttcagggattagcactgattaccccatagtttgggtgagtgagagacaagggcagtactgatgctggccttacaggagaaactcagcagccttgagttgttggttgggtacctttagaagctatgtctcccaatctgagaagatgacctggtgtgaaatgagcaaagattgtgtgagtaatactgaactggtgcccttttgtcaagaccgtagccaatatcatcaacagcactggccttctcgttagccaagagcaggctattgacactcgtgagccatgagttgcaaatcaagagaaggttagcaccgtcttgaccaccattttctttagatggacaaaaagaatgctccacggctaaatcactcaagtctgctcctgcaatgatattcttttcaagatcaaccagaagcatgacatccttttcttaagcacgacttgaatattgcaggatgggtccattcacggccagtgatttaatccaccacacccaagctgcataacagtaaaaagatggccatggcataggtctgacttgaacaccatcaccgaggagcaccgactgcacatgtggtggccatggttgcttgtacgacacgacatcccacccacactcggatggataccagatgttgcactgtgtaatcgtgtcctgtatcgtaaactgcataggtggcggccatggtggctttatatgcattagatccaaagcaaaaaaataataattctcagacactttcgaaacagcatgtgtggcattggttgcagaacagaaccaaacaatcgcatcatcaattgaggttgcattggtgagattagcagtgaaaaaccttggccggatatggtccacaatattctgggatacgacgatgactgagtgaaactcattgctgacagcaaagaggccatcacccaagttgtcagctaccagcacaaacccctttccaacagggtagtagccacaggcaacgttgatgtgctggaagaggatgttctctttcacctgattaaaactccaaagataaggctgcaactttgctgcaaatgtggttggaccaaccaattgcccctggtaaactttctcgactgtttcagcagccgcactgacctttaggatggcatcactagagaaacttgattcaacatcatactcagaagcgcgccattggggcaaacgtccatcagcagctgaaaatgtctttgcatatggaagcatgtgtgataaacttgatgtcagggtcctatccaggt

SEQ ID NO: 5449 - DNA, 1861 bp, Zea Mays
cacgtacccgtcggaccacgcgtggtggccggcacattcctcctcgcccggcccttatcctctgcccaactgcaacaggagagaagcgatgcgatattcctgttctgtaacagatcgaattctccagcatcttcagttgtgcggttgagctgagtggtcagataatccatccattccttttacgttgcatacatgtccaggttgagcttccacatgttctttattaacagtcacgatcagcgtggagcagcgtgtggttacgtgcaccagtttagcttagcagctgaagaaaagcaacgagacatggggaggatgagtgtgcgacgcgaggtcaaaagcagcaataaccatggcgagcagaaagaaagcatttcgcggaaaagaaagaatcaccccgtcgtccctgcagtctgcaggtgcggtagcggtgccccgtctccatccatcgcaaagcccccgggctttcgatcccgtcccctgcttttgttcccgcccgccagattccttccaacatcccggctgcactgcactgcaccacgactccacgagctgaggtgaaaagcaagcgagaaacgcgccgccccggggaggaggcgaggggtgagtcgggtcgggtgtgccgtgcgcgcgcgtatgggaatggcatgatcgtccggcggcgcgtggactccgtggatggataacggggacaggtcgggcgctggcgcgggcgccgtcggcagcgccggcagcctcggtctccgcgtcgggcaggcggtcttctcgtcggcgtcgctgctgttcatgtcggtcggtgtcgagttcttcagctacaccgccttctgcttcctggtgacgatcatggggctggtcatcccctggagctgcacgctggccatgatcgacgtgtactccgtgttcgtgggatgccctctgcgcgtgccgggcgtcatggtcatcgtcgtggtaggagactgcgccctgtcgatagtctcgttcgccgccgcctgctcgagcgccgcggtgatcgacctcctcctccagctccatggatcccacagctccccgacgttctgcgggaggatgggtccattcacggccagtgatttaatccaccacacccaagctgcataacagtaaaaagatggccatggcataggtctgacttgaacaccatcaccgaggagcaccgactgcacatgtggtggccatggttgcttgtacgacacgacatcccacccacactcggatggataccagatgttgcactgtgtaatcgtgtcctgtatcgtaaactgcataggtggcggccatggtggctttatatgcattagatccaaagcaaaaaaataataattctcagacactttcgaaacagcatgtgtggcattggttgcagaacagaaccaaacaatcgcatcatcaattgaggttgcattggtgagattagcagtgaaaaaccttggccggatatggtccacaatattctgggatacgacgatgactgagtgaaactcattgctgacagcaaagaggccatcacccaagttgtcagctaccagcacaaacccctttccaacagggtagtagccacaggcaacgttgatgtgctggaagaggatgttctctttcacctgattaaaactccaaagataaggctgcaactttgctgcaaatgtggttggaccaaccaattgcccctggtaaactttctcgactgtttcagcagccgcactgacctttaggatggcatcactagagaaacttgattcaacatcatactcagaagcgcgccattggggcaaacgtccatcagcagctgaaaatgtctttgcatatggaagcatgtgtgataaacttgatgtcagggtcctatccaggt

SEQ ID NO: 5450 - DNA, 2726 bp, Zea Mays
cgcccggcccttatcctctgcccaactgcaacaggagagaagcgatgcgatattcctgttctgtaacagatcgaattctccagcatcttcagttgtgcggttgagctgagtgtcacgatcagcgtggagcagcgtgtggttacgtgcaccagtttagcttagcagctgaagaaaagcaacgagacatggggaggatgagtgtgcgacgcgaggtcaaaagcagcaataaccatggcgagcagaaagaaagcatttcgcggaaaagaaagaatcaccccgtcgtccctgcagtctgcaggtgcggtagcggtgccccgtctccatccatcgcaaagcccccgggctttcgatcccgtcccctgcttttgttcccgcccgccagattccttccaacatcccggctgcactgcactgcaccacgactccacgagctgaggtgaaaagcaagcgagaaacgcgccgccccggggaggaggcgaggggtgagtcgggtcgggtgtgccgtgcgcgcgcgtatgggaatggcatgatcgtccggcggcgcgtggactccgtggatggataacggggacaggtcgggcgctggcgcgggcgccgtcggcagcgccggcagcctcggtctccgcgtcgggcaggcggtcttctcgtcggcgtcgctgctgttcatgtcggtcggtgtcgagttcttcagctacaccgccttctgcttcctggtgacgatcatggggctggtcatcccctggagctgcacgctggccatgatcgacgtgtactccgtgttcgtgggatgccctctgcgcgtgccgggcgtcatggtcatcgtcgtggtaggagactgcgccctgtcgatagtctcgttcgccgccgcctgctcgagcgccgcggtgatcgacctcctcctccagctccatggatcccacagctccccgacgttctgcgggaggtaccagctgtctgccatgatggcgttcttgtcctggctcctcatggccgcctctgccaccttcaacctctggttcgtcgcctcacggtggtaaagctgcagcaggccacttttttttttgtttcgtagatagcgcacataatttggctttggagagcgtatgtgttagctactggatgctactgggattcgagggagagaagatcagagaagagagtagcgtgtgggagagtgggagagaatgacaggaagatggcgatagatgtattcctttacccaaattcttcttgtcctgattattacagactcagtacttatactaccctgggacgcagcccatactcatttggtacactctggccatgaacacgcttgttcggacgacgcatacgactggacgcgtcttttcttctcccgcgtcttcagtatcagtagcttcactcaccggactgctaacattccctaccgcttgaaatgcggcttgcccccaagccgctgatagtgtagacaatgattgatgactctacttcagctttcagggattagcactgattaccccatagtttgggtgagtgagagacaagggcagtactgatgctggccttacaggagaaactcagcagccttgagttgttggttgggtacctttagaagctatgtctcccaatctgagaagatgacctggtgtgaaatgagcaaagattgtgtgagtaatactgaactggtgcccttttgtcaagaccgtagccaatatcatcaacagcactggccttctcgttagccaagagcaggctattgacactcgtgagccatgagttgcaaatcaagagaaggttagcaccgtcttgaccaccattttctttagatggacaaaaagaatgctccacggctaaatcactcaagtctgctcctgcaatgatattcttttcaagatcaaccagaagcatgacatccttttcttaagcacgacttgaatattgcaggatgggtccattcacggccagtgatttaatccaccacacccaagctgcataacagtaaaaagatggccatggcataggtctgacttgaacaccatcaccgaggagcaccgactgcacatgtggtggccatggttgcttgtacgacacgacatcccacccacactcggatggataccagatgttgcactgtgtaatcgtgtcctgtatcgtaaactgcataggtggcggccatggtggctttatatgcattagatccaaagcaaaaaaataataattctcagacactttcgaaacagcatgtgtggcattggttgcagaacagaaccaaacaatcgcatcatcaattgaggttgcattggtgagattagcagtgaaaaaccttggccggatatggtccacaatattctgggatacgacgatgactgagtgaaactcattgctgacagcaaagaggccatcacccaagttgtcagctaccagcacaaacccctttccaacagggtagtagccacaggcaacgttgatgtgctggaagaggatgttctctttcacctgattaaaactccaaagataaggctgcaactttgctgcaaatgtggttggaccaaccaattgcccctggtaaactttctcgactgtttcagcagccgcactgacctttaggatggcatcactagagaaacttgattcaacatcatactcagaagcgcgccattggggcaaacgtccatcagcagctgaaaatgtctttgcatatggaagcatgtgtgataaacttgatgtcagggtcctatccaggt

SEQ ID NO: 5451 - DNA, 125 bp, Zea Mays
tagagaagaaaaaaaaagggcctctggaagtggcaatgcaacaagtgaacgtcctcaacgctttgagaactggggccgcttgcgtgccttcttgagaccagccttcttcctttcaacgatacggg

SEQ ID NO: 5452 - DNA, 2357 bp, Zea Mays
gcaaaacgcaaggagcagcaagcaagacagtgagaccacagcacacacgcagtcaccgcagcgggatatatataaagataaaagaggtgtgtggagcgggagaaggccggactgaaggaggaagacgagcagggagagggaggtagggcaaaaggaagagaatccgagaataaattcagagagggagggagggagggccatgatgatggcaggcgtggcgtcgtaggtggttaaagcgaagggcgcccctcgtcgtccggtctatgagctggtaccagaactgctcataatattcaggggaaaaaaaaggcaacatggcggaatcgaaggtcgcaagtctggatgcccgaacgacgaagatcagaaacgtccccatcgcagtgaccccagaagggttctggtgctgcccgtcgcaagccgtgctccagaagacggcgaagagccaaaacccgcaggcgaagacgaagcccaaagggggtgcctcgcctctcgcaccaaaggcggcaccaccaatccagagggcacccacaatctcgtccgagagaaggacgcactcgactccgaccagggctaagaccaactcagaggagcagaggtgcttgccgccggcagaggacgctgcggctaataataatgccactaatccgccgaaggcggtgaacgagaggccacagaagcagcacaaggtatctgtggggttcggccagctcgagacgagtgacttgaaggtggtgctgtatggcaaggacggcgttgcggtgaagatgagcgtccacaagaacaccctagctggaaacagtaccttctttgctgacaagctctccgggcagtctccggcgtcgagtatagaagtgactgactgtgaggatgtggagatttatgtcgagacagttgggttgatgtactgcagtgatgtcaagcagaggcttatcaagcaaaccgttcctcgtgttcttcgagtcttgaaggttgcagagctgctgggtttcccagcatgtgtcatgtcatgcttagactacttggaagcggtcccttgggtcggggaagaagaggagaatgtggtctcgtctgtccggaacctgcagagcgagagctatggcgtcagtcctgtgctgaagagggtagcaccatctgatcgaacaaccccaccaaacgatacgttttcacatatcatcgaactggtcttgagaagcagcgaggacagggggcggcgcgagatgaaatctctggtgcagaagcttctgaaggagagtagcactggctgcatgagtgggtcttccgacctgtgttctgcggtcctctacagatcatgccggaactgcctggattccttactaatcctgtttcagcaagcaaccgacagtgatttcgctgagcaggctcttaataccaaagaaccagttttccgacaagttgctctagaagcagataacctgctctggttagctgagatcttggctgacaggaatgccgctgacgagttcgcggtcatatgggctagccaacgtgagctggctgggctgcactctaggttgccagtcaagtcgcgccaccttgtcagctgtgtcacggcgaggctgttcgtgggcatcgggaaaggggagatgcttccttcgaaggacacgaggcggcttctcttggacgtctggttgcagcctctcatggatgactacaactggttgcagcacggctgcaggtcgttcgaccggaaagtggtggaggaaggtgttgggcggaccatcctgacgctccctttggaggatcagcagacgatcctgctctcgtggcttgggagcttcctgaaggttggggacagctgccccaatctccagaaggcctttgaggtttggtggaggagaactttcgtaaggccctatgctgagcagcaaggtaatcgatcgcaatcaggtcggagttgagatgtcaattggttgcagaagaagatagtcttgtttcctagtgtagtatatttgatgagaagttagggtggcggtttcttcttgcgtggtagcccgcgtgggagatccccagtatgtggaggaaatgcggttagtactcttgacctgcgtgaggcttgaggaagttcgcgttgtgcttgtgatgcttcgtatgtatgtcaagatctctgaattctgggtgcagaatttgtatcgtcaggcatctgttttgatgctctgttctgcttctcacaacgttgcacgatgttaattaaggatctgttatgtaaaagaactcgacgccttcaatgcaactgtaaagattttgcagaatgtgttcttctaaagtggagacatatcggtttctatttgtgttgtatggatgattgtccagtttgaaacggtgatgtgtgttaggaa

SEQ ID NO: 5453 - DNA, 2269 bp, Zea Mays
gggagggccatgatgatggcaggcgtggcgtcgtaggtggttaaagcgaagggcgcccctcgtcgtccgatgctcccgggccgtctttattacggctgtcgccgggctgggctgcggtcggcggcggaagggagtcttctggcggagatatgagaggattgttttagtgaggtctatgagctggtaccagaactgctcataatattcaggggaaaaaaaaggcaacatggcggaatcgaaggtcgcaagtctggatgcccgaacgacgaagatcagaaacgtccccatcgcagtgaccccagaagggttctggtgctgcccgtcgcaagccgtgctccagaagacggcgaagagccaaaacccgcaggcgaagacgaagcccaaagggggtgcctcgcctctcgcaccaaaggcggcaccaccaatccagagggcacccacaatctcgtccgagagaaggacgcactcgactccgaccagggctaagaccaactcagaggagcagaggtgcttgccgccggcagaggacgctgcggctaataataatgccactaatccgccgaaggcggtgaacgagaggccacagaagcagcacaaggtatctgtggggttcggccagctcgagacgagtgacttgaaggtggtgctgtatggcaaggacggcgttgcggtgaagatgagcgtccacaagaacaccctagctggaaacagtaccttctttgctgacaagctctccgggcagtctccggcgtcgagtatagaagtgactgactgtgaggatgtggagatttatgtcgagacagttgggttgatgtactgcagtgatgtcaagcagaggcttatcaagcaaaccgttcctcgtgttcttcgagtcttgaaggttgcagagctgctgggtttcccagcatgtgtcatgtcatgcttagactacttggaagcggtcccttgggtcggggaagaagaggagaatgtggtctcgtctgtccggaacctgcagagcgagagctatggcgtcagtcctgtgctgaagagggtagcaccatctgatcgaacaaccccaccaaacgatacgttttcacatatcatcgaactggtcttgagaagcagcgaggacagggggcggcgcgagatgaaatctctggtgcagaagcttctgaaggagagtagcactggctgcatgagtgggtcttccgacctgtgttctgcggtcctctacagatcatgccggaactgcctggattccttactaatcctgtttcagcaagcaaccgacagtgatttcgctgagcaggctcttaataccaaagaaccagttttccgacaagttgctctagaagcagataacctgctctggttagctgagatcttggctgacaggaatgccgctgacgagttcgcggtcatatgggctagccaacgtgagctggctgggctgcactctaggttgccagtcaagtcgcgccaccttgtcagctgtgtcacggcgaggctgttcgtgggcatcgggaaaggggagatgcttccttcgaaggacacgaggcggcttctcttggacgtctggttgcagcctctcatggatgactacaactggttgcagcacggctgcaggtcgttcgaccggaaagtggtggaggaaggtgttgggcggaccatcctgacgctccctttggaggatcagcagacgatcctgctctcgtggcttgggagcttcctgaaggttggggacagctgccccaatctccagaaggcctttgaggtttggtggaggagaactttcgtaaggccctatgctgagcagcaaggtaatcgatcgcaatcaggtcggagttgagatgtcaattggttgcagaagaagatagtcttgtttcctagtgtagtatatttgatgagaagttagggtggcggtttcttcttgcgtggtagcccgcgtgggagatccccagtatgtggaggaaatgcggttagtactcttgacctgcgtgaggcttgaggaagttcgcgttgtgcttgtgatgcttcgtatgtatgtcaagatctctgaattctgggtgcagaatttgtatcgtcaggcatctgttttgatgctctgttctgcttctcacaacgttgcacgatgttaattaaggatctgttatgtaaaagaactcgacgccttcaatgcaactgtaaagattttgcagaatgtgttcttctaaagtggagacatatcggtttctatttgtgttgtatggatgattgtccagtttgaaacggtgatgtgtgttaggaa

SEQ ID NO: 5454 - DNA, 1419 bp, Zea Mays
gttaaagcgaagggcgcccctcgtcgtccggttgcagagctgctgggtttcccagcatgtgtcatgtcatgcttagactacttggaagcggtcccttgggtcggggaagaagaggagaatgtggtctcgtctgtccggaacctgcagagcgagagctatggcgtcagtcctgtgctgaagagggtagcaccatctgatcgaacaaccccaccaaacgatacgttttcacatatcatcgaactggtcttgagaagcagcgaggacagggggcggcgcgagatgaaatctctggtgcagaagcttctgaaggagagtagcactggctgcatgagtgggtcttccgacctgtgttctgcggtcctctacagatcatgccggaactgcctggattccttactaatcctgtttcagcaagcaaccgacagtgatttcgctgagcaggctcttaataccaaagaaccagttttccgacaagttgctctagaagcagataacctgctctggttagctgagatcttggctgacaggaatgccgctgacgagttcgcggtcatatgggctagccaacgtgagctggctgggctgcactctaggttgccagtcaagtcgcgccaccttgtcagctgtgtcacggcgaggctgttcgtgggcatcgggaaaggggagatgcttccttcgaaggacacgaggcggcttctcttggacgtctggttgcagcctctcatggatgactacaactggttgcagcacggctgcaggtcgttcgaccggaaagtggtggaggaaggtgttgggcggaccatcctgacgctccctttggaggatcagcagacgatcctgctctcgtggcttgggagcttcctgaaggttggggacagctgccccaatctccagaaggcctttgaggtttggtggaggagaactttcgtaaggccctatgctgagcagcaaggtaatcgatcgcaatcaggtcggagttgagatgtcaattggttgcagaagaagatagtcttgtttcctagtgtagtatatttgatgagaagttagggtggcggtttcttcttgcgtggtagcccgcgtgggagatccccagtatgtggaggaaatgcggttagtactcttgacctgcgtgaggcttgaggaagttcgcgttgtgcttgtgatgcttcgtatgtatgtcaagatctctgaattctgggtgcagaatttgtatcgtcaggcatctgttttgatgctctgttctgcttctcacaacgttgcacgatgttaattaaggatctgttatgtaaaagaactcgacgccttcaatgcaactgtaaagattttgcagaatgtgttcttctaaagtggagacatatcggtttctatttgtgttgtatggatgattgtccagtttgaaacggtgatgtgtgttaggaa

SEQ ID NO: 5455 - DNA, 2166 bp, Zea Mays
gttttttttcccctggatatataggggggtgatttatgttttgtgatggcatagcaacctgctataaggtctatgagctggtaccagaactgctcataatattcaggggaaaaaaaaggcaacatggcggaatcgaaggtcgcaagtctggatgcccgaacgacgaagatcagaaacgtccccatcgcagtgaccccagaagggttctggtgctgcccgtcgcaagccgtgctccagaagacggcgaagagccaaaacccgcaggcgaagacgaagcccaaagggggtgcctcgcctctcgcaccaaaggcggcaccaccaatccagagggcacccacaatctcgtccgagagaaggacgcactcgactccgaccagggctaagaccaactcagaggagcagaggtgcttgccgccggcagaggacgctgcggctaataataatgccactaatccgccgaaggcggtgaacgagaggccacagaagcagcacaaggtatctgtggggttcggccagctcgagacgagtgacttgaaggtggtgctgtatggcaaggacggcgttgcggtgaagatgagcgtccacaagaacaccctagctggaaacagtaccttctttgctgacaagctctccgggcagtctccggcgtcgagtatagaagtgactgactgtgaggatgtggagatttatgtcgagacagttgggttgatgtactgcagtgatgtcaagcagaggcttatcaagcaaaccgttcctcgtgttcttcgagtcttgaaggttgcagagctgctgggtttcccagcatgtgtcatgtcatgcttagactacttggaagcggtcccttgggtcggggaagaagaggagaatgtggtctcgtctgtccggaacctgcagagcgagagctatggcgtcagtcctgtgctgaagagggtagcaccatctgatcgaacaaccccaccaaacgatacgttttcacatatcatcgaactggtcttgagaagcagcgaggacagggggcggcgcgagatgaaatctctggtgcagaagcttctgaaggagagtagcactggctgcatgagtgggtcttccgacctgtgttctgcggtcctctacagatcatgccggaactgcctggattccttactaatcctgtttcagcaagcaaccgacagtgatttcgctgagcaggctcttaataccaaagaaccagttttccgacaagttgctctagaagcagataacctgctctggttagctgagatcttggctgacaggaatgccgctgacgagttcgcggtcatatgggctagccaacgtgagctggctgggctgcactctaggttgccagtcaagtcgcgccaccttgtcagctgtgtcacggcgaggctgttcgtgggcatcgggaaaggggagatgcttccttcgaaggacacgaggcggcttctcttggacgtctggttgcagcctctcatggatgactacaactggttgcagcacggctgcaggtcgttcgaccggaaagtggtggaggaaggtgttgggcggaccatcctgacgctccctttggaggatcagcagacgatcctgctctcgtggcttgggagcttcctgaaggttggggacagctgccccaatctccagaaggcctttgaggtttggtggaggagaactttcgtaaggccctatgctgagcagcaaggtaatcgatcgcaatcaggtcggagttgagatgtcaattggttgcagaagaagatagtcttgtttcctagtgtagtatatttgatgagaagttagggtggcggtttcttcttgcgtggtagcccgcgtgggagatccccagtatgtggaggaaatgcggttagtactcttgacctgcgtgaggcttgaggaagttcgcgttgtgcttgtgatgcttcgtatgtatgtcaagatctctgaattctgggtgcagaatttgtatcgtcaggcatctgttttgatgctctgttctgcttctcacaacgttgcacgatgttaattaaggatctgttatgtaaaagaactcgacgccttcaatgcaactgtaaagattttgcagaatgtgttcttctaaagtggagacatatcggtttctatttgtgttgtatggatgattgtccagtttgaaacggtgatgtgtgttaggaa

SEQ ID NO: 5456 - DNA, 1447 bp, Zea Mays
cacacattctcgtcgatcactcttcttcctcctccgcacacgcgcacatgcgaccagagcttagctcagcttagcttatagcagtatagcttattgcttatactgtctccccctcggcttcgtcgctcggaggtgtgcacacacacaaaccgaagcccttgccctcccatccccctccaaacgcgcgcaaccatggagagtggcggcatcattgcgccgtgtactccccaatgattgatctctcatcgtctcttcttccaaccacctcctcgtcctcgcactcgcactcgcactcgcccttctctcttccctgcccggctgcccgcttgtctccccaaaatgaccagcaacagcagccagaacatgagcagctgcagcaccggcggaagcgacgcggcggtcggcggcggcagctggctcggcttctcgctgtcgcctcacatggcggcgaccatggacggcgcggccgacggcgttccggtgcagcaccaccaccacgaaggcctcttctaccctcccgtcgtcagctcctcgcccgcgcccttctgctacgctctcggcggcggccaagatggcctcgccacggcggccgccaatggtggcggggggttctaccccgggctctcctctatgccgctcaagtccgacggctccctatgcatcctggaggccctccacaggagcgagcaagaacggcacggggtggtggtgtcgtcgtcgtcgcccaaactggaggatttcttgggcgcgagcgcgagcacggcgatggcgctgagcttggacagctccagcttctactacggctgcggccacggccacggccacgaccaaggcgggtacctgcagccaatgcagtgcgcggtgatgcccggctcgggcgggcacgacgtgtacggcggcgggcacgcgcagatggtggacgagcagtccgccgcggcaatggcggcgagctggttctccgcccgcggcaatggcggctacgacgtcgacggcgccggcgccggcgccatcgtgccgttgcagggccacccgcacccgctcgccctctccatgagctccgggacggggtcccagtccagcagcgtcaccatgcaagtcggcagcgcccacgccgacgccgtcaccgagtacatcgccatggacgggagcaagaagcgcggcgccggcaacggcgctagtgccgggcagaagcagcccaccatccaccgcaagaccatcgacacattcgggcagcgcacgtcgcagtaccgcggcgtcaccaggcataggtggacggggaggtatgaggcgcacctctgggacaacagctgcaggaaggaagggcagacccggaaaggccggcaagtttatctcggcgggtatgacgtggaggagaaggccgcgagggcatatgacctggcggcgctcaagtactgggggacgtccacgcacgtgaatttcccgtcag

SEQ ID NO: 5457 - DNA, 2716 bp, Zea Mays
attgcttatactgtctccccctcggcttcgtcgctcggaggtgtgcacacacacaaaccgaagcccttgccctcccatccccctccaaacgcgcgcaaccatggagagtggcggcatcattgcgccgtgtactccccaatgattgatctctcatcgtctcttcttccaaccacctcctcgtcctcgcactcgcactcgcactcgcccttctctcttccctgcccggctgcccgcttgtctccccaaaatgaccagcaacagcagccagaacatgagcagctgcagcaccggcggaagcgacgcggcggtcggcggcggcagctggctcggcttctcgctgtcgcctcacatggcggcgaccatggacggcgcggccgacggcgttccggtgcagcaccaccaccacgaaggcctcttctaccctcccgtcgtcagctcctcgcccgcgcccttctgctacgctctcggcggcggccaagatggcctcgccacggcggccgccaatggtggcggggggttctaccccgggctctcctctatgccgctcaagtccgacggctccctatgcatcctggaggccctccacaggagcgagcaagaacggcacggggtggtggtgtcgtcgtcgtcgcccaaactggaggatttcttgggcgcgagcgcgagcacggcgatggcgctgagcttggacagctccagcttctactacggctgcggccacggccacggccacgaccaaggcgggtacctgcagccaatgcagtgcgcggtgatgcccggctcgggcgggcacgacgtgtacggcggcgggcacgcgcagatggtggacgagcagtccgccgcggcaatggcggcgagctggttctccgcccgcggcaatggcggctacgacgtcgacggcgccggcgccggcgccatcgtgccgttgcagggccacccgcacccgctcgccctctccatgagctccgggacggggtcccagtccagcagcgtcaccatgcaagtcggcagcgcccacgccgacgccgtcaccgagtacatcgccatggacgggagcaagaagcgcggcgccggcaacggcgctagtgccgggcagaagcagcccaccatccaccgcaagaccatcgacacattcgggcagcgcacgtcgcagtaccgcggcgtcaccaggcataggtggacggggaggtatgaggcgcacctctgggacaacagctgcaggaaggaagggcagacccggaaaggccggcaaggtacgcgccactgccgccatggcagcctacgccattcaatctcagtcacttcacctaggagtagtagtagcagcagcagcaatttcctgagctagagcctgatgaactgcgctcccgtgtctcactcaacctgcgcccatgggattggcttaacttctgggacgtactccatccactacggcaactcccccctgcactgcagtttatctcggcgggtatgacgtggaggagaaggccgcgagggcatatgacctggcggcgctcaagtactgggggacgtccacgcacgtgaatttcccggtggaggactacagggaagagctggaggagatgaagaacatgaccagacaggagtacgtcgctcacctgagaaggaaaagcagcggcttctcgcgcggcgcttcgatctaccggggagtcaccaggcatcaccagcacgggcggtggcaggcgcgcatcggccgcgtctcgggcaacaaggacctctacctcggaacgttcagcacccaggaggaggcggcggaggcgtacgacgtggccgcgatcaagttccgcggcctcagcgcggtcaccaacttcgacatcacgcggtacgacgtggacaagatcatggagagcagcacgctgctcccgggcgagcaggtccggcgcaggaaggaaggcgccgacgccgcggtctcggaggccgccgccgcgctggtgcaggccggcaactgcatgacggacacctggaagatccaggcggcgctgccggctgccgcgcgggccgacgagcgcggcgccggccagcagcagcgtcaggacttgctgtcgagcgaggccttctcgctgctccacgacatcgtgtccgtcgacgccgctgctggtacagggacagggggcatgtcgaacgcgtcctcgtcgctggcccccagcgtgagcaactcccgggagcagagcccggaccggggcggcgccagcctcgccatgctcttcgccaagcccgccgcggcgcccaagctggcttgcccgctgccgctggggtcctgggtgtcgccgtccgcggtgtccgccaggccgcccggcgtgtcaatcgcgcacctgccggtgttcgccgcgtggaccgacgcatgaacaaacatccgtgtcattaccagggtacggttcttttggtttgcttagagcgtgctttttagctgggtaaggttagctgcgtagcggtggtctgatcagcatatgtgagaggaactagccatgcgtgtctgctttggcctcctgcgattcctcctccagttgcgttgcgaggaggtttctttttgtaataccggggctagatagcacagcatggatctcctcctgtagccaacactaatttggagtaggatggttagtgttgatctcctaacttcaattaggaaaaatatgccaagtaagataagtttaaacctgtgcgctttgcaattcatcaatgagctgggattcag

SEQ ID NO: 5458 - DNA, 2502 bp, Zea Mays
tccccctcggcttcgtcgctcggaggtgtgcacacacacaaaccgaagcccttgccctcccatccccctccaaacgcgcgcaaccatggagagtggcggcatcattgcgccgtgtactccccaatgattgatctctcatcgtctcttcttccaaccacctcctcgtcctcgcactcgcactcgcactcgcccttctctcttccctgcccggctgcccgcttgtctccccaaaatgaccagcaacagcagccagaacatgagcagctgcagcaccggcggaagcgacgcggcggtcggcggcggcagctggctcggcttctcgctgtcgcctcacatggcggcgaccatggacggcgcggccgacggcgttccggtgcagcaccaccaccacgaaggcctcttctaccctcccgtcgtcagctcctcgcccgcgcccttctgctacgctctcggcggcggccaagatggcctcgccacggcggccgccaatggtggcggggggttctaccccgggctctcctctatgccgctcaagtccgacggctccctatgcatcctggaggccctccacaggagcgagcaagaacggcacggggtggtggtgtcgtcgtcgtcgcccaaactggaggatttcttgggcgcgagcgcgagcacggcgatggcgctgagcttggacagctccagcttctactacggctgcggccacggccacggccacgaccaaggcgggtacctgcagccaatgcagtgcgcggtgatgcccggctcgggcgggcacgacgtgtacggcggcgggcacgcgcagatggtggacgagcagtccgccgcggcaatggcggcgagctggttctccgcccgcggcaatggcggctacgacgtcgacggcgccggcgccggcgccatcgtgccgttgcagggccacccgcacccgctcgccctctccatgagctccgggacggggtcccagtccagcagcgtcaccatgcaagtcggcagcgcccacgccgacgccgtcaccgagtacatcgccatggacgggagcaagaagcgcggcgccggcaacggcgctagtgccgggcagaagcagcccaccatccaccgcaagaccatcgacacattcgggcagcgcacgtcgcagtaccgcggcgtcaccagcaggcataggtggacggggaggtatgaggcgcacctctgggacaacagctgcaggaaggaagggcagacccggaaaggccggcaagtttatctcggcgggtatgacgtggaggagaaggccgcgagggcatatgacctggcggcgctcaagtactgggggacgtccacgcacgtgaatttcccggtggaggactacagggaagagctggaggagatgaagaacatgaccagacaggagtacgtcgctcacctgagaaggaaaagcagcggcttctcgcgcggcgcttcgatctaccggggagtcaccaggcatcaccagcacgggcggtggcaggcgcgcatcggccgcgtctcgggcaacaaggacctctacctcggaacgttcagcacccaggaggaggcggcggaggcgtacgacgtggccgcgatcaagttccgcggcctcagcgcggtcaccaacttcgacatcacgcggtacgacgtggacaagatcatggagagcagcacgctgctcccgggcgagcaggtccggcgcaggaaggaaggcgccgacgccgcggtctcggaggccgccgccgcgctggtgcaggccggcaactgcatgacggacacctggaagatccaggcggcgctgccggctgccgcgcgggccgacgagcgcggcgccggccagcagcagcgtcaggacttgctgtcgagcgaggccttctcgctgctccacgacatcgtgtccgtcgacgccgctgctggtacagggacagggggcatgtcgaacgcgtcctcgtcgctggcccccagcgtgagcaactcccgggagcagagcccggaccggggcggcgccagcctcgccatgctcttcgccaagcccgccgcggcgcccaagctggcttgcccgctgccgctggggtcctgggtgtcgccgtccgcggtgtccgccaggccgcccggcgtgtcaatcgcgcacctgccggtgttcgccgcgtggaccgacgcatgaacaaacatccgtgtcattaccagggtacggttcttttggtttgcttagagcgtgctttttagctgggtaaggttagctgcgtagcggtggtctgatcagcatatgtgagaggaactagccatgcgtgtctgctttggcctcctgcgattcctcctccagttgcgttgcgaggaggtttctttttgtaataccggggctagatagcacagcatggatctcctcctgtagccaacactaatttggagtaggatggttagtgttgatctcctaacttcaattaggaaaaatatgccaagtaagataagtttaaacctgtgcgctttgcaattcatcaatgagctgggattcag

SEQ ID NO: 5459 - DNA, 1959 bp, Zea Mays
aaaaaattctatagagccaatatatagatctatacacaatatgttatatacttgtatatatgtactggtttttagtatctagggtgaggccccgttaatatgggggccctggtcgggggcactgctcgacccccgccagggccggcactggctgctgcgcagatagaggccgtcggcactgatcgaaacctcaaaaaatccgtccagctccaagaaacgtcgcaagcaaggactggtgaaaaaacaacaagaagaaaaagatgacgcgtttgcatgtgctatgcatgatgcgtctgcacctcgggtacggatctcctcaccttggttggtccctgtctattcggagttccggagcgagtattccctcgcaggcagctgtcgtcctgtgcgtgcaacagcggcagctaccaacagcagcgcgcacagctagctgcttcctctttactctgacttgacatgggaacaaagccagccaccagcccacacacgcatatcattcactcatgtacacctttcttcctcctctcttcatctcctatcccaaatatctatctcaaccatctacatggctttatctcctccttattgttccagtcgtccgatccatttgctatcttagccttagctagctagggtttcttgagtcgccttggcctcagcagcttcctacttcgtctgtcttctgattattaacacagtagaaataaagaagctagctatagcgacgccatggatagcttcggggatcttggcggaggtgggagcagttcctccagagctgcttctgctcccttcttgcagctcccgctgccggcatcaacgtcatcagcacaacaacaggtgttatttccgctgccggacgggccgcagcagcagcaccatcaccacagctcgcgcatcccgttgcgacagttactgttactggccgacccgtcgtcggcagcgcagcatagcgctagccatcggacgaaggacatggcaacagtgcagggagagatgtcgtcgccggcggtggatggggatgccgacgccatcaaggccaggatcatgtcgcacccccagtactcggccctcctcgccgcctacttagactgccaaaaggaggcttactgcaacatgctggtgaagttccacgaggagatggcgcggccgatccaggaggcaacggagttcttcaacagcatggagaggcagctcggctcgacgatctccgacagtaactgtgaggtcgccgggtcgtccgaggatgagcaggacgcgagctggcctgaggagatcgatccctgcgccgaggacaaggagctcaagcaccagcttctgaggaagtacggcggctacctgggcggccttcgccaggagttctccaagaggaagaagaaagggaagctccccaaggaggcgaggcagaagttgctgcactggtgggagctgcactacaagtggccctacccttctgagacggagaagatggcgctcgcagagacgaccgggctggacccgaagcagatcaacaactggttcatcaaccagcggaagcggcactggaagccggcgtcggaggacatgccgttcgcggtgatggagggcgggttccacgtcgcgcagggcaccgcagcgctgtatatggacaggccggcggtgccgccgttcatggcggacggcgggatgtaccggctggggtcgtgagggccggcatgcacggtaaaagctaagcacgtgtgccagcacgacggtgattgttgaggtgtagtagtgattgaactgattgctccttctcatccgtaaatatacagtttcgggttgacacgtttttctcgatctgcaaggtaggcatcatgttgttctccttattttctttttttctccctgaagacgaccggtaataaaatatattagcactatgatgtactgtatatagggaaaatttagggagaactgtcaaaggagataagatttagg

SEQ ID NO: 5460 - DNA, 1045 bp, Zea Mays
tccggagcgagtattccctcgcaggcagctgtcgtcctgtgcgtgcaacagcggcagctaccaacagcagcgcgcacagctagctgcttcctctttactctgacttgacatgggaacaaagccagccaccagcccacacacgcatatcattcactcatgtacacctttcttcctcctctcttcatctcctatcccaaatatctatctcaaccatctacatggctttatctcctccttattgttccagtcgtccgatccatttgctatcttagccttagctagctagggtttcttgagtcgccttggcctcagcagcttcctacttcgtctgtcttctgattattaacacagtagaaataaagaagctagctatagcgacgccatggatagcttcggggatcttggcggaggtgggagcagttcctccagagctgcttctgctcccttcttgcagctcccgctgccggcatcaacgtcatcagcacaacaacaggtgttatttccgctgccggacgggccgcagcagcagcaccatcaccacagctcgcgcatcccgttgcgacagttactgttactggccgacccgtcgtcggcagcgcagcatagcgctagccatcggacgaaggacatggcaacagtgcagggagagatgtcgtcgccggcggtggatggggatgccgacgccatcaaggccaggatcatgtcgcacccccagtactcggccctcctcgccgcctacttagactgccaaaaggtcggcgcgccgccggatgtgtcggataggctctcggccatggcggcggcgaatctggacgcgcagccggggccaataagccggcggcgcggcccgacgacgacgcgagctgatgacccggagctcgaccagttcatggaggcttactgcaacatgctggtgaagttccacgaggagatggcgcggccgatccaggaggcaacggagttcttcaacagcatggagaggcagctcggctcgacgatctccgattaacctgcaggctgcagtggttggaggcatggatgaaac

SEQ ID NO: 5461 - DNA, 890 bp, Zea Mays
ctccagccgaagaactggccgtgataacagcgccctctctgtctctctcctagtgttgtctccatcgtcctcctccccctttgcctccctcccaagttccaacgccgtgttcgccgccctctccctctaccggcctccacaccgtctccatcggccggcccgccccattgcccacacgacgacagttctcagctcgtctaacgcttagccgctgaagccattggagaggcgatatgggaagcccccggtgacgatgcggctaccgcagcacacggagcgtgcgggttcgccgaaaacctgcagcatcttccaagcgtggctgccccgtcaccttcgctgtcccggtcctgtctcgcagctgctggtcctgtgcgctgtccctggatgcccacgccgtcgatgccacggacacctcatagaacgcgtagcttccagactttcctcgagcatactttgttaccagcctggcaaattgaaaagccaacatgaatcaaacgtcggcgcgcggtggatctgaagcctgtgtgggggcgcggtcggcgaggagctggggcgcgcgtccccgcccagctcccccgtcgtggcactggaccgccacgcctgcgtccaccaagagacgtccgcaccaccctcgtccacgagcagctccaacgacctcatcgccgcattgcgcctgctcctgcgctgcaggctccggttaccgtcggtgcccacaccgaggaaggcgtaatccacgccaagcaacccagttactgagctactgagctgcaacctccgatatcgcgcacgtgtccaggagcattgaggaggcttggtacgattgcttggcgatgagcgagtcggatgtcgaagacgatttccaatgtgcaagatgggcttgttcggttagc

SEQ ID NO: 5462 - DNA, 929 bp, Zea Mays
ctccagccgaagaactggccgtgataacagcgccctctctgtctctctcctagtgttgtctccatcgtcctcctccccctttgcctccctcccaagttccaacgccgtgttcgccgccctctccctctaccggcctccacaccgtctccatcggccggcccgccccattgcccacacgacgacagttctcagctcgtctaacgcttagccgctgaagccattggagaggcgatatgggaagcccccggtgacgatgcggctaccgcagcacacggagcgtgcgggttcgccgaaaacctgcagcatcttccaagcgtggctgccccgtcaccttcgctgtcccggtcctgtctcgcagctgctggtcctgtgcgctgtccctggatgcccacgccgtcgatgccacggacacctcatagaacgcgtagcttccagactttcctcgagcatactttgttaccagcctggcaaattgaaaagccaacatgaatcaaacgtcggcgcgcggtggatctgaagcctgtgtgggggcgcggtcggcgaggagctggggcgcgcgtccccgcccagctcccccgtcgtggcactggaccgccacgcctgcgtccaccaagagacgtccgcaccaccctcgtccacgagcagctccaacgacctcatcgccgcattgcgcctgctcctgcgctgcaggctccggttaccgtcggtgcccacaccgaggaaggcgtaatccacgccaagcaacccagttactgagctactgagctgcaacctccgatatcgcgcacgtgtccaggagcattgaggaggcttggtacgattgcttggcgatgagcgagtcggatgtcgaagacgatttccaatgtgcaagatgatcctttttcacatggcttcgaaaacgaagctgcattgagcatgagagatgatgg

SEQ ID NO: 5463 - DNA, 2001 bp, Zea Mays
ctccagccgaagaactggccgtgataacagcgccctctctgtctctctcctagtgttgtctccatcgtcctcctccccctttgcctccctcccaagttccaacgccgtgttcgccgccctctccctctaccggcctccacaccgtctccatcggccggcccgccccattgcccacacgacgacagttctcagctcgtctaacgcttagccgctgaagccattggagaggcgatatgggaagcccccggtgacgatgcggctaccgcagcacacggagcgtgcgggttcgccgaaaacctgcagcatcttccaagcgtggctgccccgtcaccttcgctgtcccggtcctgtctcgcagctgctggtcctgtgcgctgtccctggatgcccacgccgtcgatgccacggacacctcatagaatttgaagaacatgctcccgtctgcagcactgttcctaaacggtataaaagcacctgtactggtcttcaccaagcaagcacctcagacaccaacatctacacacaatcacagtcacaatggaggccggagggttagtcagggtcagggaggccggctgggccaggttcgacttgctaccccatggctaggagccggaggtcgtagcgcagctgctctgcacccagcatgagttgccttggtccgatcaaagcttcttccgtacagtgacaacaacatgccacatattcttttggcaatttgtattgcttttaaaaaaaatctacttctttcactaaaaacttccttatccatgtgatatccgatgtattctacataactccaaaattgctaccgggcaatactcacccttacctattcttttaactgatatgtccaccttttcaggttattttggctattcattttaatgattgtatgtatgtgcctatgtatgataaaaaaaataatgtcgtttttttaccaatgtattgtgccctgtgctctatatctttaatgactttttatgggatttccgtagatagctccctccgttatttatttgtttatagttcaaaaataaaataacggacaacaaatattcgagaacgggattagtatataatagctgattatgactatcttttttaaaactatttgttccaaacttgatggacatctcgaggaccaaagtgacacattaaagagttatagcttcatacaaaacaggttaagttgcactatttcctctacatttttagatctaccacttatattagtgttttttcttcattttaagaaattgcatcgcaccttccatttgtttatgtaaaaaactatcactattgtgttctacataggatcttatttacatacatattttagtggaccataaaaaaaacagcgcgcgcagggcgcgcgttagacaccagtacatacatattaaagcccgacgcaaaacgtgcatctccttaagccatgtcaccactaaaatcttgatcgtcggatctgctttggacggtctcatcaagaagaacgcgtagcttccagactttcctcgagcatactttgttaccagcctggcaaattgaaaagccaacatgaatcaaacgtcggcgcgcggtggatctgaagcctgtgtgggggcgcggtcggcgaggagctggggcgcgcgtccccgcccagctcccccgtcgtggcactggaccgccacgcctgcgtccaccaagagacgtccgcaccaccctcgtccacgagcagctccaacgacctcatcgccgcattgcgcctgctcctgcgctgcaggctccggttaccgtcggtgcccacaccgaggaaggcgtaatccacgccaagcaacccagttactgagctactgagctgcaacctccgatatcgcgcacgtgtccaggagcattgaggaggcttggtacgattgcttggcgatgagcgagtcggatgtcgaagacgatttccaatgtgcaagatgatcctttttcacatggcttcgaaaacgaagctgcattgagcatgagagatgatgg

SEQ ID NO: 5464 - DNA, 1973 bp, Zea Mays
ctccagccgaagaactggccgtgataacagcgccctctctgtctctctcctagtgttgtctccatcgtcctcctccccctttgcctccctcccaagttccaacgccgtgttcgccgccctctccctctaccggcctccacaccgtctccatcggccggcccgccccattgcccacacgacgacagttctcagctcgtctaacgcttagccgctgaagccattggagaggcgatatgggaagcccccggtgacgatgcggctaccgcagcacacggagcgtgcgggttcgccgaaaacctgcagcatcttccaagcgtggctgccccgtcaccttcgctgtcccggtcctgtctcgcagctgctggtcctgtgcgctgtccctggatgcccacgccgtcgatgccacggacacctcatagcactgttcctaaacggtataaaagcacctgtactggtcttcaccaagcaagcacctcagacaccaacatctacacacaatcacagtcacaatggaggccggagggttagtcagggtcagggaggccggctgggccaggttcgacttgctaccccatggctaggagccggaggtcgtagcgcagctgctctgcacccagcatgagttgccttggtccgatcaaagcttcttccgtacagtgacaacaacatgccacatattcttttggcaatttgtattgcttttaaaaaaaatctacttctttcactaaaaacttccttatccatgtgatatccgatgtattctacataactccaaaattgctaccgggcaatactcacccttacctattcttttaactgatatgtccaccttttcaggttattttggctattcattttaatgattgtatgtatgtgcctatgtatgataaaaaaaataatgtcgtttttttaccaatgtattgtgccctgtgctctatatctttaatgactttttatgggatttccgtagatagctccctccgttatttatttgtttatagttcaaaaataaaataacggacaacaaatattcgagaacgggattagtatataatagctgattatgactatcttttttaaaactatttgttccaaacttgatggacatctcgaggaccaaagtgacacattaaagagttatagcttcatacaaaacaggttaagttgcactatttcctctacatttttagatctaccacttatattagtgttttttcttcattttaagaaattgcatcgcaccttccatttgtttatgtaaaaaactatcactattgtgttctacataggatcttatttacatacatattttagtggaccataaaaaaaacagcgcgcgcagggcgcgcgttagacaccagtacatacatattaaagcccgacgcaaaacgtgcatctccttaagccatgtcaccactaaaatcttgatcgtcggatctgctttggacggtctcatcaagaagaacgcgtagcttccagactttcctcgagcatactttgttaccagcctggcaaattgaaaagccaacatgaatcaaacgtcggcgcgcggtggatctgaagcctgtgtgggggcgcggtcggcgaggagctggggcgcgcgtccccgcccagctcccccgtcgtggcactggaccgccacgcctgcgtccaccaagagacgtccgcaccaccctcgtccacgagcagctccaacgacctcatcgccgcattgcgcctgctcctgcgctgcaggctccggttaccgtcggtgcccacaccgaggaaggcgtaatccacgccaagcaacccagttactgagctactgagctgcaacctccgatatcgcgcacgtgtccaggagcattgaggaggcttggtacgattgcttggcgatgagcgagtcggatgtcgaagacgatttccaatgtgcaagatgatcctttttcacatggcttcgaaaacgaagctgcattgagcatgagagatgatgg

SEQ ID NO: 5465 - DNA, 2080 bp, Zea Mays
ctccagccgaagaactggccgtgataacagcgccctctctgtctctctcctagtgttgtctccatcgtcctcctccccctttgcctccctcccaagttccaacgccgtgttcgccgccctctccctctaccggcctccacaccgtctccatcggccggcccgccccattgcccacacgacgacagttctcagctcgtctaacgcttagccgctgaagccattggagaggcgatatgggaagcccccggtgacgatgcggctaccgcagcacacggagcgtgcgggttcgccgaaaacctgcagcatcttccaagcgtggctgccccgtcaccttcgctgtcccggtcctgtctcgcagctgctggtcctgtgcgctgtccctggatgcccacgccgtcgatgccacggacacctcataggccataaactgcttcatcccaatcatggaccgtcgtttctttaaacatattgatggccaccttttgtttttttaagaagaatttgaagaacatgctcccgtctgcagcactgttcctaaacggtataaaagcacctgtactggtcttcaccaagcaagcacctcagacaccaacatctacacacaatcacagtcacaatggaggccggagggttagtcagggtcagggaggccggctgggccaggttcgacttgctaccccatggctaggagccggaggtcgtagcgcagctgctctgcacccagcatgagttgccttggtccgatcaaagcttcttccgtacagtgacaacaacatgccacatattcttttggcaatttgtattgcttttaaaaaaaatctacttctttcactaaaaacttccttatccatgtgatatccgatgtattctacataactccaaaattgctaccgggcaatactcacccttacctattcttttaactgatatgtccaccttttcaggttattttggctattcattttaatgattgtatgtatgtgcctatgtatgataaaaaaaataatgtcgtttttttaccaatgtattgtgccctgtgctctatatctttaatgactttttatgggatttccgtagatagctccctccgttatttatttgtttatagttcaaaaataaaataacggacaacaaatattcgagaacgggattagtatataatagctgattatgactatcttttttaaaactatttgttccaaacttgatggacatctcgaggaccaaagtgacacattaaagagttatagcttcatacaaaacaggttaagttgcactatttcctctacatttttagatctaccacttatattagtgttttttcttcattttaagaaattgcatcgcaccttccatttgtttatgtaaaaaactatcactattgtgttctacataggatcttatttacatacatattttagtggaccataaaaaaaacagcgcgcgcagggcgcgcgttagacaccagtacatacatattaaagcccgacgcaaaacgtgcatctccttaagccatgtcaccactaaaatcttgatcgtcggatctgctttggacggtctcatcaagaagaacgcgtagcttccagactttcctcgagcatactttgttaccagcctggcaaattgaaaagccaacatgaatcaaacgtcggcgcgcggtggatctgaagcctgtgtgggggcgcggtcggcgaggagctggggcgcgcgtccccgcccagctcccccgtcgtggcactggaccgccacgcctgcgtccaccaagagacgtccgcaccaccctcgtccacgagcagctccaacgacctcatcgccgcattgcgcctgctcctgcgctgcaggctccggttaccgtcggtgcccacaccgaggaaggcgtaatccacgccaagcaacccagttactgagctactgagctgcaacctccgatatcgcgcacgtgtccaggagcattgaggaggcttggtacgattgcttggcgatgagcgagtcggatgtcgaagacgatttccaatgtgcaagatgatcctttttcacatggcttcgaaaacgaagctgcattgagcatgagagatgatgg

SEQ ID NO: 5466 - DNA, 2600 bp, Zea Mays
ctccagccgaagaactggccgtgataacagcgccctctctgtctctctcctagtgttgtctccatcgtcctcctccccctttgcctccctcccaagttccaacgccgtgttcgccgccctctccctctaccggcctccacaccgtctccatcggccggcccgccccattgcccacacgacgacagttctcagctcgtctaacgcttagccgctgaagccattggagaggcgatatgggaagcccccggtgacgatgcggctaccgcagcacacggagcgtgcgggttcgccgaaaacctgcagcatcttccaagcgtggctgccccgtcaccttcgctgtcccggtcctgtctcgcagctgctggtcctgtgcgctgtccctggatgcccacgccgtcgatgccacggacacctcataggtaatcatgatccctaatcctacttgccttttgtgcgggccactggttcataagtatttagctgattcgtacactatggagggtctgagtcctgtgcggctcttgattactagatggatgcagatcacttgctgcttgtgaggataccagtgtccagcaacacatccccgatagatttagacccgttggacattgtggaaacctacatatcgtggcctccaattttgttattttttgatgaacgcgatagccctcagttctgatgatgcacatggtcttaggttcacgaaatgtgccatgatctgaactttaaatctggtttgattttctgaaggcctttggtagtatttgctgcaaccagtgtcctgtttgaccttttacagagccgcgttgtacacaacattttttgcatttgttcagttcttcttcttcccggtatgctgatttagaaccacatggaataaggacgtcgacacattctacactgaataatgaacctatcatttgtttgtatcagcaggccataaactgcttcatcccaatcatggaccgtcgtttctttaaacatattgatggccaccttttgtttttttaagaagaatttgaagaacatgctcccgtctgcagcactgttcctaaacggtataaaagcacctgtactggtcttcaccaagcaagcacctcagacaccaacatctacacacaatcacagtcacaatggaggccggagggttagtcagggtcagggaggccggctgggccaggttcgacttgctaccccatggctaggagccggaggtcgtagcgcagctgctctgcacccagcatgagttgccttggtccgatcaaagcttcttccgtacagtgacaacaacatgccacatattcttttggcaatttgtattgcttttaaaaaaaatctacttctttcactaaaaacttccttatccatgtgatatccgatgtattctacataactccaaaattgctaccgggcaatactcacccttacctattcttttaactgatatgtccaccttttcaggttattttggctattcattttaatgattgtatgtatgtgcctatgtatgataaaaaaaataatgtcgtttttttaccaatgtattgtgccctgtgctctatatctttaatgactttttatgggatttccgtagatagctccctccgttatttatttgtttatagttcaaaaataaaataacggacaacaaatattcgagaacgggattagtatataatagctgattatgactatcttttttaaaactatttgttccaaacttgatggacatctcgaggaccaaagtgacacattaaagagttatagcttcatacaaaacaggttaagttgcactatttcctctacatttttagatctaccacttatattagtgttttttcttcattttaagaaattgcatcgcaccttccatttgtttatgtaaaaaactatcactattgtgttctacataggatcttatttacatacatattttagtggaccataaaaaaaacagcgcgcgcagggcgcgcgttagacaccagtacatacatattaaagcccgacgcaaaacgtgcatctccttaagccatgtcaccactaaaatcttgatcgtcggatctgctttggacggtctcatcaagaagaacgcgtagcttccagactttcctcgagcatactttgttaccagcctggcaaattgaaaagccaacatgaatcaaacgtcggcgcgcggtggatctgaagcctgtgtgggggcgcggtcggcgaggagctggggcgcgcgtccccgcccagctcccccgtcgtggcactggaccgccacgcctgcgtccaccaagagacgtccgcaccaccctcgtccacgagcagctccaacgacctcatcgccgcattgcgcctgctcctgcgctgcaggctccggttaccgtcggtgcccacaccgaggaaggcgtaatccacgccaagcaacccagttactgagctactgagctgcaacctccgatatcgcgcacgtgtccaggagcattgaggaggcttggtacgattgcttggcgatgagcgagtcggatgtcgaagacgatttccaatgtgcaagatgatcctttttcacatggcttcgaaaacgaagctgcattgagcatgagagatgatgg

SEQ ID NO: 5467 - DNA, 3174 bp, Zea Mays
agactccagaccatgagccatgatgatgcgatcggtcaaagacttgcgcgaggcgcgagccatttactagtgatgtacaagaatccgatcgagccaacgattcagaccggtctgtatcggcgggtagcggcaactggcaggtccagtcaagccaaccaccggcgagtggcagtagcggcggcggcggtacatgtaacacatgattggaagtgacactgtggtctgtggaagcctgcgtggctgcgtatggcatgccacagtatttcccatcatctagagcgtcaaatccagcgattccaactccgcaggccgggtcaccgccaagcagtgcccaagaggagccggaacagtgacgcgcacacgcacgcccagtagtctttccatttcacagccaactggtcgccgtggcagaggagattcgcaaaagatcggccggtcggatcaccgccagtagtctgagcttgccggccacgattcgccgccggtctctatccgcccgggttcctcttcacagtcacaggcgtccacatcgtgacatcgccagcgtcagaactggaacaacaaacagttcgtggaaacttccaagctggaccccgcccagccaaagtccaaggcgagaggatgactggacaggcggcacgcgcgcggacgcgatgacggacaaggactaggcccggcctatctactccagtctccagatcgcaatcgcaaatgaaaaataagtgcttaccctggactggtcaccggttgcggtgagctaactggctccggattataaaaccggcagcgccagccgccagagcgcgattgcactgcaagcgcagatctcaattaggagtacacaacaagtggagttcgacggatgtgaagtgaattgcggcctttcttggttgccgtcttgctgctatggttgacttgcggtccctactcgtcgccggcgtcgtcctcctcgccggactggccgtcctcgtccacggcgccggggacgagcagttcgtctactcgggcttcaccggcgcgccgctcgcgctggacggcacggccaccatcacgccgtcggggctgctggagctcaccaacggcacggcgcagctcaagggccacgccgtgcacccggcgccgatgcggttccagcggacacccggcgggcccgtgcgctccttctcggcgtccttcgtgttcggcatcatcccgccctactccgacctcagcggccacggcatcgtcttcttcgtcggcagggacagcttcgccaccgcgctgcccagccagtacctgggcttcctcaactccagcaacaacggcaacttcaccaaccacgtcttcggcgtcgagctcgacaccatccagagcaccgagttcaaggaccccgataacaaccacgtcggcatcgacgtcaacagcctcacgtccgccaacgccagcaccgccggctactacgacgacggcaccggcgcgttccacgacctgaccctgatcagcgccaagcccatgcaggtctggttggactacgacggcgagacggcgcaggtcaacgtgttcctggctcccctcaggacacccaagcctaccaggcctctggtgtcggccgcgcagaacctgtcgggagtggtcgtggacccggcgtacgtgggcttctcgtccgccactggcacggtgaggtcggagcactacgtgctcggctggagcttcgccatggacggccctgctccggacatcgacatcgccagcctgcccaagctaccacggttcggccccaatccgcggtccaaggtcttggaggtcgtgctgccgatcgccaccgcggcgtccgtcctcggcgtggtggcggtcgtggttgcgctcgtccgacggcggctcaagtacgccgagctgcgggaggactgggaggtcgagttcgggccgcaccgcttcacgtacaaggacctgttccgcgcgacggagggattcaagaccaagatgcttctcggcgccgggggattcgggagagtgtacaggggagtgctcccgaaatccaagcgggaggttgccgtcaagaaggtgtctcacgaatcgaggcagggcataaaggagttcgtcgccgaggtggtcagcatcggccgtctccgacaccggaacatcgtccagttgctcggctactgccggcggaaaggcgagcttctcctggtgtacgactacatgcccaacggcagccttgacaagtacctctacggcaaggacgacaaggccacggcgacgctggattgggcgcagaggttccggatcatcaaaggcgtggcgtcagggttgctgtacatccacgaggactgggagcaggtggtcatccaccgagacatcaaggccagcaacgtcttgctcgacagcgacatgaacggacggctgggggactttggtctcgcgaggctgtacgaccatggagccgacccgcaaacaacccatgtcgttggcaccatggggtacctcgcgccagagctggcgcggtcagggaaagcgtcccctctcaccgacgtgttcgccttcggggcattcatcctcgaagtcgtctgtggccggagacccgtggagcagagcatgaccgacagccggctcatgctggtggactgggtgctcgagcactggcagaacggaaccctcgccgacgtgatcgacgcgaagctcaaggggagttgcgacgaggaggaggccatgctggcgttgaagctagggctgctgtgctcgcacccgttgcccgctgcgaggcccagcatgcggcaggtcatgcagtatctcgacggcgacatgcccttccctgagctcacgccgtcgcacctcagctttagcatgctggccctcatgcggagcgaagggttcgattcctttatcctgtcggcgtcgacgacgcagccgttgtcgtccacggcgatgagtatagggactatgactggcctctctgatgggagatgacgagcgcgctgtcttgctggagcatgtacattggatggcgccagtacgtaccagtagtatgctatgctgtagagttgccaattttacaatttcttgaagctggaggagcaactctagtactctaccaataacatgtaacatcccgccgattcccggaccggcgctattttctggtgacaaccatctagaaccatagaccatcctaacagacataaatattttatacgcatt

SEQ ID NO: 5468 - DNA, 3226 bp, Zea Mays
gtttctggtgcgaacatcactcacggtggaggcaggatactcgacttgcttctgccaaatatttgtctgccatgaattacatatcggtcaaagacttgcgcgaggcgcgagccatttactagtgatgtacaagaatccgatcgagccaacgattcagaccggtctgtatcggcgggtagcggcaactggcaggtccagtcaagccaaccaccggcgagtggcagtagcggcggcggcggtacatgtaacacatgattggaagtgacactgtggtctgtggaagcctgcgtggctgcgtatggcatgccacagtatttcccatcatctagagcgtcaaatccagcgattccaactccgcaggccgggtcaccgccaagcagtgcccaagaggagccggaacagtgacgcgcacacgcacgcccagtagtctttccatttcacagccaactggtcgccgtggcagaggagattcgcaaaagatcggccggtcggatcaccgccagtagtctgagcttgccggccacgattcgccgccggtctctatccgcccgggttcctcttcacagtcacaggcgtccacatcgtgacatcgccagcgtcagaactggaacaacaaacagttcgtggaaacttccaagctggaccccgcccagccaaagtccaaggcgagaggatgactggacaggcggcacgcgcgcggacgcgatgacggacaaggactaggcccggcctatctactccagtctccagatcgcaatcgcaaatgaaaaataagtgcttaccctggactggtcaccggttgcggtgagctaactggctccggattataaaaccggcagcgccagccgccagagcgcgattgcactgcaagcgcagatctcaattaggagtacacaacaagtggagttcgacggatgtgaagtgaattgcggcctttcttggttgccgtcttgctgctatggttgacttgcggtccctactcgtcgccggcgtcgtcctcctcgccggactggccgtcctcgtccacggcgccggggacgagcagttcgtctactcgggcttcaccggcgcgccgctcgcgctggacggcacggccaccatcacgccgtcggggctgctggagctcaccaacggcacggcgcagctcaagggccacgccgtgcacccggcgccgatgcggttccagcggacacccggcgggcccgtgcgctccttctcggcgtccttcgtgttcggcatcatcccgccctactccgacctcagcggccacggcatcgtcttcttcgtcggcagggacagcttcgccaccgcgctgcccagccagtacctgggcttcctcaactccagcaacaacggcaacttcaccaaccacgtcttcggcgtcgagctcgacaccatccagagcaccgagttcaaggaccccgataacaaccacgtcggcatcgacgtcaacagcctcacgtccgccaacgccagcaccgccggctactacgacgacggcaccggcgcgttccacgacctgaccctgatcagcgccaagcccatgcaggtctggttggactacgacggcgagacggcgcaggtcaacgtgttcctggctcccctcaggacacccaagcctaccaggcctctggtgtcggccgcgcagaacctgtcgggagtggtcgtggacccggcgtacgtgggcttctcgtccgccactggcacggtgaggtcggagcactacgtgctcggctggagcttcgccatggacggccctgctccggacatcgacatcgccagcctgcccaagctaccacggttcggccccaatccgcggtccaaggtcttggaggtcgtgctgccgatcgccaccgcggcgtccgtcctcggcgtggtggcggtcgtggttgcgctcgtccgacggcggctcaagtacgccgagctgcgggaggactgggaggtcgagttcgggccgcaccgcttcacgtacaaggacctgttccgcgcgacggagggattcaagaccaagatgcttctcggcgccgggggattcgggagagtgtacaggggagtgctcccgaaatccaagcgggaggttgccgtcaagaaggtgtctcacgaatcgaggcagggcataaaggagttcgtcgccgaggtggtcagcatcggccgtctccgacaccggaacatcgtccagttgctcggctactgccggcggaaaggcgagcttctcctggtgtacgactacatgcccaacggcagccttgacaagtacctctacggcaaggacgacaaggccacggcgacgctggattgggcgcagaggttccggatcatcaaaggcgtggcgtcagggttgctgtacatccacgaggactgggagcaggtggtcatccaccgagacatcaaggccagcaacgtcttgctcgacagcgacatgaacggacggctgggggactttggtctcgcgaggctgtacgaccatggagccgacccgcaaacaacccatgtcgttggcaccatggggtacctcgcgccagagctggcgcggtcagggaaagcgtcccctctcaccgacgtgttcgccttcggggcattcatcctcgaagtcgtctgtggccggagacccgtggagcagagcatgaccgacagccggctcatgctggtggactgggtgctcgagcactggcagaacggaaccctcgccgacgtgatcgacgcgaagctcaaggggagttgcgacgaggaggaggccatgctggcgttgaagctagggctgctgtgctcgcacccgttgcccgctgcgaggcccagcatgcggcaggtcatgcagtatctcgacggcgacatgcccttccctgagctcacgccgtcgcacctcagctttagcatgctggccctcatgcggagcgaagggttcgattcctttatcctgtcggcgtcgacgacgcagccgttgtcgtccacggcgatgagtatagggactatgactggcctctctgatgggagatgacgagcgcgctgtcttgctggagcatgtacattggatggcgccagtacgtaccagtagtatgctatgctgtagagttgccaattttacaatttcttgaagctggaggagcaactctagtactctaccaataacatgtaacatcccgccgattcccggaccggcgctattttctggtgacaaccatctagaaccatagaccatcctaacagacataaatattttatacgcatt

SEQ ID NO: 5469 - DNA, 833 bp, Zea Mays
ggcccaccaaaccagcggattaaagaaggttgcgaaggcactagccgaagccacgctccccggaacgaacgacgcagcccaacccgttcccaccaaaccagcggcaccacccatggcttcggcggcggcgagatccggtctccggtcgctggcggtgcgcgccggcccgttgaggcgccgcatgtcctcctccgtccacgacgacgcctatgagacggccaagtgggagaagatcacctacgccgggatcgtgacctgcaccctcctggcggcgtacaacctgtccaagggccaccccccacttcgatgagccgccggcgtacccctatctgcacatccgcaacaaggagttcccatggggccctgatggcttgtttgagacgaaggaccaccactgagccctgattagcacacattcaggagctggtgcatgcttaaaagagttatatggttgtttcagtgattttccttttcccttgagacctatttgctgcaacaagaaataagaatgaccaaactcttgtattgacagtgaggttttaactgtgttagctgttaccgtcttgtcttcttttctttgccgtccacgtcaaatatggtcacctgtaagttgatcttgcccggtgtcaggaaacggcatcacaattatcaaaagctgttatcatattctgatggcttaagattgcaccctgtgctcgtgatgatttcccgtatcaactatcattctatcaaggcagaacgtaatggtttgttttgtttattttccagtaaacatgtaggttggacaaggtaatattttaatgttctctattgctagtgtttgtgaatcccag

SEQ ID NO: 5470 - DNA, 808 bp, Zea Mays
aaaaaaaataaaagcacatatgtatatatgaattataaatgtaaaaacaaatataattcatgaacgagtctgcaatatacattatgaaaccagacaagtacgcacaattacatatatcatcaataatctaaatatttaaatatagatacagtgatgataataattgtaaatatattcagccaaaaaaaataatccttgtcgaaatgggccaaaacagccagcccatttgcggcctataggaggtgggcaagcagttagggtttcctaactcgtcttgtcgcggccctctctctcttccaccagcagcagggcgccgccaccgccgccgcctcgcgggtgcgcaagccgctgccacgcgggcgcacaggcaggccacagcgcggcctcgcgcggtgctcgagcctgagcagccgagcgcttcggccccggcgacgggccagacccggccatggcgcggtctcattgcggctggcgcagcccccagccccggctcgccagcgggtggcccggccaggagcggcgggcgcggcctccttccccggcctcggccaggcgcgcgcgggccctagccccgactcgccggtggtcggcccgaccaggagcggtcacggtctcgcccctggcggctccggcggtgcaggcagccaggcgggtgcgtggcacccagcctcggcaccggaggcgacgcggcccccagcctcggcggcgggcgcggtgaggcagccccgacggcggtccgggctcggctgcacggggcacagccccctggcagcgcaggcgcgcgggcaccggcctaggccccgatctg

SEQ ID NO: 5471 - DNA, 1453 bp, Zea Mays
tgacagaactgttgtctttattacagagttacttgcttatatacaagtggatacagagtctcccaaggggtgtgtcccttgggggaaaagtgtcaggggagggggttgatcacatgttatacatattttgtaacatgaagaatccaatgcgctatagcgtggcagctcagctggtgccctcatccactaaaccaacctttctttaaatactggagctaatccagggtgtccgagggccggatccgtcatgtgacagccacagagggccggattcgtcacgagacagagacgcacgggcgcggactcggctgactcagcgggagaacgccaccagcgggccactgcccactgctggagtggacgtgcagtgaacagcgcgcactgcatggcgatgactcatcgctgatctcgaaaacaaatgtatttttatctttgtactttgtactagtaccgagagaaaaagaaaaaggccgacgctgtgctgtccagcagccgcagctccgtccacggcgggcctgcacgtatggtatccgccacctcaattataaaaacacgccgcgttaattccattccccggctgccgttaactaatccggtccggtcagccagctcggcgtcgcccacagagaccagagcacccgcctgtggcccccacgaggcagcgaaggatgagaggcgtgcgctgttacgcgagagaggacggagcggagtgcgagtgtccatgtcctggactcctggtgtccgtccgtactccgtccaggctgggcacagctaatggggccgggcgggacgggacccacgtggctcgtactagtactgcagtgcaagttgtgcgccatcgcccaccggctcggattccagccacagccagagcaggtccctcccaatcgcggcgattagacggatcgcgccgggctggctggcgcgcgcacgtgccctgccgctgcgctggagcaggcgagcggcagtggtgtgccaggcaggcagagcagaggcaggccagggccagccgagccgagccgtgcaggcgcagcaaagcgctccagctgtgccgggcgcctggcctggccgcatctatctgcctgcgagtcgctgcgtctgcgtgcgaacggagaagcttctttcttttcaagacacctgcgcacggatggagatcgggggtgctgttttattgaggttggttgggtggttaccggaggaaggaggcacaaggcccgctgggccagccatgtccgttgttcgtagcagcgaaatgcggcattttattttttgaaggagcgcggtttgcttgccactgccagtgccagcgcatggcgcgaacatctagcgcgattggaatgcaaatggtcctccacaaggcacgccgcaccccccatggcgattggcgaagcaagtttgaaggggtgaccgcgggcaccggctaatctgggggaaaataggctacaaggggtca

SEQ ID NO: 5472 - DNA, 608 bp, Zea Mays
aaaaaactgtttacctccattcagatgttcaaagttgtgcatacaggagcaccgatgcaacctttcgcctttgcctagcgttgcgacactgcagaaaaggactagtttgggagtcacaaaaccggagaagattatagtggcaaaaatctcctttttatttaattttgaataagatggtgattttctccactttaatctctccgatattttagcttccaaactagtctctaatgttgcatcctcttgactcttgaggcaatcgaatctaacttctaggactattttgggagtcataaccgaagaagattgtagtggcaaaaatcatctttttattcaattttgaataagacgatgattttctccactttaattccctccgatattttaacttccaaactagcctccaatgttgcatcctcttgactcttgaggcaatcgaatcccgttaacccagtttttaagaaagcaacgaaacctctcttcgccaattggcgcgaagtttatcggcttgtaccaggagccaagtgaggaatttatgctttttccctccgcgtgcgcctttcgtattattttccagggattgagagaaaaatgaactaatatcccac

SEQ ID NO: 5473 - DNA, 1592 bp, Zea Mays
cgttaacccagtttttaagaaagcaacgaaacctctcttcgccaattggcgcgaagtttatcggcttgtaccaggagccaagtgaggaatttatgctttttccctccgcgtgcgcctttcgtattgtgagtataagagtcagtttcggtgtttggtttgagaaattaggtagtccattattttcttactcatcactttcttatttggtttgtgaaattaattgagttgattcatcatcacttaatttctcatagactaataattaataataatacgaggaataagttcattccaccaaatttgcgtaataaacttatgatgtaccacttaaatctcctccagattttccagggattgagagaaaaatgaactaatatcccactaatctatggaaatcccagaggattcaagtatcgacactagccctaagtgcagaaagctttcttcagacttaggattgtaggttctatctgcatttcatttctaagtgatgtcatcatcccaagcaagctgtaatttttcttatacaggcatagttctaaagcaaaacttccagagctagttcggaaactcaaatcttctctagaactaatggagattgagaggatttgactgcccaatttagctctcatggtagctggtcagagctagcaaacacgctaactctagaactgtatgaagttcaacccataactccaaaggtttatgaaagttttgagagctgttgtacgagtcattggagtatctcttttgttgttctaaattctttgaaaaacaacttgaatatagagtttaaaaggattgtatttacctgtcactgtcggtgtttataaaaaaccataactccacctaaatttttgaagaagcagcgctgctctgaagtgaggcgcaaaagcaccctataacgagaaatcacgccacgaagttctgaaaagtttcccaagaaaaaaaaaactcaggaattttcaacttcttttgtttttttaggcccaatggagtcagcccaccaagattttctggatatcgtttgaaccaccgatccagcccgcacagcccactgtgcgtgagatatggttcgtcggttcccagttgatgtcttgccgtttatgtctgtttaggataccgattctagatctactaaaaatgttttttataaaataatactctcttggttcttttttatttgtcgtattttagtttaaaaataaactagcgggtaataatattagagaacagaggtaatagttaactagtttatatccataaaatataggttcatcattaaattattaaacctaaggatcagatttacctttttaagatagcttcaccgctttaaaaataaatatagatcagagacttccctgtagaacacattggatgacacttgacagagcaaaactatcacacacacacacttcgccgtgtccaaaatagttggtggagcaagcacgggagtcgttctagtctctctcagcgaaatcgggttacgcagtacttactactatcttgctcgcatcgcacgcacctacgactacggcctaacggtttattggctcgatcgtagtaggagtatacgtacgtgcgttgcg

SEQ ID NO: 5474 - DNA, 4545 bp, Zea Mays
ccggggatcaccgcaaaatggcagcgcaggctcgtcgtcgccggggccgcgtcgtgtaccggaggcgcagagggccgttggcgctggcgagcccgggccgggactggtcccacccctacctcctcctcacctcgacccccttctcgttccgtgtcgccttctccgccgtggccgcgacagctgccgcgaattaattattcgcccaccattaaaacacctccgcccccttcgcgacctcctccagtcctccccaactcctctccatatctccacccttcctcagttcctctctcgtctctcatctcatccactcccgtcccagaatctccgtacacgcttcctcctcgccgtcgtgccaccccaccaaaccacgcctgaactgccatttcccccgttttttcccctctcgcgcaaggcgtaaccggtgcgtcgtggggggtagtttcggccgagggaagcgcggcgcgggaccgggcgcgtttcagaattcagaccggccggccggccgcggggagggcgccgcgagatcgcattgtggcggacgcggccgggtcaccgcggcattccgctccgggggtgtccgtggctgctcgaggcttttgcttgtttgtctcttacctcttgcgttgcgtcgggcggcggggctcgaggttggtggccggccaggcgcagcgtctccttttcgcggtcgcctttccggagcggctgccgccgctgctggtgcctggtggggacgcgcttcgcctttccgccgcctcggcgtggcgtgattccgaagcgttgccggggttgtactggttgctggtagatagaaaaacaccgcatcttttttggagggctcgtctcggctggcacgaaggttcctcgcggacaatgccgagcatccgagctccggcgtccaagcagacggccacgctacaggtggctgtcaagtgcaggccattgaccgacaccgagcagcggcgttcgcggcatattatacaggtcattgatgacaagactgtggtcgtgctggaccctgatctgtcaaaggattatctggacctcatccagaaccggaccaaggaaaggagctataccttcgatcatgtgtacgcgcctgggtgctccaattcggcgtgtctcgtgctctggacagttgttgaaacaatactacggagtactgacatgtacaaactactggttgctggtactagcctactggctactaggggtatcccgtgcctgtacagttggagcaatactactggcatctaaagggccaatgagcaggacgtgtataagaatatatcctctacaattgctggtgtagtccaaggccttaacgcgacagtctttgcttatggttctactggaagtggcaaaacttacactatggttggaacccatagcgatcctggtctgatggttcttagcttccgtacaatttttgagctgataaaaaaggacgacagtaaggatacgtttgaagtttcatgttcatatctggaagtgtacaatgaggttatctatgatttgcttgagagatcctctggacacctggagcttcgagaagatcctgagcatggcataatagttgctggattgagaagcattaaggttcattccgcagataggattcttgagctgttgaacataggcaacagtaggcgcaagacagagagtacagaagcaaatgctacttcttcacggtcacatgctgtacttgagattaccgtaaagcgaaagcagaaaggccaatatggtaaccaagttcttcgtggaaagcttgccttggttgatcttgcgggcagtgagagggcctctgaaacaaacaacttcggtcaaaagcttagagatggagccaacatcaaccgatcactcctagcattagcaaactgcatcaatgccctaggcaagcaaaataagaaaggtcttgcctatgttccctatcgcaacagtaaattaactcgtattcttaaggatgggctctctggcaattctcgaaccgttatggttgctacaatatcaccagctgatgatcagtatcatcacacaacgaatacactcaagtacgcagaccgtgctaaagagataaaaacacatgtccataaaaatattggaacacttgacactcatgttgaagactatcagaggatgatcgacaatcttcaggttgaggtttctcagttgaaaaaggaattagctgagaaggagcatcagttaagtgtaaagcctactgaaaaaactgcagatagtgagctatcttggttaaatgtcttgagccaggaaactggtgagaatgttcaagaacgcataaatcttcagaaggctctgtttgaactcgaagaaaccaataagcgaaaccgcatggaactccagcatcttgatgattctattgcaaggcatcaggtgaaagaaatggactctaccattctccaagctttaacatcaaggagacaagttattcttgacaacatccgtgataatgacgaagctggttctggatatagaaaggacatcgaaatgaatgagagtcgcaggcgacaactccaggatatgattgaagaggccatcagtaacaatggcaataaaacctacctgcacattctcagccagtacagactacttggaatgactaacgctgagcttcaaattgagatggctatgcgggatcaagttatacataatcagagggaagctctaaggagcctgtggaacattctctatggaacagggctaaaccagaagcagattcttaaattggctgcaaagcaagggttaaccgtagaaggctgtcctttgcctagctcaagcccagacgttaccacgccaccttcctgtcaacctcataggtttccatcgtttatgccatttcctggtccgcagtcagagccttattctccatctgcttgctttttccaacatggtttcagcactatgtctttgctgaaaaatcagcatgagacgcccacaatatgtaggcaggagcacctcagttcttactacatgatgtctggctgctcgccttactctggtgatggaaaacagtggtcaagtggaagacctacggcattcttttctactccagaaaaacctaaggaggctcagtcccaacacaacaaggaacattctggcagccatgatttcagtctgcacagaaaggatctgtggtccacggaaaggaaatgacgggcctcgagatccttctggtacttaaaaacacctgtgatggctacaatgcggcctgtctgatgttcctaacctcggtcgctgtgtgcaccatcttctgtctaccaccgacgttcccggggttcctgagatctgaagatatggtagtggtagatttcgcgggagctgttgccttgcccacgtccattttggttgatcctgctgggcgttgcccactccgtccaccatgtacagtagatgcaagtcctctcagtttttttgggggaaggggggtggatatctgatttctggaccaagaacagtgtaaatttgccgcggttctcgccctccttcagtaaatccaccggtaaagctttccggattggtcttcaaatcgggcgggtgacgacgatcaggatgggagttgggtgactgatgaacagtctaagggctacagtagcatgtggtaggaataggatctcatcagtcatctctctagatcattgaataagccctggtgaggctcacctgccctggagaccacattgaagcaggagcagcgctgggcatgatggtccctccctcacattcatgtttctgcgcaacagttgtgctgaatgctacgctggagcagccgaggccgcacggcacgcacatcgcagtcgcgttccacatgcccggcgcagccaaagggctggctggctggcttccgtctgacattccgttccggttcctatattgctacggtggattcatctttgtatatacatctgcgcggttgcccagctctggaggagtggccattgctactgtggcgtgacaatgggagtggcacctgcttcacatttgtatagaggagtggccatgcatggctgcctgtacacgtcaggtgagacgcaaggatctggcacgcaactagcctggtccattgcgttgcgtctggcgggcgtgccggtgcctgcgtcggcagcgagacgactttggtgggtgagggcgtcaggaacagaagaaggcgtgcaagccgtgacctacagacgacaggcctgcaactgcatacgggcctgggggcatgcagctgccaatgctttcctgccctgcactgccggagtctacaggactgcactgacacctcgtggggcaactcgcagcgcttttatctgttgctaatgctaatggcgcatcaagctgccattagagaattaaaagaggtcgtcgtttctacggtctcacgtgaaggtggtttcatgcgtacaacaataaggccaggccttgtgttttaagttgttcctaagattgttttccgtggtggatcgattcgttcgtgcgtgactgtgcgtgtaaagtccaaacaaatcaacctggaaccagaatgaacgtacgtagtactggttcatg

SEQ ID NO: 5475 - DNA, 4166 bp, Zea Mays
aaaacacctccgcccccttcgcgacctcctccagtcctccccaactcctctccatatctccacccttcctcagttcctctctcgtctctcatctcatccactcccgtcccagaatctccgtacacgcttcctcctcgccgtcgtgccaccccaccaaaccacgcctgaactgccatttcccccgttttttcccctctcgcgcaaggcgtaaccggtgcgtcgtggggggtagtttcggccgagggaagcgcggcgcgggaccgggcgcgtttcagaattcagaccggccggccggccgcggggagggcgccgcgagatcgcattgtggcggacgcggccgggtcaccgcggcattccgctccgggggtgtccgtggctgctcgaggcttttgcttgtttgtctcttacctcttgcgttgcgtcgggcggcggggctcgaggttggtggccggccaggcgcagcgtctccttttcgcggtcgcctttccggagcggctgccgccgctgctggtgcctggtggggacgcgcttcgcctttccgccgcctcggcgtggcgtgattccgaagcgttgccggggttgtactggttgctggtagatagaaaaacaccgcatcttttttggagggctcgtctcggctggcacgaaggttcctcgcggacaatgccgagcatccgagctccggcgtccaagcagacggccacgctacaggtggctgtcaagtgcaggccattgaccgacaccgagcagcggcgttcgcggcatattatacaggtcattgatgacaagactgtggtcgtgctggaccctgatctgtcaaaggattatctggacctcatccagaaccggaccaaggaaaggagctataccttcgatcatgtgtacgcgcctgggtgctccaattcggacgtgtataagaatatatcctctacaattgctggtgtagtccaaggccttaacgcgacagtctttgcttatggttctactggaagtggcaaaacttacactatggttggaacccatagcgatcctggtctgatggttcttagcttccgtacaatttttgagctgataaaaaaggacgacagtaaggatacgtttgaagtttcatgttcatatctggaagtgtacaatgaggttatctatgatttgcttgagagatcctctggacacctggagcttcgagaagatcctgagcatggcataatagttgctggattgagaagcattaagataggattcttgagctgttgaacataggcaacagtaggcgcaagacagagagtacagaagcaaatgctacttcttcacggtcacatgctgtacttgagattaccgtaaagcgaaagcagaaaggccaatatggtaaccaagttcttcgtggaaagcttgccttggttgatcttgcgggcagtgagagggcctctgaaacaaacaacttcggtcaaaagcttagagatggagccaacatcaaccgatcactcctagcattagcaaactgcatcaatgccctaggcaagcaaaataagaaaggtcttgcctatgttccctatcgcaacagtaaattaactcgtattcttaaggatgggctctctggcaattctcgaaccgttatggttgctacaatatcaccagctgatgatcagtatcatcacacaacgaatacactcaagtacgcagaccgtgctaaagagataaaaacacatgtccataaaaatattggaacacttgacactcatgttgaagactatcagaggatgatcgacaatcttcaggttgaggtttctcagttgaaaaaggaattagctgagaaggagcatcagttaagtgtaaagcctactgaaaaaactgcagatagtgagctatcttggttaaatgtcttgagccaggaaactggtgagaatgttcaagaacgcataaatcttcagaaggctctgtttgaactcgaagaaaccaataagcgaaaccgcatggaactccagcatcttgatgattctattgcaaggcatcaggtgaaagaaatggactctaccattctccaagctttaacatcaaggagacaagttattcttgacaacatccgtgataatgacgaagctggttctggatatagaaaggacatcgaaatgaatgagagtcgcaggcgacaactccaggatatgattgaagaggccatcagtaacaatggcaataaaacctacctgcacattctcagccagtacagactacttggaatgactaacgctgagcttcaaattgagatggctatgcgggatcaagttatacataatcagagggaagctctaaggagcctgtggaacattctctatggaacagggctaaaccagaagcagattcttaaattggctgcaaagcaagggttaaccgtagaaggctgtcctttgcctagctcaagcccagacgttaccacgccaccttcctgtcaacctcataggtttccatcgtttatgccatttcctggtccgcagtcagagccttattctccatctgcttgctttttccaacatggtttcagcactatgtctttgctgaaaaatcagcatgagacgcccacaatatgtaggcaggagcacctcagttcttactacatgatgtctggctgctcgccttactctggtgatggaaaacagtggtcaagtggaagacctacggcattcttttctactccagaaaaacctaaggaggctcagtcccaacacaacaaggaacattctggcagccatgatttcagtctgcacagaaaggatctgtggtccacggaaaggaaatgacgggcctcgagatccttctggtacttaaaaacacctgtgatggctacaatgcggcctgtctgatgttcctaacctcggtcgctgtgtgcaccatcttctgtctaccaccgacgttcccggggttcctgagatctgaagatatggtagtggtagatttcgcgggagctgttgccttgcccacgtccattttggttgatcctgctgggcgttgcccactccgtccaccatgtacagtagatgcaagtcctctcagtttttttgggggaaggggggtggatatctgatttctggaccaagaacagtgtaaatttgccgcggttctcgccctccttcagtaaatccaccggtaaagctttccggattggtcttcaaatcgggcgggtgacgacgatcaggatgggagttgggtgactgatgaacagtctaagggctacagtagcatgtggtaggaataggatctcatcagtcatctctctagatcattgaataagccctggtgaggctcacctgccctggagaccacattgaagcaggagcagcgctgggcatgatggtccctccctcacattcatgtttctgcgcaacagttgtgctgaatgctacgctggagcagccgaggccgcacggcacgcacatcgcagtcgcgttccacatgcccggcgcagccaaagggctggctggctggcttccgtctgacattccgttccggttcctatattgctacggtggattcatctttgtatatacatctgcgcggttgcccagctctggaggagtggccattgctactgtggcgtgacaatgggagtggcacctgcttcacatttgtatagaggagtggccatgcatggctgcctgtacacgtcaggtgagacgcaaggatctggcacgcaactagcctggtccattgcgttgcgtctggcgggcgtgccggtgcctgcgtcggcagcgagacgactttggtgggtgagggcgtcaggaacagaagaaggcgtgcaagccgtgacctacagacgacaggcctgcaactgcatacgggcctgggggcatgcagctgccaatgctttcctgccctgcactgccggagtctacaggactgcactgacacctcgtggggcaactcgcagcgcttttatctgttgctaatgctaatggcgcatcaagctgccattagagaattaaaagaggtcgtcgtttctacggtctcacgtgaaggtggtttcatgcgtacaacaataaggccaggccttgtgttttaagttgttcctaagattgttttccgtggtggatcgattcgttcgtgcgtgactgtgcgtgtaaagtccaaacaaatcaacctggaaccagaatgaacgtacgtagtactggttcatg

SEQ ID NO: 5476 - DNA, 2783 bp, Zea Mays
ccaactcctctccatatctccacccttcctcagttcctctctcgtctctcatctcatccactcccgtcccagaatctccgtacacgcttcctcctcgccgtcgtgccaccccaccaaaccacgcctgaactgccatttcccccgttttttcccctctcgcgcaaggcgtaaccggtgcgtcgtggggggtagtttcggccgagggaagcgcggcgcgggaccgggcgcgtttcagaattcagaccggccggccggccgcggggagggcgccgcgagatcgcattgtggcggacgcggccgggtcaccgcggcattccgctccgggggtgtccgtggctgctcgaggcttttgcttgtttgtctcttacctcttgcgttgcgtcgggcggcggggctcgaggttggtggccggccaggcgcagcgtctccttttcgcggtcgcctttccggagcggctgccgccgctgctggtgcctggtggggacgcgcttcgcctttccgccgcctcggcgtggcgtgattccgaagcgttgccggggttgtactggttgctggtagatagaaaaacaccgcatcttttttggagggctcgtctcggctggcacgaaggttcctcgcggacaatgccgagcatccgagctccggcgtccaagcagacggccacgctacaggtggctgtcaagtgcaggccattgaccgacaccgagcagcggcgttcgcggcatattatacaggtcattgatgacaagactgtggtcgtgctggaccctgatctgtcaaaggattatctggacctcatccagaaccggaccaaggaaaggagctataccttcgatcatgtgtacgcgcctgggtgctccaattcggacgtgtataagaatatatcctctacaattgctggtgtagtccaaggccttaacgcgacagtctttgcttatggttctactggaagtggcaaaacttacactatggttggaacccatagcgatcctggtctgatggttcttagcttccgtacaatttttgagctgataaaaaaggacgacagtaaggatacgtttgaagtttcatgttcatatctggaagtgtacaatgaggttatctatgatttgcttgagagatcctctggacacctggagcttcgagaagatcctgagcatggcataatagttgctggattgagaagcattaaggttcattccgcagataggattcttgagctgttgaacataggcaacagtaggcgcaagacagagagtacagaagcaaatgctacttcttcacggtcacatgctgtacttgagattaccgtaaagcgaaagcagaaaggccaatatggtaaccaagttcttcgtggaaagcttgccttggttgatcttgcgggcagtgagagggcctctgaaacaaacaacttcggtcaaaagcttagagatggagccaacatcaaccgatcactcctagcattagcaaactgcatcaatgccctaggcaagcaaaataagaaaggtcttgcctatgttccctatcgcaacagtaaattaactcgtattcttaaggatgggctctctggcaattctcgaaccgttatggttgctacaatatcaccagctgatgatcagtatcatcacacaacgaatacactcaagtacgcagaccgtgctaaagagataaaaacacatgtccataaaaatattggaacacttgacactcatgttgaagactatcagaggatgatcgacaatcttcaggttgaggtttctcagttgaaaaaggaattagctgagaaggagcatcagttaagtgtaaagcctactgaaaaaactgcagatagtgagctatcttggttaaatgtcttgagccaggaaactggtgagaatgttcaagaacgcataaatcttcagaaggctctgtttgaactcgaagaaaccaataagcgaaaccgcatggaactccagcatcttgatgattctattgcaaggcatcaggtgaaagaaatggactctaccattctccaagctttaacatcaaggagacaagttattcttgacaacatccgtgataatgacgaagctggttctggatatagaaaggacatcgaaatgaatgagagtcgcaggcgacaactccaggatatgattgaagaggccatcagtaacaatggcaataaaacctacctgcacattctcagccagtacagactacttggaatgactaacgctgagcttcaaattgagatggctatgcgggatcaagttatacataatcagagggaagctctaaggagcctgtggaacattctctatggaacagggctaaaccagaagcagattcttaaattggctgcaaagcaagggttaaccgtagaaggctgtcctttgcctagctcaagcccagacgttaccacgccaccttcctgtcaacctcataggtttccatcgtttatgccatttcctggtccgcagtcagagccttattctccatctgcttgctttttccaacatggtttcagcactatgtctttgctgaaaaatcagcatgagacgcccacaatatgtaggcaggagcacctcagttcttactacatgatgtctggctgctcgccttactctggtgatggaaaacagtggtcaagtggaagacctacggcattcttttctactccagaaaaacctaaggaggctcagtcccaacacaacaaggaacattctggcagccatgatttcagtctgcacagaaaggggtcctcagaatacacatactgaattaatcttgctcctagttaa

SEQ ID NO: 5477 - DNA, 3954 bp, Zea Mays
gttgttagccaaaagtcaaaattgcccatgtccatccatccgctcgataagatcacgttataaaagcagcccaatcccccagaaacccacacaccgccccaaaagaataaaaaaaatcattttgctcttttgattgattgatatgctatagctggagttcaaaccaacaggccacaggctacaggccacagctagcacacccttctcgccacgctcttgtccgcactctactcgccgagagtgtgagtcgagacgcctctctcgccctctcttctcctccctccactccgccgccgcgcccgagaaaagagagttccaatgcgcctcctcccgctgctcctgctcctgtccctcgccgctgtcgcggccggcacggacgcggacgcggacgcgctgctggccgcgaaggccgcgctctccgaccccactggggcgctcgcgtcctgggacgcggcctcctccgaccattgcgcgtgggtgggggtcacctgcgcgccccgcggctccggcggaggcgtcgtcgtcgggctcgacgtctccgggctcaacctgtccggcgcgctcccgccggcgctgtcgcggctccgcggcctgcagcgcctctccgtcgccgccaacggcttctacgggcccatcccgccgtccctcgcgcgcctgcagctcctcgtccacctcaacctctccaacaacgccttcaacggctccttcccgcctgcgctcgcgcggctccgcgcactccgggtgctcgacctctacaacaacaacctcaccagcgccacgttgccgctcgaggtcacgcacatgcccatgctccgtcacctgcacctcggcggcaacttcttctccggggagataccgccggagtacggccggtggcctaggctgcagtaccttgcggtctccgggaacgagctctccggcaagataccgcccgagctggggaacctcaccagcctcagggagctctacattggctactacaacagttacaccggtggccttccgccggagctggggaacctgaccgagctcgtccgcctcgacgccgccaactgtgggctctccggcgaaatcccgccggagctcgggaggctgcagaatctggacacgctcttcttgcaggtgaatggcctcaccggcagcataccgtcggagctgggctacctcaggagcctcagttctttggacctgtcgaacaatgcgctcaccggtgagatacctgcgagtttctccgagctcaagaacctgacgctgcttaacctgttccggaacaagttgcgcggcgacatccccggcttcgtcggcgacctgcccagcctcgaggtgctgcagctgtgggagaataacttcaccggcggtgtgccacgccgcctcggccgcaacggccgcctccagctgctcgacctctcgtcgaacaagctcaccggcacgcttccgccggagctctgtgcggggggcaagctgcagacgctaatcgccctcggcaacttcttgttcggtgccatcccagactcactcggccagtgcaagtccttgagccgtgtccgtctcggggagaactacctgaatggctcaattccgaagggtctattcgaattgccgaagctgactcaagttgagttgcaagataacctcctcactggcaatttcccggctgtgatcggtgctgcggctcctaaccttggtgagattagcctgtccaacaaccagcttacgggtgcattgcctgcatctcttgggaacttctctggtgttcagaagttgctgcttgatcagaacgcgttctctggtgccatacctccggagattgggcggctgcagcagctctccaaggctgaccttagcagcaacaagtttgagggaggtgtgccaccggaggtcgggaaatgccggcttctcacttacttggacatgagccaaaacaacctctctgggaagatacctccggccatctctggaatgcgaatactgaactacctgaacctgtccaggaaccatcttgatggagagatacctccatccattgcaaccatgcagagcttgacggcggtggacttctcgtataacaacttgtctgggcttgtgccagggactggccagttcagctacttcaatgccacatcttttgttggcaatccaggcctgtgtggaccatacctcggtccatgtggtgcaggcataggtggcgccgaccactctgtccatggccatggctggttgaccaatacggtcaagctgctcattgtccttggcttgttgatctgctccattgcattcgctgtggcggcgattctgaaggctcggtcattgaagaaagctagtgaagctcgagtatggaaactcactgcattccagcgcctagacttcaccagcgatgatgtgctggattgcttgaaagaggagcacattattggcaaaggtggtgctgggattgtgtataagggggcgatgccgaatggtgaacttgtggctgtgaagagactcccagcaatgggccgtggctcatcacatgatcatgggttctcggcagagatacaaacacttggtagaattcgacaccgtcatattgtgcgcctgctaggcttctgctcaaacaatgagactaacctgttggtttatgagtatatgcccaatggcagccttggggagatgctccatggcaagaagggagggcacctccactgggatacccgatacagcattgctattgaggcagccaaggggctttgctacttgcaccatgactgttcacctttgatacttcaccgggatgtcaagtcaaataatatacttcttgactccaactttgaagctcatgtggccgactttgggctagcaaaattcttgcaggactcgggggcatctgaatgcatgtctgccatcgctggctcatatggctacatagcgccagaatacgcatacacattgaaggtggacgagaagagtgatgtctacagcttcggcgtggtgcttctggagcttgtcacaggaaggaagcccgtaggcgagttcggcgacggcgtcgacatcgtccagtgggcgaagatgacgacgaactcaaacaaggaacaagtgatgaaggtcctggacccaaggctctcgaccgtcccgctgcacgaggtgacgcacgtcttctacgtcgcgttgctgtgcaccgaggagcaaagcgtgcagcgcccgacgatgagggaggtggtgcagatcctgagcgagcttccaaaaccgccatctaccaagcagggagaggagaattctaccaagcaaggagaggaggttccgaattccggcgacggctctgcgcccagccctctacactcagcaccagttgggaccaacgaagcaccagccgtcgaagcgagagaccaccagcagcagacaagctctccgtcgtcgccaccgcctccagatctcatcagcatctgagtaaccggaatcgaaaacgttaccgttcctcgcaaaaatccccgcttcagtgtagcaagcttaggtcgtaattttaggtttgcaataagtttatttggcctcctgtgctgtacatatccgagtttgtttgttggttggttgtgtccggtctgtcatgtttcatttgctggtgcggtgtggtaggagtctgtagcgagttgagtttgagtgagccacgttgctagagcctttgatttcccttctctaatactagtgcactctctcttgtcaaatttggcgccagaatctttgttgtggaaccaaaaaccttaaagtgctttctacttctgtgtaaacggtgggagtgggccataggcccatagctaaaggcctcgaaatcaccagaccttaggctgtattggttggtcccaaagagaaagcctgcttgcaagagcagacggcctgggcccagaatgtcaaaggacgagacaggagcgcatgaaagagacgactctcggtagccagatgctttgccctctgcctaataacgtc

SEQ ID NO: 5478 - DNA, 1610 bp, Zea Mays
aggcccacgcacagaggaagcgcaatcccaccccacccggcacccgttgaccgctgttcgcctagcaatgagcgccatccactcacccgccgcgccgccggcgaggccgcctttccggcgcagcacgacgggagtagcgtctcccctccgggaaccctcacagccgcaaccgacgccaccggcgcctccgagcctcacctcccgccgcgccggtctcgtcgcactcctcgtggcagcggtggcgccggaacgccctgccgccgccgccgccttctcgctcggcattcctgggcccaaggagctgctgcgggagcagaagaagaagtcggcgtccttcctcctcgcgcccatcgccgcctcccgggacaccctcgtcaaagcccacgcgcttctggcttcgccgagtgcgtctactgaggacgccgaggaggtgaaggggcggatccttgcggcaggaagggactgcgtgccgcggcagaggaactcgattgtcgcgctccagtcgcggactggcgttgaggtgtgcacattcagcttgatactgaagaacgccgcgtcgctgctcgccaataaggattccctcaaggttgaagctgatactaggctcgaggagctcataaagtcattctctgaactgggaactctggtggagaacagtaattttgagctcgcagatgataggcgagtaatgccagcacacatatttttatttatttaaatcctggatatgagaaacatgtgtgacctattaatattctggcctcttactagtagcaacttgatgtttcctgtgacagcattttatgtctatctttttatttatgtaatgttgtcatcttttttttatctccagttaggatatttaaaattttgtatacggacagccaattctttctcttgttgattttgtaaataaaggagttgtatatcttatatcatcatctcaccataggagtttaaataaactgctgtaatattgtcggacctcatagtctggattgtcttctaacgtgaaatgaatggatctgtacaaattttattgaatgctctgtataagttcaaataaataagccttgtctttctatgatattgtttcaaaatatacgaatttagtaaatgctggcattgatcaattttgtcctgcagagagaagataaaagatggcttactgagcagtgtctctgccctggacaaatttgagcagagtgttaaagactgtttaggtgtttagacttttttgtgccagatcggatcacattttttcaaagcattttaaattgacttacttattgtttttatttttcttctatcgttgaggtaaggtttcatttgcctttgctcattagggacttctgttgtacaaatgatctgttcatttgatctgatatatgatatttatggtacaagaatgcttgtctgtaaacaaaaactagatttaaattgccagaagttcaaagcgtagtagctgtccaagcaggccctataccaaattttgtttcagctactactattttcaaggttctctctgttgttctccacaacttgtcgtcttgtttatgaaaattataaatgtgcactgtttatctatctataccttaggcttcttgttt

SEQ ID NO: 5479 - DNA, 1684 bp, Zea Mays
cagaggcgaagctagcaaccaaatcaagatggctcctgacatcgactggggtaaaaatatacgcataatattggatgtcggatgcaaaagcgctggctttggtattgctctactcgagaaagatgtgataacactatctttaggccttacaaatgaccaaacagaccttgcgcaagttgcccttgaacgtggcatccctgcaacagttggcagtctgggatcgcgaagattacccttccctagtggtgcatttgatgctattcactgtggtgaatgcaatataccatggcattctaatggtggaaaacttctcctagagataaatagaattcttcgtccaggaggatacttcatcatctcaagcagaagtgctgacctggagagtgaagaaggaatatcagcttcaatgaccgcactttgttggaatgcaatagcttacaatagtgacgatgtcagcgaggctggagtaaagatatttcagcgaccagtctcaaatgaggtatatgatctgagagcaaaaaaggatcctccattttgcaaggaagagcagaacaaagctagtgcatggttgaccttgcctttttaggtatactaatatcaaacattgcctgcacaaagcacctgttggtatcgaagaaagaggcagtgactggcctgaggagtggcccaagaggctcgagagtttccctgagtggcttggggaaacagaaacaagggtggcttctgatcataaccattggaaggctgttgttgagaaatcttatctggatggattgggcattgactggtcaaatatccgtaacataatggatatgagggctgtatatggaggatttgcagctgcactggcatctaaaaaggtttgggtcatgaatgttgttcctgtgcatgctgcagacaccctacccataatctacgagcgtggcctgatcggtgtgtatcatgattggtgtgaaccatttagtacatatccaaggtcctatgatcttttacatgctgaccatttattctcacgcctgaagatcagatgtaagcaacctgtctcaattgttgttgagatggaccgtattttgaggcctggaggttgggctatcatccgtgataaactcgagatccttgacccattggagacaatcttgaaatcactgcattgggaaattgtcatgaccttcagaaaggacaaggagggtatcatgtctgtaaagaaaacaacatggcgtccataaactgagctcagattcacaaggctccagcataccattttttgcactatactgctgtcgatttccccggattgtgagacagccattttgtgaatctggggtagatgtacaatatttgttcattcatctcatgacaatatgctcgccgcatctctgtcgggtagtttaagcccagttggatggttggttgtggttagcgttacattgatcaattctttgaagcagcatccaagacgaccagctctagtttcagaaaaagagggcccttcgattccataaacagggttgtacgagatacaagattgtttcttgttgtttaaaaatgtaacaatatagatatatgtaaaggttgtcactgaattaactgcttggtgatgttgtaagttgcaacaatccgtgaagattcaatgcatgaattttcttattgcaaattgtgagcaaacagcaaaagagtttccgat

SEQ ID NO: 5480 - DNA, 2302 bp, Zea Mays
ctcgcacgcaccaccccggtccgccgcgatgcctcccttcccggcggcgaccaccacctcccacctcgccctcctcgtgctcttctcatcttcctcccttttcttcctctacaaatccctccgcctccgccgcaaaccgtcccccgcccgcactgccactcctacccttctcttcgcctctgtaaccggcacctccaaaaccctcgctgcgcgtctctccgcccgactgaccgccgatgccggtttccccgtccgcgccaccgacgctgccaccttcgaccccgacgaccttccttcagtccatctcctcctgctcgtaatccccacccacgacggcggtgcgacgcccccttctgcggccttcctttcgcgctggcttgaggagtccgccgctgacttccgcgcgggtgcactcctcctttccggtctccgcttcgccgtcttcggggttggttcccgggcctatggggagaccttcaacgctgccgcgaggaacttctcgcggtggttgcgcgcgctcggcgccgttgaagtggttcctctcggggagggcgacatcgatagcggggatctcgaagcggtgttcgaggagtggaataggagggtgctgagggtggtgaagggcgaggaggttggttatggggctaatgaaaaaaacaatggtcttgacgagttggagttggaaggggaggattgggatgacgacgatgaggagatggtggatgcggaggttgacatggaagatattgctgggaaagcaccggcgaggaggaagaacgggaatttggagggtgttctagctaatggagtgcataacggtgtaaaggacatggtcacaccaatcattaggacgagtttggagaaggttacaaaattattggttctcatagcggagtgaagatttgcagatggactaagtcgcagctgcgaggtcgtggagggtgttataagcactcattttacggcatagaaagtcacagatgcatggaagcaactccaagtttggcttgtgcaaataaatgtgtattttgttggagacatcacacaaatcctgttggaaagagctggaaatggaagatggatgaccctcttgacattgtgaatgctgcaattgaccagcatactaagatggttaagcaaatgaagggcgtaccaggagtaaagccagaaaaacttgacgaaggtctgtcacctagacattgtgcgttatctctggttggtgaaccaattatgtaccctgagataaatgctcttgtggatgagctacaccgaagacacatatctacgtttctggttacaaatgctcaatttcctgaaaagattaaggcattaaaaccaatcactcagctgtatgtcagtgtggatgcagctacaaaggagagcttgaaggctgttgataggccactattttcagacttctgggagcgtttcctggattcactcaagtcactgcatgaaaaagatcaaagaacggtttaccgactaacactggttaaaggctggaatgcagaagagatagatgcatatgcgaaactgctagatcttggccagcccgatttcattgaaatcaagggtgtaacatactgtggctcgtcagcaacttcaaagttgactatggaaaatgtaccttggcactctgatgtaaaggaattctccgaggtgttggcatcgaaaagcggtggtgtatacgaagtagcgtgtgagcatgctcattcatgttgtgtcctacttgcaaaggtagataaattcaagatcaacggcaaatggcatacctggatagattatgaccgtttccatgaactggtgacatctggaaagcctttcaatagccgagattacatggccatgacgccctcatgggctgtctatggtgcagaggaaggtggattcgatccggatcaatctcgtttcaagaaggaaaggcgccatggaactgctgccctcagaagttgaagttgatcttattgagaagacatggacctgctactcccgaacactgacctatgttactgctttttagaggcaaaaactttggaagcaaggatttttgaaatgttagcttccaagccatacattttctgtttgtcgtgtgaatcagtttccgaaagttcattttttgatagtttttattggaacatgtattttgttctcttgaatcctctgatgtagtgacggggcgagtttacgactgaaattctggggacctgcgcacgaaatatgtagcataacaagtacaccctccgttgtcttgaagagtgttagggcatctcgttaactcgctcgactcgattcaatagtgact

SEQ ID NO: 5481 - DNA, 1845 bp, Zea Mays
ctcgcacgcaccaccccggtccgccgcgatgcctcccttcccggcggcgaccaccacctcccacctcgccctcctcgtgctcttctcatcttcctcccttttcttcctctacaaatccctccgcctccgccgcaaaccgtcccccgcccgcactgccactcctacccttctcttcgcctctgtaaccggcacctccaaaaccctcgctgcgcgtctctccgcccgactgaccgccgatgccggtttccccgtccgcgccaccgacgctgccaccttcgaccccgacgaccttccttcagtccatctcctcctgctcgtaatccccacccacgacggcggtgcgacgcccccttctgcggccttcctttcgcgctggcttgaggagtccgccgctgacttccgcgcggggttacaaaattattggttctcatagcggagtgaagatttgcagatggactaagtcgcagctgcgaggtcgtggagggtgttataagcactcattttacggcatagaaagtcacagatgcatggaagcaactccaagtttggcttgtgcaaataaatgtgtattttgttggagacatcacacaaatcctgttggaaagagctggaaatggaagatggatgaccctcttgacattgtgaatgctgcaattgaccagcatactaagatggttaagcaaatgaagggcgtaccaggagtaaagccagaaaaacttgacgaaggtctgtcacctagacattgtgcgttatctctggttggtgaaccaattatgtaccctgagataaatgctcttgtggatgagctacaccgaagacacatatctacgtttctggttacaaatgctcaatttcctgaaaagattaaggcattaaaaccaatcactcagctgtatgtcagtgtggatgcagctacaaaggagagcttgaaggctgttgataggccactattttcagacttctgggagcgtttcctggattcactcaagtcactgcatgaaaaagatcaaagaacggtttaccgactaacactggttaaaggctggaatgcagaagagatagatgcatatgcgaaactgctagatcttggccagcccgatttcattgaaatcaagggtgtaacatactgtggctcgtcagcaacttcaaagttgactatggaaaatgtaccttggcactctgatgtaaaggaattctccgaggtgttggcatcgaaaagcggtggtgtatacgaagtagcgtgtgagcatgctcattcatgttgtgtcctacttgcaaaggtagataaattcaagatcaacggcaaatggcatacctggatagattatgaccgtttccatgaactggtgacatctggaaagcctttcaatagccgagattacatggccatgacgccctcatgggctgtctatggtgcagaggaaggtggattcgatccggatcaatctcgtttcaagaaggaaaggcgccatggaactgctgccctcagaagttgaagttgatcttattgagaagacatggacctgctactcccgaacactgacctatgttactgctttttagaggcaaaaactttggaagcaaggatttttgaaatgttagcttccaagccatacattttctgtttgtcgtgtgaatcagtttccgaaagttcattttttgatagtttttattggaacatgtattttgttctcttgaatcctctgatgtagtgacggggcgagtttacgactgaaattctggggacctgcgcacgaaatatgtagcataacaagtacaccctccgttgtcttgaagagtgttagggcatctcgttaactcgctcgactcgattcaatagtgact

SEQ ID NO: 5482 - DNA, 2301 bp, Zea Mays
ctcgcacgcaccaccccggtccgccgcgatgcctcccttcccggcggcgaccaccacctcccacctcgccctcctcgtgctcttctcatcttcctcccttttcttcctctacaaatccctccgcctccgccgcaaaccgtcccccgcccgcactgccactcctacccttctcttcgcctctgtaaccggcacctccaaaaccctcgctgcgcgtctctccgcccgactgaccgccgatgccggtttccccgtccgcgccaccgacgctgccaccttcgaccccgacgaccttccttcagtccatctcctcctgctcgtaatccccacccacgacggcggtgcgacgcccccttctgcggccttcctttcgcgctggcttgaggagtccgccgctgacttccgcgcgggtgcactcctcctttccggtctccgcttcgccgtcttcggggttggttcccgggcctatggggagaccttcaacgctgccgcgaggaacttctcgcggtggttgcgcgcgctcggcgccgttgaagtggttcctctcggggagggcgacatcgatagcggggatctcgaagcggtgttcgaggagtggaataggagggtgctgagggtggtgaagggcgaggaggttggttatggggctaatgaaaaaaacaatggtcttgacgagttggagttggaaggggaggattgggatgacgacgatgaggagatggtggatgcggaggttgacatggaagatattgctgggaaagcaccggcgaggaggaagaacgggaatttggagggtgttctagctaatggagtgcataacggtgtaaaggacatggtcacaccaatcattaggacgagtttggagaagcaaggttacaaaattattggttctcatagcggagtgaagatttgcagatggactaagtcgcagctgcgaggtcgtggagggtgttataagcactcattttacggcatagaaagtcacagatgcatggaagcaactccaagtttggcttgtgcaaataaatgtgtattttgttggagacatcacacaaatcctgttggaaagagctggaaatggaagatggatgaccctcttgacattgtgaatgctgcaattgaccagcatactaagatggttaagcaaatgaagggcgtaccaggagtaaagccagaaaaacttgacgaaggtctgtcacctagacattgtgcgttatctctggttggtgaaccaattatgtaccctgagataaatgctcttgtggatgagctacaccgaagacacatatctacgtttctggttacaaatgctcaatttcctgaaaagattaaggcattaaaaccaatcactcagctgtatgtcagtgtggatgcagctacaaaggagagcttgaaggctgttgataggccactattttcagacttctgggagcgtttcctggattcactcaagtcactgcatgaaaaagatcaaagaacggtttaccgactaacactggttaaaggctggaatgcagaagagatagatgcatatgcgaaactgctagatcttggccagcccgatttcattgaaatcaagggtgtaacatactgtggctccaacttcaaagttgactatggaaaatgtaccttggcactctgatgtaaaggaattctccgaggtgttggcatcgaaaagcggtggtgtatacgaagtagcgtgtgagcatgctcattcatgttgtgtcctacttgcaaaggtagataaattcaagatcaacggcaaatggcatacctggatagattatgaccgtttccatgaactggtgacatctggaaagcctttcaatagccgagattacatggccatgacgccctcatgggctgtctatggtgcagaggaaggtggattcgatccggatcaatctcgtttcaagaaggaaaggcgccatggaactgctgccctcagaagttgaagttgatcttattgagaagacatggacctgctactcccgaacactgacctatgttactgctttttagaggcaaaaactttggaagcaaggatttttgaaatgttagcttccaagccatacattttctgtttgtcgtgtgaatcagtttccgaaagttcattttttgatagtttttattggaacatgtattttgttctcttgaatcctctgatgtagtgacggggcgagtttacgactgaaattctggggacctgcgcacgaaatatgtagcataacaagtacaccctccgttgtcttgaagagtgttagggcatctcgttaactcgctcgactcgattcaatagtgact

SEQ ID NO: 5483 - DNA, 878 bp, Zea Mays
gttggattgtggaacacgtgcacaatcttagcttgctggatctggaattgcttcttgactagagaaataagactaggcacctagatgtgtgctttcttcgcactcctcagtcgagcaggataaccttcactccaactgtgcagcactgcagtatggccacagtcattggcctgtgcctccgacttaagttgatgcagaacttccctccacatttcaaggttgacatcaaagttgctccaggatctcttgctaatgaagaatcagtaaacaagcaactgaacgacaaggagagggttgcagcagccttggagaaccccaacctacgccagctggtcgatgaatgcttatgcttcaatgatccatactcacgttaacttgttccatgctgcttcacaagtcgcaaccctgcctgctgtacagtagtaaccatgcatgctgtagtctgccctatatgttgacgctgtcgttgtacctggcaacgtgtaattaactgccccggagacatctgtttttgccatctttaaaacgtatggatctcaataatatgacaagagttgcctgcttatgtgacattagcatccaaaagcaagtgtcatttaatgtaaaatcttggtctttgttggtcatctgtatcggacgtcaattctgatcttgatatgttcggttctggaagtgagaacctgtcgttatgctgtattaatgttggccatctactcatctgctctatcagtcgaccccatcttctgggtgaactcacggtcccaagaagaccaaccttgtggtgctctctgtagcctccaaagtacatagtcggcaagcgatcgtgttgatgtttgccagtccaatagataacctgtgctcctgagtcaaaaaaaaaa

SEQ ID NO: 5484 - DNA, 1022 bp, Zea Mays
  misc_feature (1)..(2): n is a, c, g, or t
nntgggtgcatatcggatagcttgtgagtaaatttgtggacaagctagcatgttttaagtttgcgtcgccttaatctaacgaaatattcctttgttcatacctctggagcgactttacaggttacagctttttttttttgcagttagtggaattgaactatttttgaggctgcagaaagagctgcttgttgtgtaatccacatcttgacgcctgtaccggtgcgataaggaattgtatcattttgatattattgcaagatgggcgatggggtggcttttgaggctgcgaggaagattatcatgcacccgctttatacgccaaggtcttctccgtggcttgacttgaaggtgttctatgttagggtaagcaactgtgtggtggatgagtctacaccggaccatctcacgctgaaccacatccctctgtcacctgatacagttatcgaggtgaatggccagcggagcagcttgcatactgagttcatatcctcctcactgaggagggacagggttgacaaaaagacagaggaagctacatttgtcagcacagataatatacggatgacagggagtgcgaggttccaagtgtttgataagaatgatctcttgctcacaggagacctagatttatgcaatgccaatggagtcgttggggaatcgaagaacagcagcaagaaatggaatatgaagtgtcagtcatccacatcatgcaatggcttcttgaagggaaagctgtccaatggctcggaatatgtacaacctatgatcgaggtttatgtcgctgggacctcctctggcacacctatcatattaacaaagacaattcagcttatatcacgaaggaagtctgaaatgaaactaaagcttgattccatccctgagaatgaaacaactgaacagcagaaagaagagtcagctgaggacactttgaaggtatcagagttccaggattccaaatctgagacggatgttgatgttgactataacagtttgtactcaaggcaggactttctagaaggcga

SEQ ID NO: 5485 - DNA, 954 bp, Zea Mays
tcggatagcttgtgagtaaatttgtggacaagctagcatgttttaagtttgcgtcgccttaatctaacgaaatattcctttgttcatacctctggagcgactttacaggttacagctttttttttttgcagttagtggaattgaactatttttgaggctgcagaaagagctgcttgttgtgtaatccacatcttgacgcctgtaccggtgcgataaggaattgtatcattttgatattattgcaagatgggcgatggggtggcttttgaggctgcgaggaagattatcatgcacccgctttatacgccaaggtcttctccgtggcttgacttgaaggtgttctatgttagggtaagcaactgtgtggtggatgagtctacaccggaccatctcacgctgaaccacatccctctgtcacctgatacagttatcgaggtgaatggccagcggagcagcttgcatactgagttcatatcctcctcactgaggagggacagggttgacaaaaagacagaggaagctacatttgtcagcacagataatatacggatgacagggagtgcgaggttccaagtgtttgataagaatgatctcttgctcacaggagacctagatttatgcaatgccaatggagtcgttggggaatcgaagaacagcagcaagaaatggaatatgaagtgtcagtcatccacatcatgcaatggcttcttgaagggaaagctgtccaatggctcggaatatgtacaacctatgatcgaggtttatgtcgctgggacctcctctggcacacctatcatattaacaaagacaattcagcttatatcacgaaggaagtctgaaatgaaactaaagcttgattccatccctgagaatgaaacaactgaacagcagaaagaagagtcagctgaggacactttgaagtttgtactcaaggcaggactttctagaaggcga

SEQ ID NO: 5486 - DNA, 701 bp, Zea Mays
ccttaatctaacgaaatattcctttgttcatacctctggagcgactttacaggttacagctttttttttttgcagttagtggaattgaactatttttgaggctgcagaaagagctgcttgttgtgtaatccacatcttgacgcctgtaccggtgcgataaggaattgtatcattttgatattattgcaagatgggcgatggggtggcttttgaggctgcgaggaagattatcatgcacccgctttatacgccaaggtcttctccgtggcttgacttgaaggtgttctatgttagggagacctagatttatgcaatgccaatggagtcgttggggaatcgaagaacagcagcaagaaatggaatatgaagtgtcagtcatccacatcatgcaatggcttcttgaagggaaagctgtccaatggctcggaatatgtacaacctatgatcgaggtttatgtcgctgggacctcctctggcacacctatcatattaacaaagacaattcagcttatatcacgaaggaagtctgaaatgaaactaaagcttgattccatccctgagaatgaaacaactgaacagcagaaagaagagtcagctgaggacactttgaaggtatcagagttccaggattccaaatctgagacggatgttgatgttgactataacagtttgtactcaaggcaggactttctagaaggcga

SEQ ID NO: 5487 - DNA, 1750 bp, Zea Mays
gtttaaatgtgtctgtgctgattacttttaagttagccagcacgtttttttcaacctgtattgccgtcttgttgataaatgataatttctggaaatactattgaagacggccaaatttcttcaggcttctaaaacatgtgaaacgaactttgaggataggtctttccatctattgtcaatatgtatatttattgactatgatgtgttgaaacattcagggaagggttatcccttgcgactttattggtgttgttaaaagtcagcagcctgtttacttgaaaggggaaactgtgagtaatcatgatgagcttatgtccaatttctttgcccaacctgatgctcttgcttatggaaagactcctgaacagttgcacagtgagaaagttccagaaaatcttatccctcataagacttttaagggcaaccggccatcactaagtttgcttctgcctacactatccgcatatgaggttggacagcttttatccatctatgagcaccggattgcagttcagggcttcatatggggaattaactcatttgaccagtggggagtggagctagggaagtcactcgcttctcaagtgaggaaacagctgcatggaacccggatggaaggaaagcctgttgagggttttaaccacagcacttcaagtttgcttgcacgatatcttgctgtcaagccatccaccccgtatgatactaccgtgctgccgaaggtgtaattactcagttgtttttgacatgccaattgctgagttctgacttggcaaggttgagcataagtctttcttcatttgggagttatcacagagccagtttggcagtgctgtagttttggttttacctactctttgtagaagaaaagtgaagagtggatattatggaacaaaatatatacctacggcagcacgcagcatgatgaaacatatttaaaaaatttgggtgctctaccacatgcccgtggaataaaacggatgtaaactcagtgcacttataacaccctaattgtggttttgtttgtggttcaaacttctataccgaggcatcgatcgtgtaccactgtcccttgcgtcctattagcgccgtgtattctttcgtgccctgatctgctttgcaatgcacaaacgtatagggttttgttcatctgcacattctccgtgtggttgattgtcgatatgtacaggtacagcagcagctcgcaggctgccgttacagctttgcaggcaacagctgggattaagcagctcacagacgccaaagcaggacgttcacgcaatcaataacggcgcggcgagcatgagttgcaaaggtgcagcatcacatgcgtacacggtagcaactcagctgctgctgcttccggcctgctactggtgcggttcacgggactcatcgccgtcgttgccgatcgtagagggacggcccaccgcgccgctgtacaccgtgggcgcctgcctgatccgttccacgccgtgcgtgtacggtccgggagctttggccttgtacgaggccgcggccgccgtgcctaacgccatgctctgcccaggtcgcaccccctcgttgtcgttgaggtcctccagcgagatgtccccctcgagtgccctcacgatctgcacccaaaacgccatcgccattcattgccagccgtcgcttcggggctgcagcacccaccgatggtgcggtggaaaggaaacaaggcgtgagcatttgccgccgaatacctacctgactcatcttggggcgcttcttg

SEQ ID NO: 5488 - DNA, 1189 bp, Zea Mays
tgcatgattcactcgcttctcaagtgaggaaacagctgcatggaacccggatggaaggaaagcctgttgagggttttaaccacagcacttcaagtttgcttgcacgatatcttgctgtcaagccatccaccccgtatgatactaccgtgctgccgaaggtgtaattactcagttgtttttgacatgccaattgctgagttctgacttggcaaggttgagcataagtctttcttcatttgggagttatcacagagccagtttggcagtgctgtagttttggttttacctactctttgtagaagaaaagtgaagagtggatattatggaacaaaatatatacctacggcagcacgcagcatgatgaaacatatttaaaaaatttgggtgctctaccacatgcccgtggaataaaacggatgtaaactcagtgcacttataacaccctaattgtggttttgtttgtggttcaaacttctataccgaggcatcgatcgtgtaccactgtcccttgcgtcctattagcgccgtgtattctttcgtgccctgatctgctttgcaatgcacaaacgtatagggttttgttcatctgcacattctccgtgtggttgattgtcgatatgtacaggtacagcagcagctcgcaggctgccgttacagctttgcaggcaacagctgggattaagcagctcacagacgccaaagcaggacgttcacgcaatcaataacggcgcggcgagcatgagttgcaaaggtgcagcatcacatgcgtacacggtagcaactcagctgctgctgcttccggcctgctactggtgcggttcacgggactcatcgccgtcgttgccgatcgtagagggacggcccaccgcgccgctgtacaccgtgggcgcctgcctgatccgttccacgccgtgcgtgtacggtccgggagctttggccttgtacgaggccgcggccgccgtgcctaacgccatgctctgcccaggtcgcaccccctcgttgtcgttgaggtcctccagcgagatgtccccctcgagtgccctcacgatctgcacccaaaacgccatcgccattcattgccagccgtcgcttcggggctgcagcacccaccgatggtgcggtggaaaggaaacaaggcgtgagcatttgccgccgaatacctacctgactcatcttggggcgcttcttg

SEQ ID NO: 5489 - DNA, 5934 bp, Zea Mays
cacgtttcctcggctcctcgcccgcctctctcgtttattagcgctcgtaaaccccactcacttcttccttctcttcggccccttcctcggccgaaacctcagttgctcctccgcccgctcgaaaaccccaagtccccaatcacacatcgggccaccgccgcggcatccatggccgccgaagacaaagggaccggagaccgcgagaatgcagaccccaacctctgctccatcgccgacgcgtcgctgtctcacgagaacaccgaagacaaatcggatttggataccaagagcgcgccatctattcagttgcttcagccaaaaccgggggaaaacaaggagcctggttcacatgatatccactttaattctgcaaacacgacaggaaacagtgaagaagggaacaatactggaaagaaaagagatgttttcaggccttctgtgtttgatagaatatctggccaccgtgaccaatggtgcaatgaagacaccagactgaattcagattcccatcgaaatcaatggagggaaatggaaaaagaacatagtgatatgaacaaagtggaacagcactgtgatgaccccaagcaatatcttggtagccagcggagtcgaaaagagcgctgggttagtaacgaaagaaactatgaccaacaccatgagaataattggaattctcgctggggtgcaagtagtaaagattctcaaaattggcgtgaaaagtcaacagattcagatataaaagatgattactcctgtgaaaaagttttttcttacagtacatgccatgggaaagaaaaggatggtaccaatcatgagaaggttaatgaaagggacagtaatatttctcgatcgtggaactccagctattttgcaaaccgtggtgcaggcggtacatctgatcatctttttacggatccacagaagttatctgcttcatttggatacagtagctataggcaggaaagtgatagcccaaactctacaagttctcgcagaaggtttacatctgttacaagcagagtcaatagtcggtcttcacgaccattccatcttggtgtactttctgagaggcctgttggtccatctagtaactctgtgagatatagcaggataaagttgtttgaaatatatagaacaactgatgttagaaacttcacaatgccgataaatgatattggtaacaatgagatatcttcgttgtggcaagaagatcctatggatcctttagctctcattgcacctaatgctgaagaagcggtgattttgaaaggaattgaaaaaggagatatcacaaacagtttggcacaagcttgcaaagatggttctgatgacaaaaatattccaggcgtggcagcattagaacaaatgaaattaagtggaagagaagatcaaacaggaaacaatgaagaattcaatggtaaaatgaccattgatatcagaggaattcttggggctgctgatttgagggaacacttgaagtctgataaatctcctccaaaagaatctgagtctggtggtggtggtatccatgggccatgtgctgaatttggacatcagcgcaatgccttggaccaaggaactaaagttggtgatggtgaaaatgttaacccagaaaacctctctctgtactacaaggatccaaaagggtgcatccaaggtccttttcctggatatgacatcattggttggtttgaagctggatattttggtattgatttgctagttcgtgttgccagtgctccctgtgattctcctttcttattacttggggatgtcatgccacacttacgggcaaaggtaagggtgcctccaggcttcagcaataccaaaccaagaagtatgacagatgcctcacatctaggatcagtgtatcttggaacatctgattatggatccataaacaagaatggctgtgtaactgaagcagaaaattactttttggaggctccagtgtctagtaaaatccagaatcctagagcagcaactaatgttgttactggaggtatgaatgaatggaggtttgtttccggtgagaaagtgaatagtataaaccatcttgaagtacagaaggtgcagttagagacagaaaatacctttcaaatagaaggtgatgtcatatcagttggagagtcacaaaagaaagaatcagtacagtcaacttcacactcaacattcttcccgcaaatggttgacccatcgagtgaagccctccaacctcagaatattaacctgctctcaatgctgcttcctgcagaaaaaggacaagcaccgactgctacttctggattgtcacttcggtcaaataatgctgactctggaaatctgcatgctggtatgtgtggtatagatgttactcaagagatactaaatgtgcaccaaaatctgcataattctcagcaaataggtattgatgctcaacagcattacgttttaacacagaatcaaccaactttagcttgtttgaactctcaaatcacacagccagaaaagtttctcggtggaatatatcatgatcctcagttaaacatcaaccaacaacagtatctgctatcagagctacacttgcaacccctgattcctggagtccctgaacctcaatcctctctattgaacaacatgctacagctcaggcagcaggagcaacagcaacaatacatttctcagtccatacctcatgatcgttccatgcagcagctttatgattcttcccatgggacaatacatacttcattgtcatctggtgaccgtatgaagctttgtcttcaaagaacagaagagattcttgatcttgctctgaagttacctggtcatggtaagcataatctacaactacatgcaagtgtgaaattgagagacacaggaaatattggtttgtcggaaagttgcgctactgccctaccactgccccatgaaatgatgggtcatgcagcttggaaagaatgttctgctagtctcacacagggctctgcagttgttgatgctctttcacaaaaagaaagtattgtagactcaccatctaagaaaactccaagttatggttctaacgattatagcaagatgactgtttttgaagttacaggttttcctcaaccatttcaaggtcttcagaaaccgaaaagtgtagcatctcatatctcaaatgaagttcatgaaatggatatttcctctgtccatcctcattcatggaaacctactccaggtgttagggctaaatcagtgttggaaattcaagcagaggaacgattggaaactcagagggaaatagccctggaaaatacaaaggtaactacaacaacagcttccgggctatctattcattgggttgatttggttgaaacttctgggcaacagtttggagatcaggctagacctatgtgtgataaaaaaaatgacaatatatcacagagtaacagaagtcatttacatgatttatcggcaagagaggaactgataaagtcaaatgctaaagctggtgttatcataaacagtgctgatgatacatcttttcctcctctggcaccttctattactcagtctgatgctcatattcatgatggtgctgatttcattgagttcaagggcacaagaaagataagtaacagggggaagaaacccaaaggttctgcagttaaaaccccagcatcacatgcaaatgttatacctggaccagctactgatcctgcacaggtacgcgaaccatgttctctgagaaatattcaggtggaagaagaacaggaatcagctaatcttcagcaactagtaccagcatcatcccatgcaaaagggcctatggaccagcatattcatgggaacaattcatcctggcaaggttctgaatcacctccatcgaggggtaacgaattcctcaaaatgacttctcatgtttccagtcactccactcctaattcagaagagtatctgttttgggagcctcgtgagcatgcaaagcaagataagtatgttcttaactacgggctcaactttgtcagcttttcttcattctttttattaatgaaaaaatggaccttcttgctaagcttataccctctggaagcaaaattatgactgatacacattaaattgcactgtagccatttctgtttaagttaatctgcatctaaatcttgccagttttgttcttattttcttgcttggcgtggcaagagtttgttaatagacttagtccatcatgtgcatggactagtcagtactacattttgttattcacattcattactatcctttgcgattgagtatgttttatctgttatataaacttgctatagtggatgcagtaacatgcatgatgtgtccttgcacctgtactgacttaacatgtttcactattgaggtgtatgcaatatgattttgatctttcaacaacacaactctacaactttctttggcctgacgcaatatgtttgctattcctcgaccattaaaataaaatgtcattcatatatccgaaaatggtactagtaaattattcttacttctgcaataccttattttgtatatttcccaaatatatggtaataaataatataatggttaaaagtaaatgttcacctaaatgtaataagttagtcacctgttgtttaggcaattattattgggcaaaactgccattaaatgggctacatggccgtttaaacagtttaaatggacacggctgggcaccttgtagcatttaaatggtgtttgtactttgaacgggccaaacagctgtttagttgaagaatgaatagggtgcaatattgtgctctgaataaagggtaaaaggggtagcttcatttgtttctaccagatggaacgaaatagggacactttgatgcaacatgtttaactttagaatatcaaactgttcaagtccttgttctgcataggttgtggtttgtgcaagcttaaaaaaatatattgtcaacatctacaaaatcaaataaatgcaatatcaaaatagatagcatggtgtatcgaatgaatcttgcttgatattttagcatttttctacaaatttggtctaacctagaaaagtttgacttgggacaaagctacaacgacgaaacatgtaagttaggtttccagcactaaattaaatgaattctcaggttatattactgcatatgattttgtattgttactcccattcatggattgattattgataaaaagtagttggatttatcgatgctcataatcaaacccagtaccagtaacatggagctatctatgctttgcaatctgctgaaagatatttatgttctgtgtaatgcataaccaggccgagactccaatcacctccgagttccgtggtcaatacaaggtctactgcattggacattcataagaaggggaagaaaggtacaaagctgagcacgtcagctttggggttcaaggttcagagcacccgtatcatgatgggtgagatcgcgcatgttgacgagtagatgtccagactggtatatatatagttaagatctatatctatattatatgttgagctacgaaaggcgaccaattcgtgtactgatgcacatagcttacacttcgcatcatcgttttagcacagaatttttatcatggtaggcgagcttcctgaagaatgaagatgatgacagtttggcggctgaagtgacgagaattcaaattgagcaactggcaaaggttttggttttcagcaggcttggttgtaacttgaaaatcgtataatgtttgttgctgggcggattttgtgcgaagcattgagcctggaaggttcaagattcaggtctaatttgcagtatggaatattcgagtgcttgcttgtgaccgtttcctgaaacagtcatctggtgtatagtttcctggaatctgatgggatcgtttgtcattaaaataatttacgtgcatatcaacattaacatttgcccagaattgaaataaactaaccatgct

SEQ ID NO: 5490 - DNA, 4499 bp, Zea Mays
cacgtttcctcggctcctcgcccgcctctctcgtttattagcgctcgtaaaccccactcacttcttccttctcttcggccccttcctcggccgaaacctcagttgctcctccgcccgctcgaaaaccccaagtccccaatcacacatcgggccaccgccgcggcatccatggccgccgaagacaaagggaccggagaccgcgagaatgcagaccccaacctctgctccatcgccgacgcgtcgctgtctcacgagaacaccgaagacaaatcggatttggataccaagagcgcgccatctattcagttgcttcagccaaaaccgggggaaaacaaggagcctggttcacatgatatccactttaattctgcaaacacgacaggaaacagtgaagaagggaacaatactggaaagaaaagagatgttttcaggccttctgtgtttgatagaatatctggccaccgtgaccaatggtgcaatgaagacaccagactgaattcagattcccatcgaaatcaatggagggaaatggaaaaagaacatagtgatatgaacaaagtggaacagcactgtgatgaccccaagcaatatcttggtagccagcggagtcgaaaagagcgctgggttagtaacgaaagaaactatgaccaacaccatgagaataattggaattctcgctggggtgcaagtagtaaagattctcaaaattggcgtgaaaagtcaacagattcagatataaaagatgattactcctgtgaaaaagttttttcttacagtacatgccatgggaaagaaaaggatggtaccaatcatgagaaggttaatgaaagggacagtaatatttctcgatcgtggaactccagctattttgcaaaccgtggtgcaggcggtacatctgatcatctttttacggatccacagaagttatctgcttcatttggatacagtagctataggcaggaaagtgatagcccaaactctacaagttctcgcagaaggtttacatctgttacaagcagagtcaatagtcggtcttcacgaccattccatcttggtgtactttctgagaggcctgttggtccatctagtaactctgtgagatatagcaggataaagttgtttgaaatatatagaacaactgatgttagaaacttcacaatgccgataaatgatattggtaacaatgagatatcttcgttgtggcaagaagatcctatggatcctttagctctcattgcacctaatgctgaagaagcggtgattttgaaaggaattgaaaaaggagatatcacaaacagtttggcacaagcttgcaaagatggttctgatgacaaaaatattccaggcgtggcagcattagaacaaatgaaattaagtggaagagaagatcaaacaggaaacaatgaagaattcaatggtaaaatgaccattgatatcagaggaattcttggggctgctgatttgagggaacacttgaagtctgataaatctcctccaaaagaatctgagtctggtggtggtggtatccatgggccatgtgctgaatttggacatcagcgcaatgccttggaccaaggaactaaagttggtgatggtgaaaatgttaacccagaaaacctctctctgtactacaaggatccaaaagggtgcatccaaggtccttttcctggatatgacatcattggttggtttgaagctggatattttggtattgatttgctagttcgtgttgccagtgctccctgtgattctcctttcttattacttggggatgtcatgccacacttacgggcaaaggtaagggtgcctccaggcttcagcaataccaaaccaagaagtatgacagatgcctcacatctaggatcagtgtatcttggaacatctgattatggatccataaacaagaatggctgtgtaactgaagcagaaaattactttttggaggctccagtgtctagtaaaatccagaatcctagagcagcaactaatgttgttactggaggtatgaatgaatggaggtttgtttccggtgagaaagtgaatagtataaaccatcttgaagtacagaaggtgcagttagagacagaaaatacctttcaaatagaaggtgatgtcatatcagttggagagtcacaaaagaaagaatcagtacagtcaacttcacactcaacattcttcccgcaaatggttgacccatcgagtgaagccctccaacctcagaatattaacctgctctcaatgctgcttcctgcagaaaaaggacaagcaccgactgctacttctggattgtcacttcggtcaaataatgctgactctggaaatctgcatgctggtatgtgtggtatagatgttactcaagagatactaaatgtgcaccaaaatctgcataattctcagcaaataggtattgatgctcaacagcattacgttttaacacagaatcaaccaactttagcttgtttgaactctcaaatcacacagccagaaaagtttctcggtggaatatatcatgatcctcagttaaacatcaaccaacaacagtatctgctatcagagctacacttgcaacccctgattcctggagtccctgaacctcaatcctctctattgaacaacatgctacagctcaggcagcaggagcaacagcaacaatacatttctcagtccatacctcatgatcgttccatgcagcagctttatgattcttcccatgggacaatacatacttcattgtcatctggtgaccgtatgaagctttgtcttcaaagaacagaagagattcttgatcttgctctgaagttacctggtcatggtaagcataatctacaactacatgcaagtgtgaaattgagagacacaggaaatattggtttgtcggaaagttgcgctactgccctaccactgccccatgaaatgatgggtcatgcagcttggaaagaatgttctgctagtctcacacagggctctgcagttgttgatgctctttcacaaaaagaaagtattgtagactcaccatctaagaaaactccaagttatggttctaacgattatagcaagatgactgtttttgaagttacaggttttcctcaaccatttcaaggtcttcagaaaccgaaaagtgtagcatctcatatctcaaatgaagttcatgaaatggatatttcctctgtccatcctcattcatggaaacctactccaggtgttagggctaaatcagtgttggaaattcaagcagaggaacgattggaaactcagagggaaatagccctggaaaatacaaaggtaactacaacaacagcttccgggctatctattcattgggttgatttggttgaaacttctgggcaacagtttggagatcaggctagacctatgtgtgataaaaaaaatgacaatatatcacagagtaacagaagtcatttacatgatttatcggcaagagaggaactgataaagtcaaatgctaaagctggtgttatcataaacagtgctgatgatacatcttttcctcctctggcaccttctattactcagtctgatgctcatattcatgatggtgctgatttcattgagttcaagggcacaagaaagataagtaacagggggaagaaacccaaaggttctgcagttaaaaccccagcatcacatgcaaatgttatacctggaccagctactgatcctgcacaggtacgcgaaccatgttctctgagaaatattcaggtggaagaagaacaggaatcagctaatcttcagcaactagtaccagcatcatcccatgcaaaagggcctatggaccagcatattcatgggaacaattcatcctggcaaggttctgaatcacctccatcgaggggtaacgaattcctcaaaatgacttctcatgtttccagtcactccactcctaattcagaagagtatctgttttgggagcctcgtgagcatgcaaagcaagataagccgagactccaatcacctccgagttccgtggtcaatacaaggtctactgcattggacattcataagaaggggaagaaaggtacaaagctgagcacgtcagctttggggttcaaggttcagagcacccgtatcatgatgggtgagatcgcgcatgttgacgagtagatgtccagactgaatttttatcatggtaggcgagcttcctgaagaatgaagatgatgacagtttggcggctgaagtgacgagaattcaaattgagcaactggcaaaggttttggttttcagcaggcttggttgtaacttgaaaatcgtataatgtttgttgctgggcggattttgtgcgaagcattgagcctggaaggttcaagattcaggtctaatttgcagtatggaatattcgagtgcttgcttgtgaccgtttcctgaaacagtcatctggtgtatagtttcctggaatctgatgggatcgtttgtcattaaaataatttacgtgcatatcaacattaacatttgcccagaattgaaataaactaaccatgct

SEQ ID NO: 5491 - DNA, 4482 bp, Zea Mays
cacgtttcctcggctcctcgcccgcctctctcgtttattagcgctcgtaaaccccactcacttcttccttctcttcggccccttcctcggccgaaacctcagttgctcctccgcccgctcgaaaaccccaagtccccaatcacacatcgggccaccgccgcggcatccatggccgccgaagacaaagggaccggagaccgcgagaatgcagaccccaacctctgctccatcgccgacgcgtcgctgtctcacgagaacaccgaagacaaatcggatttggataccaagagcgcgccatctattcagttgcttcagccaaaaccgggggaaaacaaggagcctggttcacatgatatccactttaattctgcaaacacgacaggaaacagtgaagaagggaacaatactggaaagaaaagagatgttttcaggccttctgtgtttgatagaatatctggccaccgtgaccaatggtgcaatgaagacaccagactgaattcagattcccatcgaaatcaatggagggaaatggaaaaagaacatagtgatatgaacaaagtggaacagcactgtgatgaccccaagcaatatcttggtagccagcggagtcgaaaagagcgctgggttagtaacgaaagaaactatgaccaacaccatgagaataattggaattctcgctggggtgcaagtagtaaagattctcaaaattggcgtgaaaagtcaacagattcagatataaaagatgattactcctgtgaaaaagttttttcttacagtacatgccatgggaaagaaaaggatggtaccaatcatgagaaggttaatgaaagggacagtaatatttctcgatcgtggaactccagctattttgcaaaccgtggtgcaggcggtacatctgatcatctttttacggatccacagaagttatctgcttcatttggatacagtagctataggcaggaaagtgatagcccaaactctacaagttctcgcagaaggtttacatctgttacaagcagagtcaatagtcggtcttcacgaccattccatcttggtgtactttctgagaggcctgttggtccatctagtaactctgtgagatatagcaggataaagttgtttgaaatatatagaacaactgatgttagaaacttcacaatgccgataaatgatattggtaacaatgagatatcttcgttgtggcaagaagatcctatggatcctttagctctcattgcacctaatgctgaagaagcggtgattttgaaaggaattgaaaaaggagatatcacaaacagtttggcacaagcttgcaaagatggttctgatgacaaaaatattccaggcgtggcagcattagaacaaatgaaattaagtggaagagaagatcaaacaggaaacaatgaagaattcaatggtaaaatgaccattgatatcagaggaattcttggggctgctgatttgagggaacacttgaagtctgataaatctcctccaaaagaatctgagtctggtggtggtggtatccatgggccatgtgctgaatttggacatcagcgcaatgccttggaccaaggaactaaagttggtgatggtgaaaatgttaacccagaaaacctctctctgtactacaaggatccaaaagggtgcatccaaggtccttttcctggatatgacatcattggttggtttgaagctggatattttggtattgatttgctagttcgtgttgccagtgctccctgtgattctcctttcttattacttggggatgtcatgccacacttacgggcaaaggtaagggtgcctccaggcttcagcaataccaaaccaagaagtatgacagatgcctcacatctaggatcagtgtatcttggaacatctgattatggatccataaacaagaatggctgtgtaactgaagcagaaaattactttttggaggctccagtgtctagtaaaatccagaatcctagagcagcaactaatgttgttactggaggtatgaatgaatggaggtttgtttccggtgagaaagtgaatagtataaaccatcttgaagtacagaaggtgcagttagagacagaaaatacctttcaaatagaaggtgatgtcatatcagttggagagtcacaaaagaaagaatcagtacagtcaacttcacactcaacattcttcccgcaaatggttgacccatcgagtgaagccctccaacctcagaatattaacctgctctcaatgctgcttcctgcagaaaaaggacaagcaccgactgctacttctggattgtcacttcggtcaaataatgctgactctggaaatctgcatgctggtatgtgtggtatagatgttactcaagagatactaaatgtgcaccaaaatctgcataattctcagcaaataggtattgatgctcaacagcattacgttttaacacagaatcaaccaactttagcttgtttgaactctcaaatcacacagccagaaaagtttctcggtggaatatatcatgatcctcagttaaacatcaaccaacaacagtatctgctatcagagctacacttgcaacccctgattcctggagtccctgaacctcaatcctctctattgaacaacatgctacagctcaggcagcaggagcaacagcaacaatacatttctcagtccatacctcatgatcgttccatgcagcagctttatgattcttcccatgggacaatacatacttcattgtcatctggtgaccgtatgaagctttgtcttcaaagaacagaagagattcttgatcttgctctgaagttacctggtcatggtaagcataatctacaactacatgcaagtgtgaaattgagagacacaggaaatattggtttgtcggaaagttgcgctactgccctaccactgccccatgaaatgatgggtcatgcagcttggaaagaatgttctgctagtctcacacagggctctgcagttgttgatgctctttcacaaaaagaaagtattgtagactcaccatctaagaaaactccaagttatggttctaacgattatagcaagatgactgtttttgaagttacaggttttcctcaaccatttcaaggtcttcagaaaccgaaaagtgtagcatctcatatctcaaatgaagttcatgaaatggatatttcctctgtccatcctcattcatggaaacctactccaggtgttagggctaaatcagtgttggaaattcaagcagaggaacgattggaaactcagagggaaatagccctggaaaatacaaaggtaactacaacaacagcttccgggctatctattcattgggttgatttggttgaaacttctgggcaacagtttggagatcaggctagacctatgtgtgataaaaaaaatgacaatatatcacagagtaacagaagtcatttacatgatttatcggcaagagaggaactgataaagtcaaatgctaaagctggtgttatcataaacagtgctgatgatacatcttttcctcctctggcaccttctattactcagtctgatgctcatattcatgatggtgctgatttcattgagttcaagggcacaagaaagataagtaacagggggaagaaacccaaaggttctgcagttaaaaccccagcatcacatgcaaatgttatacctggaccagctactgatcctgcacaggtacgcgaaccatgttctctgagaaatattcaggtggaagaagaacaggaatcagctaatcttcagcaactagtaccagcatcatcccatgcaaaagggcctatggaccagcatattcatgggaacaattcatcctggcaaggttctgaatcacctccatcgaggggtaacgaattcctcaaaatgacttctcatgtttccagtcactccactcctaattcagaagagtatctgttttgggagcctcgtgagcatgcaaagcaagataagccgagactccaatcacctccgagttccgtggtcaatacaaggtctactgcattggacattcataagaaggggaagaaaggtacaaagctgagcacgtcagctttggggttcaaggttcagagcacccgtatcatgatgggtgagatcgcgcatgttgacgagtagatgtccagactggcgagcttcctgaagaatgaagatgatgacagtttggcggctgaagtgacgagaattcaaattgagcaactggcaaaggttttggttttcagcaggcttggttgtaacttgaaaatcgtataatgtttgttgctgggcggattttgtgcgaagcattgagcctggaaggttcaagattcaggtctaatttgcagtatggaatattcgagtgcttgcttgtgaccgtttcctgaaacagtcatctggtgtatagtttcctggaatctgatgggatcgtttgtcattaaaataatttacgtgcatatcaacattaacatttgcccagaattgaaataaactaaccatgct

SEQ ID NO: 5492 - DNA, 3539 bp, Zea Mays
cgtagagcataagcgggtgagtgaaactgcacgtttcggcgagcaactggcacgactgtgtcggcggttgacaagacgatgcgagggtggcgagcagggccgcacgcgagtagcggatggaggacgtgcgggcgtcgagcagggccacacgtgagcagcagatggggccatgcgggcggcgagcagagtcgcacgtgggcgtcgagcagggccgctcgcgggtggcggatgccgcggatggaggccccgcacgtgggtaacggatgggggctgcgcgggcggctgatgaaggccgcactgacggcgaacgagggcaagcacattggccgcgggaagtgtagaacggcggcaatcttcaagacaaagaagaggaattcttggggctgctgatttgagggaacacttgaagtctgataaatctcctccaaaagaatctgagtctggtggtggtggtatccatgggccatgtgctgaatttggacatcagcgcaatgccttggaccaaggaactaaagttggtgatggtgaaaatgttaacccagaaaacctctctctgtactacaaggatccaaaagggtgcatccaaggtccttttcctggatatgacatcattggttggtttgaagctggatattttggtattgatttgctagttcgtgttgccagtgctccctgtgattctcctttcttattacttggggatgtcatgccacacttacgggcaaaggtaagggtgcctccaggcttcagcaataccaaaccaagaagtatgacagatgcctcacatctaggatcagtgtatcttggaacatctgattatggatccataaacaagaatggctgtgtaactgaagcagaaaattactttttggaggctccagtgtctagtaaaatccagaatcctagagcagcaactaatgttgttactggaggtatgaatgaatggaggtttgtttccggtgagaaagtgaatagtataaaccatcttgaagtacagaaggtgcagttagagacagaaaatacctttcaaatagaaggtgatgtcatatcagttggagagtcacaaaagaaagaatcagtacagtcaacttcacactcaacattcttcccgcaaatggttgacccatcgagtgaagccctccaacctcagaatattaacctgctctcaatgctgcttcctgcagaaaaaggacaagcaccgactgctacttctggattgtcacttcggtcaaataatgctgactctggaaatctgcatgctggtatgtgtggtatagatgttactcaagagatactaaatgtgcaccaaaatctgcataattctcagcaaataggtattgatgctcaacagcattacgttttaacacagaatcaaccaactttagcttgtttgaactctcaaatcacacagccagaaaagtttctcggtggaatatatcatgatcctcagttaaacatcaaccaacaacagtatctgctatcagagctacacttgcaacccctgattcctggagtccctgaacctcaatcctctctattgaacaacatgctacagctcaggcagcaggagcaacagcaacaatacatttctcagtccatacctcatgatcgttccatgcagcagctttatgattcttcccatgggacaatacatacttcattgtcatctggtgaccgtatgaagctttgtcttcaaagaacagaagagattcttgatcttgctctgaagttacctggtcatggtaagcataatctacaactacatgcaagtgtgaaattgagagacacaggaaatattggtttgtcggaaagttgcgctactgccctaccactgccccatgaaatgatgggtcatgcagcttggaaagaatgttctgctagtctcacacagggctctgcagttgttgatgctctttcacaaaaagaaagtattgtagactcaccatctaagaaaactccaagttatggttctaacgattatagcaagatgactgtttttgaagttacaggttttcctcaaccatttcaaggtcttcagaaaccgaaaagtgtagcatctcatatctcaaatgaagttcatgaaatggatatttcctctgtccatcctcattcatggaaacctactccaggtgttagggctaaatcagtgttggaaattcaagcagaggaacgattggaaactcagagggaaatagccctggaaaatacaaaggtaactacaacaacagcttccgggctatctattcattgggttgatttggttgaaacttctgggcaacagtttggagatcaggctagacctatgtgtgataaaaaaaatgacaatatatcacagagtaacagaagtcatttacatgatttatcggcaagagaggaactgataaagtcaaatgctaaagctggtgttatcataaacagtgctgatgatacatcttttcctcctctggcaccttctattactcagtctgatgctcatattcatgatggtgctgatttcattgagttcaagggcacaagaaagataagtaacagggggaagaaacccaaaggttctgcagttaaaaccccagcatcacatgcaaatgttatacctggaccagctactgatcctgcacaggtacgcgaaccatgttctctgagaaatattcaggtggaagaagaacaggaatcagctaatcttcagcaactagtaccagcatcatcccatgcaaaagggcctatggaccagcatattcatgggaacaattcatcctggcaaggttctgaatcacctccatcgaggggtaacgaattcctcaaaatgacttctcatgtttccagtcactccactcctaattcagaagagtatctgttttgggagcctcgtgagcatgcaaagcaagataagccgagactccaatcacctccgagttccgtggtcaatacaaggtctactgcattggacattcataagaaggggaagaaaggtacaaagctgagcacgtcagctttggggttcaaggttcagagcacccgtatcatgatgggtgagatcgcgcatgttgacgagtagatgtccagactggtatatatatagttaagatctatatctatattatatgttgagctacgaaaggcgaccaattcgtgtactgatgcacatagcttacacttcgcatcatcgttttagcacagaatttttatcatggtaggcgagcttcctgaagaatgaagatgatgacagtttggcggctgaagtgacgagaattcaaattgagcaactggcaaaggttttggttttcagcaggcttggttgtaacttgaaaatcgtataatgtttgttgctgggcggattttgtgcgaagcattgagcctggaaggttcaagattcaggtctaatttgcagtatggaatattcgagtgcttgcttgtgaccgtttcctgaaacagtcatctggtgtatagtttcctggaatctgatgggatcgtttgtcattaaaataatttacgtgcatatcaacattaacatttgcccagaattgaaataaactaaccatgct

SEQ ID NO: 5493 - DNA, 1461 bp, Zea Mays
ctttcttcttcttcgccaagaagaccgacgaccccaacttccagccggtatagacccgtgaccgccttcctctccactcctctttcttgccgcgcaagaacgagcgccggttttatctaccgcggccgccgcctgcaggccagtccgttcacgttcctgcttttcccctgtcctgcggttttggcctttttgcccccggcttcctggcggcaacgaaacaaccagtcggttcggtcgatgcttcgcgagttggaattggacgccggccgacccgctgctcaatccgtcgagttcgacatggtacttgctagctctccttgcctgcgcccttctcgttcctatacgcttcggattttaccggactgctctgttctacgcgatccgaggcaggaaaccggcgtgttggattggattgcacttgcgcatgctcttcccggtagatgatctgactgtatctctctgcttccttggtcccctcgcagattgtagtcgttccttgactcacgatagccatgagccaatgatagattgtgttttttttgtgtgtggtttgttggatatagttaatgggaccattataagcatgggatcttacttgctgtttggctccaatgatacttactataacctggacccggaataattcacgcacacaatttctcaactgcatgaagatacacgcacacaatttgctcaactgtattaagatattgttcctagtgtctgaaagttgtacattagtagcagggtgtctgaaagttgtacactctgggaaggcagggctgaacaattgcagtttaagcgttaggggcttgatactctaatttcttcgcaggagtctgacactgcatgcctttgttaatcgacaggctactcccttggttgctgggttgtcagtggctgccgctgcattaagcggaagatacatgattagagcatggcaagccttccggacccaggcggcaatgccgcgggtgcgccgcttctaccctggtggattccagggggaaatgaatcgaagggaagctgcattgatcctcggcgtcagagaacgtgctacagtggacaagatcaaggaggctcacaggagggtcatggtagctaaccaccctgatgctggtggcagccattacgtcgcttccaagatcaacgaggcaaaggacatgctgatgggaaaagggaagtccgggtcttcgatcttttagctgacacaaagctcattctgctgtggcgtgatcaggctgtagctttttcaagggactgacagttgcacgtttcaaatttcttaacaatgctctgctgcttgtaccatatatcataaaggatacagatacagatacagaattgaatcaacttattatctgggtcttaagttattgtttggcctgattggaaatagtaaccatgtatatctcagagcccccaattcttgtctcgatgtctttacacctttgcttcttg

SEQ ID NO: 5494 - DNA, 639 bp, Zea Mays
ctttcttcttcttcgccaagaagaccgacgaccccaacttccagccggctactcccttggttgctgggttgtcagtggctgccgctgcattaagcggaagatacatgattagagcatggcaagccttccggacccaggcggcaatgccgcgggtgcgccgcttctaccctggtggattccagggggaaatgaatcgaagggaagctgcattgatcctcggcgtcagagaacgtgctacagtggacaagatcaaggaggctcacaggagggtcatggtagctaaccaccctgatgctggtggcagccattacgtcgcttccaagatcaacgaggcaaaggacatgctgatgggaaaagggaagtccgggtcttcgatcttttagctgacacaaagctcattctgctgtggcgtgatcaggctgtagctttttcaagggactgacagttgcacgtttcaaatttcttaacaatgctctgctgcttgtaccatatatcataaaggatacagatacagatacagaattgaatcaacttattatctgggtcttaagttattgtttggcctgattggaaatagtaaccatgtatatctcagagcccccaattcttgtctcgatgtctttacacctttgcttcttg

SEQ ID NO: 5495 - DNA, 663 bp, Zea Mays
ctctgttctacgcgatccgaggcaggaaaccggcgtgttggattggattgcacttgcgcatgctcttcccggctactcccttggttgctgggttgtcagtggctgccgctgcattaagcggaagatacatgattagagcatggcaagccttccggacccaggcggcaatgccgcgggtgcgccgcttctaccctggtggattccagggggaaatgaatcgaagggaagctgcattgatcctcggcgtcagagaacgtgctacagtggacaagatcaaggaggctcacaggagggtcatggtagctaaccaccctgatgctggtggcagccattacgtcgcttccaagatcaacgaggcaaaggacatgctgatgggaaaagggaagtccgggtcttcgatcttttagctgacacaaagctcattctgctgtggcgtgatcaggctgtagctttttcaagggactgacagttgcacgtttcaaatttcttaacaatgctctgctgcttgtaccatatatcataaaggatacagatacagatacagaattgaatcaacttattatctgggtcttaagttattgtttggcctgattggaaatagtaaccatgtatatctcagagcccccaattcttgtctcgatgtctttacacctttgcttcttg

SEQ ID NO: 5496 - DNA, 2227 bp, Zea Mays
aaaaaggaaaccaaaccggatgtgtggacgtgcctagaagcctctcggtgtgcctccagtttcttactacgacggcggccactctgccagcggcggcagcgacgacgctgctgcgtgcgcctccatcgagcccacgcgacgtttcctggacaataatagtgttgctgcatccgcctccatccatcccacgtttcctcgaggagatgatccttttttatatattcacagatgtagtgggcataaccaactaggatcatatatacataccattgcaagggacatctagctccacgttgatgtcacagacgcctaatgttgaccttggattaacaatatatattgtgggttcacatagaaatacaaacttagcatgaaaatatcgtaagcgagtgctaaatcaacatcgattagtttttagaggtaatgcctactatttatgttgatagtgatttatataggttcatgcatgctacttcattgctgattattttttgtcttctcattatttgtttgcaagctcccctttttatactgttaaggaataaaaaaaatggcaaaaggaaacacaagaaaccactgctcttttatgtgcacgctctccacgtaacattaggattcctatgcaatatggttatttctctgatgaacatattgcagcgctagaaggtatacaccataagatgtaagtggtttcccatgtttcagaaggaatactctatagttcacatcaacattactaaactaccaaaaatgcactatttgtaactcacctattatgtaatgcatgaccatgtatattttgtaatgatcatggtcatccatatcactctacatatgtatgtgtaatacagtatatgtatgactatatgttaatgttaagtatttaatttccacgcgtacgctggcgcacgccattgactagtattctttttgattctcttgtgttcctcatgaacgtgaatgatttcgcaatgcaacaaccatggtgtgtgctaccaagggagtgggagtgctaattttctcggatccatctttgtagactagtaatataatccacctcaattcgaaggtgaccttgattctcattgtctcatctcctatctcatcctatattttaaacttcattctgtaaacagtaccaaacaatataatatcatctacagttccgtgtcctcgtattttacattatcctccgaacattaaggactcattttccacaagccgcttcagtcccattagtaccattctctatcaatatctctatggctcttgctattatcaaaaatgaaacaaggcaagtgctaacttgggaatggattggtggtttactcacacagcctgattggatggttgtgcgtccatgcgtaggctggcgtcggcctgaccaaccaaatacgataattttgagcgtatgggtggatgcaggttaatagcatcaaaatatcttattttgcatccattcatacaggctgtgacttccatatacaagcaaccaaacataatctcaaataaagtcaacgcatacagtgattcaagataagatggcgcggataaccaatcagacggataatgcagcgtgcactttgcgatggacttgtgcccccctaaatgctcttctacatatagagatgacctcactttctttcatgattcccttgcgcacaaaccatttgtacttcagacccaccgtaactcttcctcgtggtgccatatctaccctacgtggaatagataaacagtctacagaaagaattagtcactccgttaattcttgtcctactatgttggggaccttcggcatccgaaggtcctcaaaaacaggatttaacagtatttctggagtataatgtgtgaacaggtatcttcggattcaagtcagcatcacagtagaccagagtaatacgaaggttgatgcagagccgaaggtgcgagcaggaaagcttcggcgcggtagcaacaagtgaaaccgacttaaagatgaaaaggctatttaaacctcgacagattactatagaattattatcaagtgtaaagggcatgaatgtaattttgtatgggttgtgtcccgtacctataaataggagaacagtacccccgtactgttcacgctgacttggcattcgctttttgcgtcacgcttgtactgtcatctccttccaattgaaggtacatttgtagctcaaagatatttatgtttatgtctgataataatatataattgtttatg

SEQ ID NO: 5497 - DNA, 2923 bp, Zea Mays
aaaaaggaaaccaaaccggatgtgtggacgtgcctagaagcctctcggtgtgcctccagtttcttactacgacggcggccactctgccagcggcggcagcgacgacgctgctgcgtgcgcctccatcgagcccacgcgacgtttcctggacaataatagtgttgctgcatccgcctccatccatcccacgtttcctcgaggtaaaaagagtctcaaactaaactctgattgctttccaccatgccgacattgcctttggttttgaatctctgcaatacgacctccacctacacttagcacacatgcttttgggtccctttttttacctccgcctacaccggaagtcatacatgtctttttatctcctctattataccacattgaaaaccctaactgtgcccaaaaaagacttgctagaccgctcctagccaaggtctcggctggctcaaccaaggtaaaaaaaaagaaaaacaattacttcgatctacaaagacaactcaattcagactcagaggctgctctgcttttggcaagctcgcaatatagatgtgtaattacccgattggcatagctgatggcgttgtgcataaaaatgttgcacaacctaagaacatttattgtataactgttgtagccttttgctacttccccaccttcaaccacacattcgtacacttctaatggtacataaaagatatgctcctccatcgatttgtgtttgtgtatgctaaatcatagctttttagaggttctcccctaaaaaaagagtttggggtgttatgttttcataaacgatgggagattcattctccactaaaaagatgattttaggggtgcaatattttcctaaaaaagtaagagttcttgctaacataccttatcttggtcttttgcaggagatgatccttttttatatattcacagatgtagtgggcataaccaactaggatcatatatacataccattgcaagggacatctagctccacgttgatgtcacagacgcctaatgttgaccttggattaacaatatatattgtgggttcacatagaaatacaaacttagcatgaaaatatcgtaagcgagtgctaaatcaacatcgattagtttttagaggtaatgcctactatttatgttgatagtgatttatataggttcatgcatgctacttcattgctgattattttttgtcttctcattatttgtttgcaagctcccctttttatactgttaaggaataaaaaaaatggcaaaaggaaacacaagaaaccactgctcttttatgtgcacgctctccacgtaacattaggattcctatgcaatatggttatttctctgatgaacatattgcagcgctagaaggtatacaccataagatgtaagtggtttcccatgtttcagaaggaatactctatagttcacatcaacattactaaactaccaaaaatgcactatttgtaactcacctattatgtaatgcatgaccatgtatattttgtaatgatcatggtcatccatatcactctacatatgtatgtgtaatacagtatatgtatgactatatgttaatgttaagtatttaatttccacgcgtacgctggcgcacgccattgactagtattctttttgattctcttgtgttcctcatgaacgtgaatgatttcgcaatgcaacaaccatggtgtgtgctaccaagggagtgggagtgctaattttctcggatccatctttgtagactagtaatataatccacctcaattcgaaggtgaccttgattctcattgtctcatctcctatctcatcctatattttaaacttcattctgtaaacagtaccaaacaatataatatcatctacagttccgtgtcctcgtattttacattatcctccgaacattaaggactcattttccacaagccgcttcagtcccattagtaccattctctatcaatatctctatggctcttgctattatcaaaaatgaaacaaggcaagtgctaacttgggaatggattggtggtttactcacacagcctgattggatggttgtgcgtccatgcgtaggctggcgtcggcctgaccaaccaaatacgataattttgagcgtatgggtggatgcaggttaatagcatcaaaatatcttattttgcatccattcatacaggctgtgacttccatatacaagcaaccaaacataatctcaaataaagtcaacgcatacagtgattcaagataagatggcgcggataaccaatcagacggataatgcagcgtgcactttgcgatggacttgtgcccccctaaatgctcttctacatatagagatgacctcactttctttcatgattcccttgcgcacaaaccatttgtacttcagacccaccgtaactcttcctcgtggtgccatatctaccctacgtggaatagataaacagtctacagaaagaattagtcactccgttaattcttgtcctactatgttggggaccttcggcatccgaaggtcctcaaaaacaggatttaacagtatttctggagtataatgtgtgaacaggtatcttcggattcaagtcagcatcacagtagaccagagtaatacgaaggttgatgcagagccgaaggtgcgagcaggaaagcttcggcgcggtagcaacaagtgaaaccgacttaaagatgaaaaggctatttaaacctcgacagattactatagaattattatcaagtgtaaagggcatgaatgtaattttgtatgggttgtgtcccgtacctataaataggagaacagtacccccgtactgttcacgctgacttggcattcgctttttgcgtcacgcttgtactgtcatctccttccaattgaaggtacatttgtagctcaaagatatttatgtttatgtctgataataatatataattgtttatg

SEQ ID NO: 5498 - DNA, 777 bp, Zea Mays
catagtcgttgaactcatatgtagagatgtcttgaactctgaacttgttggtcatcagatgaacgacgattacgtactgttagtactaaacaaaacgggaggaggagatgatcggtcatgcttggctccacgcacgccatccgcagtggagccaacgactagctagcagtgtatgcatgatgagttggcagccatgcgagtggcatacagggagccaggcatatcgatcccgcccctggccctttattagtttccgacgacgtacggtacggccggcgtgtgctagcgctgctggtgctgatatgatgcttccaaacacggagacggaccacatatcgcgcaatgccatgccatgcaatggtttttcattcctgaacttgcagctgcggcagggcgacctggaacaatgcaagaagctagctagtagctggctagctgtatatgtatgcagcactgcagcatatatagcaacaaaaggacattaataagcacagcacggtcgatcgacaaaagagaaggaagagaggatagatgattgcgttgatatgcttcatgacaattgcatgggatgagatgaaagctaagaacgatgactctgggcgctggtgtgcatgaggagcgagcgaggacgtagcagagagccgctatgactatgagagcggtcagtggagtcgaaggattctatgagcccggccacgtataaatagcctggctctcgttccagagtccaaacgcaagcgctctctctctccatcttgccctagctataccttgtcg

SEQ ID NO: 5499 - DNA, 2392 bp, Zea Mays
gtccacgttgtcgatcgattcatatagcgtcatcatttgtagtcaccaatcatccaacgctgatcccctcgattcgcggcgccctcgcctccaccactccccaaccacccgacgccgacccccctcaattcacgcccccacccgctgcatcggctccctccggcgccccgcctcctggcccagatccgtgcacccctcgccctctctagactcgatgattcacagatccgcccagctgcccaggcaccgactaccggcgtccggatctcctgctccactgctcgctgcctcggggctctctggcgttggctcagcgcggtgggccccccaatagcctagttccggatccccccaccacccacgccccacaggtcaagcaccggccaccgatgtctgacgaacgagcgaactccccgcggatgcaggaggaggaggtgtaggagcgaccaccgaccatccgcgtttcaccatccccttctccgatctcaagggtttgtccgctggtttgctaaggcaagcaacgtacatagactgctcgtcttggatccttcaggtttgtatagtgtgttgctttatgatcaattgaccattcattacctccgcctgatggcccttattaacaacagtaagaactaactaagaatgtgcgctaagattttgctatctgaagtggtaaatttgttaatcctaattttttgttgaatgggtatggggttttgtgggtggtggatggtgttgtgggatgagatccttttgaaagggaaatgtgcccttgggccatttctaaagtgttttggtgattaagtgcccaacacattttctctaagtgcaaatttgtgccaaagagtgaagaagtgaaaatcgtattacaaggtatgtttctagacttagtacatttgttattgtgtactaatgaagttacctaagtgctagaaacaggaaaagaaaggattggaaaagagtgtctgtgtgcagccaagactcagctcggcttggcacaccggactgtccggtggtgcaccggacagtgtctggtggtgcaccggacagtgttcggtgcgccaggccagctccggcgaactggccactctcgggaaaacttcggcaacatacggctataattcaccggactgtctggtggtgcaccggactgtccggtgagccaacggccctcagcgcaactgtcggccgtcaaatccgcgggtgacgcgtggctcgctccaacggtcggcagggggcaccggactgaccggtgtgcaccggacagtgtccggtgtgccaactgccacaagtctgcaacggtcggctgcgccagattaggaagggaatcgcgcatcggacatgaacagtggctgtccggtggcgcaccggactgtctggtgcgccacccaacagaaggcaagattagccttccaagaatgcctccaacgactcctagctaccttggggctataaaagggacccctaggtgcatggaggagacacaaaagcattcactaagcaattctaagtctccacactccgtctccacgcatttgattgatcgtgttagtgatttgagctctgttcttgttgtgaactctctatgcttcatttgagctcaagtcttggattgtgtgcgtgtgttgtgctgcggatttgtgtgtgttgctcccaaccttactcttgtgtttacattgtgatctttgttgtaagggcaagaggctccaacgtgtggagattccttgcaaacgggaaaagatataagcaaagaaaagccgtggtattcaagttgatcattggatcacttcaaaggggttgagtgcaaccctcgtccattgggacgccacaacgtggaggtaggcaagtgttatacttggccgaatcacgggataaaccactgtgtctcttgtgttatcttcctttgtgattattgtgattcgcaagagctcactctatagccacttggttcttttgagcactaacatctttataaccaagttttgtggctattagttgttgaattttacaggatcacctattcacccccctctaggtgctctcaattggtatcagagccgttctcttcacgtaagggactaatcgcccgaagagatggatcctaagggaaaggggatggtggtcaacgataaggagaaggagtccatcttcaacgagccaagagatgacaagcccactgactctggctcgagtcacaagaagaaggacgggaagaagaagaggcgcatcaagaagatcgtctactatgacaacgacgaatcttcttcttcaccaagagacaacgacgacgattcttcgtcgaagaaaagaacgggttaatcaaaactattcctttgattactctcgcatgcctttcaattctaatgcccatttactttcaattacacttggg

SEQ ID NO: 5500 - DNA, 3220 bp, Zea Mays
tagtcaccaatcatccaacgctgatcccctcgattcgcggcgccctcgcctccaccactccccaaccacccgacgccgacccccctcaattcacgcccccacccgctgcatcggctccctccggcgccccgcctcctggcccagatccgtgcacccctcgccctctctagactcgatgattcacagatccgcccagctgcccaggcaccgactaccggcgtccggatctcctgctccactgctcgctgcctcggggctctctggcgttggctcagcgcggtgggccccccaatagcctagttccggatccccccaccacccacgccccacaggtcaagcaccggccaccgatgtctgacgaacgagcgaactccccgcggatgcaggaggaggaggtgtaggagcgaccaccgaccatccgcgtttcaccatccccttctccgatctcaaggtaaccttctccggtgttgaaaccatcaggggtcgcggtcacctggtgagctggtgcccgcaagaggtggtgctaaggcacgaggcggtggccgtgttcctaacgcactacgggtggaactcgaccatggagagcctgtgcgccggggtgccgatgctgtgatggcccttcttcgcggagcagcagaccaacagccggtacacgtgcgtggagtggggcgtggccatggagatcggccaggacgttcggcgggaggcggtggaggagaagatccgagagatgatgggtggggagaagggaatggagatgcagcgcctcgcgggagagtggcagcagactagtctccgcacgacgcggctcggacggcgctcatacgccaacctcgacaagctggtcgccgacgtgctcctctcgggtggcggcaagagttctcaggagggtttcacttcgcacaccgacaccatccaatgattcagactgaacatggatggtagtacaccaaaagagatttgtgtgaatgtcgaggcaaacccgtaaatcatggagcatgtgatggaatggaaggaccgaaggagccagtagcggaagaagttacttctcgtagcaggcaaaaattggaatatgaaaacctggaagccaagagggttaatccctaattactatattttattccattagtttgtagaagttttggtccctgtattcaatgtaataacgacttacattattttagcctcacaattttctttaatggtctagctttgtaattgataacataattttttttggttgaactgtcataaatttatgacagtatccatatatagtatgtcaaaacttaacatttcctacactttttgttggcagggtttgtccgctggtttgctaaggcaagcaacgtacatagactgctcgtcttggatccttcaggtttgtatagtgtgttgctttatgatcaattgaccattcattacctccgcctgatggcccttattaacaacagtaagaactaactaagaatgtgcgctaagattttgctatctgaagtggtaaatttgttaatcctaattttttgttgaatgggtatggggttttgtgggtggtggatggtgttgtgggatgagatccttttgaaagggaaatgtgcccttgggccatttctaaagtgttttggtgattaagtgcccaacacattttctctaagtgcaaatttgtgccaaagagtgaagaagtgaaaatcgtattacaaggtatgtttctagacttagtacatttgttattgtgtactaatgaagttacctaagtgctagaaacaggaaaagaaaggattggaaaagagtgtctgtgtgcagccaagactcagctcggcttggcacaccggactgtccggtggtgcaccggacagtgtctggtggtgcaccggacagtgttcggtgcgccaggccagctccggcgaactggccactctcgggaaaacttcggcaacatacggctataattcaccggactgtctggtggtgcaccggactgtccggtgagccaacggccctcagcgcaactgtcggccgtcaaatccgcgggtgacgcgtggctcgctccaacggtcggcagggggcaccggactgaccggtgtgcaccggacagtgtccggtgtgccaactgccacaagtctgcaacggtcggctgcgccagattaggaagggaatcgcgcatcggacatgaacagtggctgtccggtggcgcaccggactgtctggtgcgccacccaacagaaggcaagattagccttccaagaatgcctccaacgactcctagctaccttggggctataaaagggacccctaggtgcatggaggagacacaaaagcattcactaagcaattctaagtctccacactccgtctccacgcatttgattgatcgtgttagtgatttgagctctgttcttgttgtgaactctctatgcttcatttgagctcaagtcttggattgtgtgcgtgtgttgtgctgcggatttgtgtgtgttgctcccaaccttactcttgtgtttacattgtgatctttgttgtaagggcaagaggctccaacgtgtggagattccttgcaaacgggaaaagatataagcaaagaaaagccgtggtattcaagttgatcattggatcacttcaaaggggttgagtgcaaccctcgtccattgggacgccacaacgtggaggtaggcaagtgttatacttggccgaatcacgggataaaccactgtgtctcttgtgttatcttcctttgtgattattgtgattcgcaagagctcactctatagccacttggttcttttgagcactaacatctttataaccaagttttgtggctattagttgttgaattttacaggatcacctattcacccccctctaggtgctctcaattggtatcagagccgttctcttcacgtaagggactaatcgcccgaagagatggatcctaagggaaaggggatggtggtcaacgataaggagaaggagtccatcttcaacgagccaagagatgacaagcccactgactctggctcgagtcacaagaagaaggacgggaagaagaagaggcgcatcaagaagatcgtctactatgacaacgacgaatcttcttcttcaccaagagacaacgacgacgattcttcgtcgaagaaaagaacgggttaatcaaaactattcctttgattactctcgcatgcctttcaattctaatgcccatttactttcaattacacttggg

SEQ ID NO: 5501 - DNA, 1161 bp, Zea Mays
ctcgcacctttgacccctctcccttctcctcgaggacgcgcgcccatcactcagccaccgccgccgccggagtgatggattcccgcggattcgattccgccggccgcatcttctccagcgccacagagatgtggacggaagagctcggttccagcatcacggcttccaccgcgggggaagctgaagccgccccggcccccgccgccgccgccgaagccagcgaggaagtgggcggagacggaaaacgcaaggagtggtactccaaggctatcgcctactggcaaggcgtggaggcgtcgaccgagggggtcctgggaggttatgggtgtgtgaacgacgcggatgtcaagggcagcgacgccttcctccgccctctcctcgcagatcgcttcggcaccgcgaagcgtcatctggttgcgcttgcacgggaaaatcttactggatgtatggaccaaggagaagactcgcacaaggctgccaacttttactgtgtgcctcttcaggacttcactcctgaggaaggaagatacgatgtgatttggattcagtggtgcatagggcaacttcctgatgatgatttcatttcattttttaatcgtgccaaggccgggctcaaacctgatggtttttttgttctgaaagagaacattgcaagaaatgggtttgtgttagataaggtggataacagtgtcactagatcagacgcatactttagggacctatttaaaaggagtggattatatatccttagtgttaaggaccaaaaggaactcccgaaggaactatttgctgtcaaaatgtatgcactggtgaccagtcaaccaaaaatccagaatagtggaaagagaagacggcctagaaattcacctcgtatgatccggtcttgaagaatgcccggtactaggtggccattgagctgctgggcctatttggtcatgtattgccactggattgtgctaaaagttgctgggacatcagtttttgcggtgattgttttgtttctatacattttatttctttacaagcacaaatttcttttgggtgagcacgttcacattattctgagatgaatatgctgaagttctgaattgggatgattgagatgtgttttcccgtcccatctcgtaacatgtctaaatataatgatcgtgagaaataaac

SEQ ID NO: 5502 - DNA, 1169 bp, Zea Mays
ccttccctaggattcttttgcagcttccattgtctccccggctatttaacccacccacccccgcttcgtctcccatgtcccaaagcaaagcaaaacaaagcttcaaagcatctctgctgggattttagcaagcggcaacgacgagcgacccaaaaaagcaatcaatagtcaccatatctgctcctctcgctccacacccccctactctgcgacttgaggcaggacaggaggcagagacgggcaatggggttcgtgctggtggtctctctgcccttcatcttcctctccatcctccttggcttcggctgctacttcctcggcaagcacatgggccgggaggagatgcggaccggtgtcggcgcgtagatatacggcacgccgctgccgccgcccggcgtcgtcggagcctcctcgccgccacctcagccgttccacaatgtctgaagttggggaaaaacgtctgaaggagcgttcgataggaagaaaaccaggtttctctcagaatgctgccaagttgcagaaccagaaatcaatggaggcgaccgagtagagcaacaatgggactatggaacaaactttggcaaagaaaaagaagaggacaaccgagagcaatctaggcctgcagacggttcgacattccttacacaacagtttagacggctgttgtagggacaataaagccagtaagccgctccacttttcctcgtttctccccgcaccccatcgcttccgtgctaaaaaatcgagaaggcaaagtccaagcagcctcccctgctccctctccatcaatccatcgtcaatgatcaaatgacaaagacagggtagaggcaagacacgggtaccctagtaagcctataaatggccttaaacttgttggctgtgtcgaggttgtcatagatgagtttcattgcagagatggatcatataagggaaaggaagggtgactcgattgaattgaactgagtttcatcagaagaagtgaggggggggggggggggggggacgtactgccgcgggtgatgcagcagaggccgaactcgaggatggtgcggcagaggtcgcaactcaggccggtctggtcgggcaaattgaatgtgacgacggtttcgtcgccctcggcgctgcccgacagcatggtgacgctgctcaccaagaaaactggcttgttt

SEQ ID NO: 5503 - DNA, 720 bp, Zea Mays
ccgcttcgtctcccatgtcccaaagcaaagcaaaacaaagcttcaaagcatctctgctgggattttagcaagcggcaacgacgagcgacccaaaaaagcaatcaatagtcaccatatctgctcctctcgctccacacccccctactctgcgacttgaggcaggacaggaggcagagacgggcaatggggttcgtgctggtggtctctctgcccttcatcttcctctccatcctccttggcttcggctgctacttcctcggcaagcacatgggccgggaggagatgcggaccggtgtcggcgcgtagatatacggcacgccgctgccgccgcccggcgtcgtcggagcctcctcgccgccacctcagccgttccacaatgtctgaagttggggaaaaacgtctgaaggagcgttcgataggaagaaaaccaggtttctctcagaatgctgccaagttgcagaaccagaaatcaatggaggcgaccgagtagagcaacaatgggactatggaacaaactttggcaaagaaaaagaagaggacaaccgagagcaatctaggcctgcagacggttcgacattccttacacaacagtttagacggctgttgtagggacaataaagccacttttgagttcccattctcgagctcagctgtctgcacaaaagaaatccactctgcatgtgggggggggtggattgccaggtgccagcgagggatgac

SEQ ID NO: 5504 - DNA, 1539 bp, Zea Mays
catgtcccaaagcaaagcaaaacaaagcttcaaagcatctctgctgggattttagcaagcggcaacgacgagcgacccaaaaaagcaatcaatagtcaccatatctgctcctctcgctccacacccccctactctgcgacttgaggcaggacaggaggcagagacgggcaatggggttcgtgctggtggtctctctgcccttcatcttcctctccatcctccttggcttcggctgctacttcctcggcaagcacatgggccgggaggagatgcggaccggtgtcggcgcgtagatatacggcacgccgctgccgccgcccggcgtcgtcggagcctcctcgccgccacctcagccgttccacagtaagaaacaatggtccgaggctgtgtgactcagattcagacgtctctccatccattctactagtactactacatatatgtcttggtggtgatgttggatttatattctttcttctttaattttgccctagctgtcttgagagtgtagattgagagtcaaatatgtgcttgtgtctaaagatggtgtgtgtgtgtgtgtgtggatgttgtgatacgattgcaatcacactttatatcttctgtaatcaagcaaaaaccaatgcgttgcagtagaatggcttgtgtgtgtgactcctgcaggctatttatgtgtttgaagattgcaactgagcatctccacaagatcttttataacatctataaattctttagattcaatttaggatatgtcatagcagatcatctaaaacttgtctctcgtatttcttgaaatgtgctgtcagatgtctgaagttggggaaaaacgtctgaaggagcgttcgataggaagaaaaccaggtttctctcagaatgctgccaagttgcagaaccagaaatcaatggaggcgaccgagtagagcaacaatgggactatggaacaaactttggcaaagaaaaagaagaggacaaccgagagcaatctaggcctgcagacggttcgacattccttacacaacagtttagacggctgttgtagggacaataaagccagtaagccgctccacttttcctcgtttctccccgcaccccatcgcttccgtgctaaaaaatcgagaaggcaaagtccaagcagcctcccctgctccctctccatcaatccatcgtcaatgatcaaatgacaaagacagggtagaggcaagacacgggtaccctagtaagcctataaatggccttaaacttgttggctgtgtcgaggttgtcatagatgagtttcattgcagagatggatcatataagggaaaggaagggtgactcgattgaattgaactgagtttcatcagaagaagtgaggggggggggggggggggggacgtactgccgcgggtgatgcagcagaggccgaactcgaggatggtgcggcagaggtcgcaactcaggccggtctggtcgggcaaattgaatgtgacgacggtttcgtcgccctcggcgctgcccgacagcatggtgacgctgctcaccaagaaaactggcttgttt

SEQ ID NO: 5505 - DNA, 1709 bp, Zea Mays
tataaaccttgtatttttgcttccagatttaacaaataaatatctcttgctttcggaagcttgaaggcctggccgaagtatactctccgttgtaatgtaaatgaggtggtcgtcaccagcccactcaatgtcagaagtaattcccttaagtagcagcaccttgaattcagaataaaacatggtttctccagactcccagttacagtttggaactatattctcactccacatgatacctccatcatcaacccgagcccgaacctgtattggtttgtccatcagttccacttggtgcaagctatctttcaggtgactgctaatagaattggttgatctatcagaattcaccagagttaggacctgctgtccttgggctgaagcccagaatctgattgccatgttactctcactgtctttgacagcggcaacttctatggctgagacattttcttcagtgctgtctttggtaggttccatatcatctgaattagtattgtcatcctcaactgccacggccatagcccacatctcctccccaatatgctttaacctggaatcaacgcttctctttggaggtaaaccttggggcttgtggaacagatgttcaaattttctaatcaaatcaatgatcaccttgggcacttcagacatcttgtcatcagttacaacctgaagttccaataattggttgactgcgtcccttctcagcaaggcctccaactgtaagttgttgatgctggaacaatactgaatttgtgacaaccctctcggtatataaatcctcttgctgtgatcgttaaattccatccacttctgggcccaatgcactgacatgggattgtgatcctctaaccaatctattccaaagatcaaattgtaccctccaagtgacagcatctgaaaatttgtatagaaagttacccctccacacatccacctgcaacttggcactatacagttattccacatctcgcccccatatgcaactcggacttggacagatttggccaatgtccgcaccccaggcatgttcttcatcacgtagctattcatgaagctgactggacttcgagaatcaaccaggactaatacttgttggcaatgaatggaaacccataaccaaatggtcttgtttcctttactgccactcacagcaaccattgggatagccaacagactctcatctccctgcctgtcagttaaatcagtaaactcttcgatgcattctctaggttcacctgccagttccttgacccaaacctcctctcccaggtgcagaggaacacagttagagcatttatatgtttgactccaacattcccaacacttaaaacacaaccccttggtacgtcgataggccttcaaggccgtgagtttgttctcctcaactctggcctgatttctagccatgcttcgacggtcttcagtcatattacccatccctcctgatacaggcagcaacaaaggactgggcgctgttcctggtttctgaggaagccttgtaccccctccaggccccacactttgtgaatctcggcgttcaaactgattcaccatatcctcctgtgacatagtgagagaacaagtagtatccaagtggggaaaatgttgaacaatatctgctgacttaatctcatccttaaagccatctacaaatctatgactccaccgctttggatttgatccaacaaaaataggggaactcatac

SEQ ID NO: 5506 - DNA, 609 bp, Zea Mays
cacgtacacagcgattacataaatgactcatcatagcacaatgcttcggataacaataaagaataagtaataatattaaagactagagtcatttacataatatgaatcaaagtacatagaatcaaaaggtagccaacgtaaattaacccaccacaggcagctgactgggggaggtcgctagcctaatactcgaactcgtcgaggtcctaaaactcctggagatctacctcgacgccttcttctttacctgagcatagattacaccaaaggcaacctggtgttttgtgaaagcaagggtgagtacacatcaacgtactcagcaaatgtcctgtttggctgaagtggactagctttatgtggggttaaggtcaaatcagttgcttttagttggtcaagtgtttattattagtggacgccaagttttagcaataaccaacccgtgaatcatttcctcatcgaggaacatcattatcgtcatcgaaccaaaataataaatagaaccattgtatctcagatcattgtatctctaatcaaagaggatcccaaggctgctcttatccgtgagtagggatggcagcgggtcgggttgtgttcgggtctgataatacc

SEQ ID NO: 5507 - DNA, 792 bp, Zea Mays
ctctaattaattagctaagggccccccatttgaccctcatggttgcactgttatcctgggtggtctctcaacgaacaggtccttacggagaggtactcgggaaacagcccgagtcccctaaatgccacaaatatatcatcatatccagaataaaatcatagtatcatcattgtatctcatcatgttcattgattaaagtaaagcgctagcatgtagctaaccatagtgacccaaaaggtaaatcaaggacaaggtaaatagaaagctagtaaatccttaggttgttcatagtatgcgggacagtgtattataaagtaaatgggacataatgggtcagaggacacttgccttcaccaaacagatgctcagggtcttcaatctcgtagaactcgaagaaccagatcacttggtcgccaactcttgatcttcgattcctcgaagtgcggaaacaaatcgcgatctaatcgcaacgcgaagcgaagacgaacaagcacaagcaaacaaacatagatctatgcataagaacattacaccatacaagataaagtgttataaaaacatgcaacataaaatagagttcggtcgaagctacagtcgagagttatcgcgtttacgttaaacaaatataacatttaattcgacattaacaaatataaatgttatacatcagtcagttcgattaatcttctacactaacaaatgtcagttaattaaataatttaattaaaacaagagattctaagcgagatgaatttatgacgcgtgaaacagcacgatagcgtgcaaacgacg

SEQ ID NO: 5508 - DNA, 896 bp, Zea Mays
aaaaaagaggaagcaaagagaaattattaaggctacaagagctatgaatgctatgatacgatgaagatgtcgacaagcctacaataaacacacctcaaaaagaaaaattaagttgaagaatctcatgattgactacttattcactgcagtctgtcatgtagcagcacgtaccatcagatctaagaatgaaccaagcgaatgggatcacccgtatcaagatgagaacttaaattcagattggataggagctccgaacgcgagccatagacggggagttgatgccaccgggcaatggatggtcgcatcctcaggacctccgcgtgcaacagcagcggctatcatttttctcatcgcctacttcaatagcctacagcattagcagtaccgtgctttttacttcacaagaaaaggttggccgaggtccctgctctagcgcaaggatttctactgcaacgattgcaacacacacaggaacttttttgaaaccttcaagcttcaacgcttgaccctttgcattggtggcatagtgaatattgaactactggagagaatacaaaaacaatttacggatgataggtactacatatggcagatgaggcaactggccatggcatatatgttgcttcgacctgtgcagtttatggatgaagacgaagctgacctgcagatgtaaactttgttttctatggaccaggtcttgtatatccaaattgaacggattgttctaataaatatatcacaaaaagataaagtataatatttgttcttgtgcgttgttgcaatgaattttagtgagaatagagacaagtggtgttgtgtaatggcacttgtaaagagagacagtacacctagggttggtccattgatgatgaacctctgtgcaaactttgtcaagg

SEQ ID NO: 5509 - DNA, 794 bp, Zea Mays
cgccctcccccatgcgcgaaacaatcctccgcctccgtcgcctattcgcctctcccactctctgcccccgcctcccctccttctctccctcccccgcatgcctcaactgctcctctccggcgtcgtagccgtccctctcgctcccgtgacatccagatctgacttgggggcgcagctcagagtgccaatgcgccgcaacctccgttgcgcccgcacgtgccctagccagtcgccatggagctcatccccatcaagcccgagattggataggagctccgaacgcgagccatagacggggagttgatgccaccgggcaatggatggtcgcatcctcaggacctccgcgtgcaacagcagcggctatcatttttctcatcgcctacttcaatagcctacagcattagcagtaccgtgctttttacttcacaagaaaaggttggccgaggtccctgctctagcgcaaggatttctactgcaacgattgcaacacacacaggaacttttttgaaaccttcaagcttcaacgcttgaccctttgcattggtggcatagtgaatattgaactactggagagaatacaaaaacaatttacggatgataggtactacatatggcagatgaggcaactggccatggcatatatgttgcttcgacctgtgcagtttatggatgaagacgaagctgacctgcagataatagagacaagtggtgttgtgtaatggcacttgtaaagagagacagtacacctagggttggtccattgatgatgaacctctgtgcaaactttgtcaagg

SEQ ID NO: 5510 - DNA, 921 bp, Zea Mays
cgccctcccccatgcgcgaaacaatcctccgcctccgtcgcctattcgcctctcccactctctgcccccgcctcccctccttctctccctcccccgcatgcctcaactgctcctctccggcgtcgtagccgtccctctcgctcccgtgacatccagatctgacttgggggcgcagctcagagtgccaatgcgccgcaacctccgttgcgcccgcacgtgccctagccagtcgccatggagctcatccccatcaagcccgagattggataggagctccgaacgcgagccatagacggggagttgatgccaccgggcaatggatggtcgcatcctcaggacctccgcgtgcaacagcagcggctatcatttttctcatcgcctacttcaatagcctacagcattagcagtaccgtgctttttacttcacaagaaaaggttggccgaggtccctgctctagcgcaaggatttctactgcaacgattgcaacacacacaggaacttttttgaaaccttcaagcttcaacgcttgaccctttgcattggtggcatagtgaatattgaactactggagagaatacaaaaacaatttacggatgataggtactacatatggcagatgaggcaactggccatggcatatatgttgcttcgacctgtgcagtttatggatgaagacgaagctgacctgcagatgtaaactttgttttctatggaccaggtcttgtatatccaaattgaacggattgttctaataaatatatcacaaaaagataaagtataatatttgttcttgtgcgttgttgcaatgaattttagtgagaatagagacaagtggtgttgtgtaatggcacttgtaaagagagacagtacacctagggttggtccattgatgatgaacctctgtgcaaactttgtcaagg

SEQ ID NO: 5511 - DNA, 1742 bp, Zea Mays
cgccctcccccatgcgcgaaacaatcctccgcctccgtcgcctattcgcctctcccactctctgcccccgcctcccctccttctctccctcccccgcatgcctcaactgctcctctccggcgtcgtagccgtccctctcgctcccgtgacatccagatctgacttgggggcgcagctcagagtgccaatgcgccgcaacctccgttgcgcccgcacgtgccctagccagtcgccatggagctcatccccatcaagcccgagattggataggagctccgaacgcgagccatagacggggagttgatgccaccgggcaatggatggtcgcatcctcaggacctccgcgtgcaacagcagcggtaagaactcgtccccttcctctccggtggcagtctcacgatcttcctctgccgccattgaactttaaaaatgagaaccaaaagcacacggtttctggcctccctattaggggattccacggagggactcctctcaggaaaaaaccaagtggtatgtgccttgcttgcatttcattttgtcccattttcaaaattgaaatgaacaaactgagctttttgtcatctaaaatttgtcttgtcttgtttttttcactaaaatttagacgcggtttggtgctcagctctgaagctttttgtcatcaataatatcttcctcgccctcgcaatatgttctggtctagattgtggccattccttgcagcaaactaagactaattactttttccttctttacacgtgacctttcaagaacacttaaatctgttttggacacttaaatcagttgtgtggttacctaactgctactgttcttactttgattttttggttgctcatggagtcatggtgcatatgctcatgttttcaggctatcatttttctcatcgcctacttcaatagcctacagcattagcagtaccgtgctttttacttcacaagaaaaggttggccgaggtccctgctctagcgcaaggatttctactgcaacgattgcaacacacacaggaacttttttgaaaccttcaagcttcaacgcttgaccctttgcattggtggcatagtgaatattgaactactggagagaatacaaaaacaatttacggatgataggtactacatatggcagatgaggcaactggccatggcatatatgttgcttcgacctgtgcagtttatggatgaagacgaagctgacctgcagatgtaaactttgttttctatggaccaggtcttgtatatccaaattgaacggattgttctaataaatatatcacaaaaagataaagtataatatttgttcttgtgcgttgttgcaatgaattttagtgagaatagagacaagtggtgttgtgtaatggcacttgtaaagagagacagtacacctagggttggtccattgatgatgaacctctgtgcaaactttgtcaaggactttgcaatggaaggcttgcagagtcaacataatattttgaagatctattatgtggtctagcttgtttctaggaatacagattaagaaccagtggtagagccctacggcagttgagtcttctttttgttactcacataagtcaacattttttgttgtttccattgaatagttaggactattttcagttattcaaaatcaaagaaagttgcaagttaattcatatatatgtaataaagtttcttggtaattatctataggcactttcaaatagaacgtgccaagtgctcacaatg

SEQ ID NO: 5512 - DNA, 1048 bp, Zea Mays
ctcccccatgcgcgaaacaatcctccgcctccgtcgcctattcgcctctcccactctctgcccccgcctcccctccttctctccctcccccgcatgcctcaactgctcctctccggcgtcgtagccgtccctctcgctcccgtgacatccagatctgacttgggggcgcagctcagagtgccaatgcgccgcaacctccgttgcgcccgcacgtgccctagccagtcgccatggagctcatccccatcaagcccgagattggataggagctccgaacgcgagccatagacggggagttgatgccaccgggcaatggatggtcgcatcctcaggacctccgcgtgcaacagcagcggtaagaactcgtccccttcctctccggtggcagtctcacgatcttcctctgccgccattgaactttaaaaatgagaaccaaaagcacacggtttctggcctccctattaggggattccacggagggactcctctcaggaaaaaaccaagtggctatcatttttctcatcgcctacttcaatagcctacagcattagcagtaccgtgctttttacttcacaagaaaaggttggccgaggtccctgctctagcgcaaggatttctactgcaacgattgcaacacacacagatattagcattcttgcaccatagacgcgagcctgtaaacaatattatagaatgggataagatgaccaacaacctttccactgtcatcattaggcatcgagcactcaggaacttttttgaaaccttcaagcttcaacgcttgaccctttgcattggtggcatagtgaatattgaactactggagagaatacaaaaacaatttacggatgataggtactacatatggcagatgaggcaactggccatggcatatatgttgcttcgacctgtgcagtttatggatgaagacgaagctgacctgcagataatagagacaagtggtgttgtgtaatggcacttgtaaagagagacagtacacctagggttggtccattgatgatgaacctctgtgcaaactttgtcaagg

SEQ ID NO: 5513 - DNA, 819 bp, Zea Mays
ctcccccatgcgcgaaacaatcctccgcctccgtcgcctattcgcctctcccactctctgcccccgcctcccctccttctctccctcccccgcatgcctcaactgctcctctccggcgtcgtagccgtccctctcgctcccgtgacatccagatctgacttgggggcgcagctcagagtgccaatgcgccgcaacctccgttgcgcccgcacgtgccctagccagtcgccatggagctcatccccatcaagcccgagattggataggagctccgaacgcgagccatagacggggagttgatgccaccgggcaatggatggtcgcatcctcaggacctccgcgtgcaacagcagcggggattccacggagggactcctctcaggaaaaaaccaagtggctatcatttttctcatcgcctacttcaatagcctacagcattagcagtaccgtgctttttacttcacaagaaaaggttggccgaggtccctgctctagcgcaaggatttctactgcaacgattgcaacacacacaggaacttttttgaaaccttcaagcttcaacgcttgaccctttgcattggtggcatagtgaatattgaactactggagagaatacaaaaacaatttacggatgataggcagatgaggcaactggccatggcatatatgttgcttcgacctgtgcagtttatggatgaagacgaagctgacctgcagataatagagacaagtggtgttgtgtaatggcacttgtaaagagagacagtacacctagggttggtccattgatgatgaacctctgtgcaaactttgtcaagg

SEQ ID NO: 5514 - DNA, 831 bp, Zea Mays
cccccatgcgcgaaacaatcctccgcctccgtcgcctattcgcctctcccactctctgcccccgcctcccctccttctctccctcccccgcatgcctcaactgctcctctccggcgtcgtagccgtccctctcgctcccgtgacatccagatctgacttgggggcgcagctcagagtgccaatgcgccgcaacctccgttgcgcccgcacgtgccctagccagtcgccatggagctcatccccatcaagcccgaggtaggatctctcgtcgagattggataggagctccgaacgcgagccatagacggggagttgatgccaccgggcaatggatggtcgcatcctcaggacctccgcgtgcaacagcagcggctatcatttttctcatcgcctacttcaatagcctacagcattagcagtaccgtgctttttacttcacaagaaaaggttggccgaggtccctgctctagcgcaaggatttctactgcaacgattgcaacacacacaggaacttttttgaaaccttcaagcttcaacgcttgaccctttgcattggtggcatagtgaatattgaactactggagagaatacaaaaacaatttacggatgataggtactacatatggcagatgaggcaactggccatggcatatatgttgcttcgacctgtgcagtttatggatgaagacgaagctgacctgcagatgtaaactttgttttctatggaccagaatagagacaagtggtgttgtgtaatggcacttgtaaagagagacagtacacctagggttggtccattgatgatgaacctctgtgcaaactttgtcaagg

SEQ ID NO: 5515 - DNA, 1289 bp, Zea Mays
cccccatgcgcgaaacaatcctccgcctccgtcgcctattcgcctctcccactctctgcccccgcctcccctccttctctccctcccccgcatgcctcaactgctcctctccggcgtcgtagccgtccctctcgctcccgtgacatccagatctgacttgggggcgcagctcagagtgccaatgcgccgcaacctccgttgcgcccgcacgtgccctagccagtcgccatggagctcatccccatcaagcccgaggtaggatctctcgtcgagattggataggagctccgaacgcgagccatagacggggagttgatgccaccgggcaatggatggtcgcatcctcaggacctccgcgtgcaacagcagcggtaagaactcgtccccttcctctccggtggcagtctcacgatcttcctctgccgccattgaactttaaaaatgagaaccaaaagcacacggtttctggcctccctattaggggattccacggagggactcctctcaggaaaaaaccaagtggctatcatttttctcatcgcctacttcaatagcctacagcattagcagtaccgtgctttttacttcacaagaaaaggttggccgaggtccctgctctagcgcaaggatttctactgcaacgattgcaacacacacagatattagcattcttgcaccatagacgcgagcctgtaaacaatattatagaatgggataagatgaccaacaacctttccactgtcatcattaggcatcgagcactcaggaacttttttgaaaccttcaagcttcaacgcttgaccctttgcattggtggcatagtgaatattgaactactggagagaatacaaaaacaatttacggatgataggtactacatatggcagatgaggcaactggccatggcatatatgttgcttcgacctgtgcagtttatggatgaagacgaagctgacctgcagatgtaaactttgttttctatggaccaggtcttgtatatccaaattgaacggattgttctaataaatatatcacaaaaagataaagtataatatttgttcttgtgcgttgttgcaatgaattttagtgaggtaatacgaacttatatccatttttcaaatatattctaggttctaaccaactggtccaaaatgtcacattgattgatatgtggatttttatacttcagaatagagacaagtggtgttgtgtaatggcacttgtaaagagagacagtacacctagggttggtccattgatgatgaacctctgtgcaaactttgtcaagg

SEQ ID NO: 5516 - DNA, 1018 bp, Zea Mays
cccccatgcgcgaaacaatcctccgcctccgtcgcctattcgcctctcccactctctgcccccgcctcccctccttctctccctcccccgcatgcctcaactgctcctctccggcgtcgtagccgtccctctcgctcccgtgacatccagatctgacttgggggcgcagctcagagtgccaatgcgccgcaacctccgttgcgcccgcacgtgccctagccagtcgccatggagctcatccccatcaagcccgagtctagattggataggagctccgaacgcgagccatagacggggagttgatgccaccgggcaatggatggtcgcatcctcaggacctccgcgtgcaacagcagcggctatcatttttctcatcgcctacttcaatagcctacagcattagcagtaccgtgctttttacttcacaagaaaaggttggccgaggtccctgctctagcgcaaggatttctactgcaacgattgcaacacacacaggaacttttttgaaaccttcaagcttcaacgcttgaccctttgcattggtggcatagtgaatattgaactactggagagaatacaaaaacaatttacggatgataggtactacatatggcagatgaggcaactggccatggcatatatgttgcttcgacctgtgcagtttatggatgaagacgaagctgacctgcagatgtaaactttgttttctatggaccaggtcttgtatatccaaattgaacggattgttctaataaatatatcacaaaaagataaagtataatatttgttcttgtgcgttgttgcaatgaattttagtgaggtaatacgaacttatatccatttttcaaatatattctaggttctaaccaactggtccaaaatgtcacattgattgatatgtggatttttatacttcagaatagagacaagtggtgttgtgtaatggcacttgtaaagagagacagtacacctagggttggtccattgatgatgaacctctgtgcaaactttgtcaagg

SEQ ID NO: 5517 - DNA, 1646 bp, Zea Mays
cccccatgcgcgaaacaatcctccgcctccgtcgcctattcgcctctcccactctctgcccccgcctcccctccttctctccctcccccgcatgcctcaactgctcctctccggcgtcgtagccgtccctctcgctcccgtgacatccagatctgacttgggggcgcagctcagagtgccaatgcgccgcaacctccgttgcgcccgcacgtgccctagccagtcgccatggagctcatccccatcaagcccgagattggataggagctccgaacgcgagccatagacggggagttgatgccaccgggcaatggatggtcgcatcctcaggacctccgcgtgcaacagcagcggtaagaactcgtccccttcctctccggtggcagtctcacgatcttcctctgccgccattgaactttaaaaatgagaaccaaaagcacacggtttctggcctccctattaggggattccacggagggactcctctcaggaaaaaaccaagtggtatgtgccttgcttgcatttcattttgtcccattttcaaaattgaaatgaacaaactgagctttttgtcatctaaaatttgtcttgtcttgtttttttcactaaaatttagacgcggtttggtgctcagctctgaagctttttgtcatcaataatatcttcctcgccctcgcaatatgttctggtctagattgtggccattccttgcagcaaactaagactaattactttttccttctttacacgtgacctttcaagaacacttaaatctgttttggacacttaaatcagttgtgtggttacctaactgctactgttcttactttgattttttggttgctcatggagtcatggtgcatatgctcatgttttcaggctatcatttttctcatcgcctacttcaatagcctacagcattagcagtaccgtgctttttacttcacaagaaaaggttggccgaggtccctgctctagcgcaaggatttctactgcaacgattgcaacacacacagatattagcattcttgcaccatagacgcgagcctgtaaacaatattatagaatgggataagatgaccaacaacctttccactgtcatcattaggcatcgagcactcaggaacttttttgaaaccttcaagcttcaacgcttgaccctttgcattggtggcatagtgaatattgaactactggagagaatacaaaaacaatttacggatgataggtactacatatggcagatgaggcaactggccatggcatatatgttgcttcgacctgtgcagtttatggatgaagacgaagctgacctgcagatgtaaactttgttttctatggaccaggtcttgtatatccaaattgaacggattgttctaataaatatatcacaaaaagataaagtataatatttgttcttgtgcgttgttgcaatgaattttagtgaggtaatacgaacttatatccatttttcaaatatattctaggttctaaccaactggtccaaaatgtcacattgattgatatgtggatttttatacttcagaatagagacaagtggtgttgtgtaatggcacttgtaaagagagacagtacacctagggttggtccattgatgatgaacctctgtgcaaactttgtcaagg

SEQ ID NO: 5518 - DNA, 808 bp, Zea Mays
cccccatgcgcgaaacaatcctccgcctccgtcgcctattcgcctctcccactctctgcccccgcctcccctccttctctccctcccccgcatgcctcaactgctcctctccggcgtcgtagccgtccctctcgctcccgtgacatccagatctgacttgggggcgcagctcagagtgccaatgcgccgcaacctccgttgcgcccgcacgtgccctagccagtcgccatggagctcatccccatcaagcccgagattggataggagctccgaacgcgagccatagacggggagttgatgccaccgggcaatggatggtcgcatcctcaggacctccgcgtgcaacagcagcgtaccgtgctttttacttcacaagaaaaggttggccgaggtccctgctctagcgcaaggatttctactgcaacgattgcaacacacacagatattagcattcttgcaccatagacgcgagcctgtaaacaatattatagaatgggataagatgaccaacaacctttccactgtcatcattaggcatcgagcactcaggaacttttttgaaaccttcaagcttcaacgcttgaccctttgcattggtggcatagtgaatattgaactactggagagaatacaaaaacaatttacggatgataggtactacatatggcagatgaggcaactggccatggcatatatgttgcttcgacctgtgcagtttatggatgaagacgaagctgacctgcagatgtaaactttgttttctatggaccaggcactttcaaatagaacgtgccaagtgctcacaatg

SEQ ID NO: 5519 - DNA, 1754 bp, Zea Mays
cccccatgcgcgaaacaatcctccgcctccgtcgcctattcgcctctcccactctctgcccccgcctcccctccttctctccctcccccgcatgcctcaactgctcctctccggcgtcgtagccgtccctctcgctcccgtgacatccagatctgacttgggggcgcagctcagagtgccaatgcgccgcaacctccgttgcgcccgcacgtgccctagccagtcgccatggagctcatccccatcaagcccgaggtaggatctctcgtcgagattggataggagctccgaacgcgagccatagacggggagttgatgccaccgggcaatggatggtcgcatcctcaggacctccgcgtgcaacagcagcggtaagaactcgtccccttcctctccggtggcagtctcacgatcttcctctgccgccattgaactttaaaaatgagaaccaaaagcacacggtttctggcctccctattaggggattccacggagggactcctctcaggaaaaaaccaagtggtatgtgccttgcttgcatttcattttgtcccattttcaaaattgaaatgaacaaactgagctttttgtcatctaaaatttgtcttgtcttgtttttttcactaaaatttagacgcggtttggtgctcagctctgaagctttttgtcatcaataatatcttcctcgccctcgcaatatgttctggtctagattgtggccattccttgcagcaaactaagactaattactttttccttctttacacgtgacctttcaagaacacttaaatctgttttggacacttaaatcagttgtgtggttacctaactgctactgttcttactttgattttttggttgctcatggagtcatggtgcatatgctcatgttttcaggctatcatttttctcatcgcctacttcaatagcctacagcattagcagtaccgtgctttttacttcacaagaaaaggttggccgaggtccctgctctagcgcaaggatttctactgcaacgattgcaacacacacaggaacttttttgaaaccttcaagcttcaacgcttgaccctttgcattggtggcatagtgaatattgaactactggagagaatacaaaaacaatttacggatgataggtactacatatggcagatgaggcaactggccatggcatatatgttgcttcgacctgtgcagtttatggatgaagacgaagctgacctgcagatgtaaactttgttttctatggaccaggtcttgtatatccaaattgaacggattgttctaataaatatatcacaaaaagataaagtataatatttgttcttgtgcgttgttgcaatgaattttagtgagaatagagacaagtggtgttgtgtaatggcacttgtaaagagagacagtacacctagggttggtccattgatgatgaacctctgtgcaaactttgtcaaggactttgcaatggaaggcttgcagagtcaacataatattttgaagatctattatgtggtctagcttgtttctaggaatacagattaagaaccagtggtagagccctacggcagttgagtcttctttttgttactcacataagtcaacattttttgttgtttccattgaatagttaggactattttcagttattcaaaatcaaagaaagttgcaagttaattcatatatatgtaataaagtttcttggtaattatctataggcactttcaaatagaacgtgccaagtgctcacaatg

SEQ ID NO: 5520 - DNA, 1627 bp, Zea Mays
cccccatgcgcgaaacaatcctccgcctccgtcgcctattcgcctctcccactctctgcccccgcctcccctccttctctccctcccccgcatgcctcaactgctcctctccggcgtcgtagccgtccctctcgctcccgtgacatccagatctgacttgggggcgcagctcagagtgccaatgcgccgcaacctccgttgcgcccgcacgtgccctagccagtcgccatggagctcatccccatcaagcccgaggtaggatctctcgtcgagattggataggagctccgaacgcgagccatagacggggagttgatgccaccgggcaatggatggtcgcatcctcaggacctccgcgtgcaacagcagcggtaagaactcgtccccttcctctccggtggcagtctcacgatcttcctctgccgccattgaactttaaaaatgagaaccaaaagcacacggtttctggcctccctattaggggattccacggagggactcctctcaggaaaaaaccaagtggtatgtgccttgcttgcatttcattttgtcccattttcaaaattgaaatgaacaaactgagctttttgtcatctaaaatttgtcttgtcttgtttttttcactaaaatttagacgcggtttggtgctcagctctgaagctttttgtcatcaataatatcttcctcgccctcgcaatatgttctggtctagattgtggccattccttgcagcaaactaagactaattactttttccttctttacacgtgacctttcaagaacacttaaatctgttttggacacttaaatcagttgtgtggttacctaactgctactgttcttactttgattttttggttgctcatggagtcatggtgcatatgctcatgttttcaggctatcatttttctcatcgcctacttcaatagcctacagcattagcagtaccgtgctttttacttcacaagaaaaggttggccgaggtccctgctctagcgcaaggatttctactgcaacgattgcaacacacacaggaacttttttgaaaccttcaagcttcaacgcttgaccctttgcattggtggcatagtgaatattgaactactggagagaatacaaaaacaatttacggatgataggtactacatatggcagatgaggcaactggccatggcatatatgttgcttcgacctgtgcagtttatggatgaagacgaagctgacctgcagataatagagacaagtggtgttgtgtaatggcacttgtaaagagagacagtacacctagggttggtccattgatgatgaacctctgtgcaaactttgtcaaggactttgcaatggaaggcttgcagagtcaacataatattttgaagatctattatgtggtctagcttgtttctaggaatacagattaagaaccagtggtagagccctacggcagttgagtcttctttttgttactcacataagtcaacattttttgttgtttccattgaatagttaggactattttcagttattcaaaatcaaagaaagttgcaagttaattcatatatatgtaataaagtttcttggtaattatctataggcactttcaaatagaacgtgccaagtgctcacaatg

SEQ ID NO: 5521 - DNA, 1609 bp, Zea Mays
cccccatgcgcgaaacaatcctccgcctccgtcgcctattcgcctctcccactctctgcccccgcctcccctccttctctccctcccccgcatgcctcaactgctcctctccggcgtcgtagccgtccctctcgctcccgtgacatccagatctgacttgggggcgcagctcagagtgccaatgcgccgcaacctccgttgcgcccgcacgtgccctagccagtcgccatggagctcatccccatcaagcccgagattggataggagctccgaacgcgagccatagacggggagttgatgccaccgggcaatggatggtcgcatcctcaggacctccgcgtgcaacagcagcggtaagaactcgtccccttcctctccggtggcagtctcacgatcttcctctgccgccattgaactttaaaaatgagaaccaaaagcacacggtttctggcctccctattaggggattccacggagggactcctctcaggaaaaaaccaagtggtatgtgccttgcttgcatttcattttgtcccattttcaaaattgaaatgaacaaactgagctttttgtcatctaaaatttgtcttgtcttgtttttttcactaaaatttagacgcggtttggtgctcagctctgaagctttttgtcatcaataatatcttcctcgccctcgcaatatgttctggtctagattgtggccattccttgcagcaaactaagactaattactttttccttctttacacgtgacctttcaagaacacttaaatctgttttggacacttaaatcagttgtgtggttacctaactgctactgttcttactttgattttttggttgctcatggagtcatggtgcatatgctcatgttttcaggctatcatttttctcatcgcctacttcaatagcctacagcattagcagtaccgtgctttttacttcacaagaaaaggttggccgaggtccctgctctagcgcaaggatttctactgcaacgattgcaacacacacaggaacttttttgaaaccttcaagcttcaacgcttgaccctttgcattggtggcatagtgaatattgaactactggagagaatacaaaaacaatttacggatgataggtactacatatggcagatgaggcaactggccatggcatatatgttgcttcgacctgtgcagtttatggatgaagacgaagctgacctgcagataatagagacaagtggtgttgtgtaatggcacttgtaaagagagacagtacacctagggttggtccattgatgatgaacctctgtgcaaactttgtcaaggactttgcaatggaaggcttgcagagtcaacataatattttgaagatctattatgtggtctagcttgtttctaggaatacagattaagaaccagtggtagagccctacggcagttgagtcttctttttgttactcacataagtcaacattttttgttgtttccattgaatagttaggactattttcagttattcaaaatcaaagaaagttgcaagttaattcatatatatgtaataaagtttcttggtaattatctataggcactttcaaatagaacgtgccaagtgctcacaatg

SEQ ID NO: 5522 - DNA, 1634 bp, Zea Mays
cccccatgcgcgaaacaatcctccgcctccgtcgcctattcgcctctcccactctctgcccccgcctcccctccttctctccctcccccgcatgcctcaactgctcctctccggcgtcgtagccgtccctctcgctcccgtgacatccagatctgacttgggggcgcagctcagagtgccaatgcgccgcaacctccgttgcgcccgcacgtgccctagccagtcgccatggagctcatccccatcaagcccgagattggataggagctccgaacgcgagccatagacggggagttgatgccaccgggcaatggatggtcgcatcctcaggacctccgcgtgcaacagcagcggtaagaactcgtccccttcctctccggtggcagtctcacgatcttcctctgccgccattgaactttaaaaatgagaaccaaaagcacacggtttctggcctccctattaggggattccacggagggactcctctcaggaaaaaaccaagtggtatgtgccttgcttgcatttcattttgtcccattttcaaaattgaaatgaacaaactgagctttttgtcatctaaaatttgtcttgtcttgtttttttcactaaaatttagacgcggtttggtgctcagctctgaagctttttgtcatcaataatatcttcctcgccctcgcaatatgttctggtctagattgtggccattccttgcagcaaactaagactaattactttttccttctttacacgtgacctttcaagaacacttaaatctgttttggacacttaaatcagttgtgtggttacctaactgctactgttcttactttgattttttggttgctcatggagtcatggtgcatatgctcatgttttcaggctatcatttttctcatcgcctacttcaatagcctacagcattagcagtaccgtgctttttacttcacaagaaaaggttggccgaggtccctgctctagcgcaaggatttctactgcaacgattgcaacacacacaggaacttttttgaaaccttcaagcttcaacgcttgaccctttgcattggtggcatagtgaatattgaactactggagagaatacaaaaacaatttacggatgataggtactacatatggcagatgaggcaactggccatggcatatatgttgcttcgacctgtgcagtttatggatgaagacgaagctgacctgcagatgtaaactttgttttctatggaccagaatagagacaagtggtgttgtgtaatggcacttgtaaagagagacagtacacctagggttggtccattgatgatgaacctctgtgcaaactttgtcaaggactttgcaatggaaggcttgcagagtcaacataatattttgaagatctattatgtggtctagcttgtttctaggaatacagattaagaaccagtggtagagccctacggcagttgagtcttctttttgttactcacataagtcaacattttttgttgtttccattgaatagttaggactattttcagttattcaaaatcaaagaaagttgcaagttaattcatatatatgtaataaagtttcttggtaattatctataggcactttcaaatagaacgtgccaagtgctcacaatg

SEQ ID NO: 5523 - DNA, 1379 bp, Zea Mays
cccccatgcgcgaaacaatcctccgcctccgtcgcctattcgcctctcccactctctgcccccgcctcccctccttctctccctcccccgcatgcctcaactgctcctctccggcgtcgtagccgtccctctcgctcccgtgacatccagatctgacttgggggcgcagctcagagtgccaatgcgccgcaacctccgttgcgcccgcacgtgccctagccagtcgccatggagctcatccccatcaagcccgaggtaggatctctcgtcgagattggataggagctccgaacgcgagccatagacggggagttgatgccaccgggcaatggatggtcgcatcctcaggacctccgcgtgcaacagcagcggtaagaactcgtccccttcctctccggtggcagtctcacgatcttcctctgccgccattgaactttaaaaatgagaaccaaaagcacacggtttctggcctccctattaggggattccacggagggactcctctcaggaaaaaaccaagtggctatcatttttctcatcgcctacttcaatagcctacagcattagcagtaccgtgctttttacttcacaagaaaaggttggccgaggtccctgctctagcgcaaggatttctactgcaacgattgcaacacacacaggaacttttttgaaaccttcaagcttcaacgcttgaccctttgcattggtggcatagtgaatattgaactactggagagaatacaaaaacaatttacggatgataggtactacatatggcagatgaggcaactggccatggcatatatgttgcttcgacctgtgcagtttatggatgaagacgaagctgacctgcagatgtaaactttgttttctatggaccaggtcttgtatatccaaattgaacggattgttctaataaatatatcacaaaaagataaagtataatatttgttcttgtgcgttgttgcaatgaattttagtgagaatagagacaagtggtgttgtgtaatggcacttgtaaagagagacagtacacctagggttggtccattgatgatgaacctctgtgcaaactttgtcaaggactttgcaatggaaggcttgcagagtcaacataatattttgaagatctattatgtggtctagcttgtttctaggaatacagattaagaaccagtggtagagccctacggcagttgagtcttctttttgttactcacataagtcaacattttttgttgtttccattgaatagttaggactattttcagttattcaaaatcaaagaaagttgcaagttaattcatatatatgtaataaagtttcttggtaattatctataggcactttcaaatagaacgtgccaagtgctcacaatg

SEQ ID NO: 5524 - DNA, 1652 bp, Zea Mays
cccccatgcgcgaaacaatcctccgcctccgtcgcctattcgcctctcccactctctgcccccgcctcccctccttctctccctcccccgcatgcctcaactgctcctctccggcgtcgtagccgtccctctcgctcccgtgacatccagatctgacttgggggcgcagctcagagtgccaatgcgccgcaacctccgttgcgcccgcacgtgccctagccagtcgccatggagctcatccccatcaagcccgaggtaggatctctcgtcgagattggataggagctccgaacgcgagccatagacggggagttgatgccaccgggcaatggatggtcgcatcctcaggacctccgcgtgcaacagcagcggtaagaactcgtccccttcctctccggtggcagtctcacgatcttcctctgccgccattgaactttaaaaatgagaaccaaaagcacacggtttctggcctccctattaggggattccacggagggactcctctcaggaaaaaaccaagtggtatgtgccttgcttgcatttcattttgtcccattttcaaaattgaaatgaacaaactgagctttttgtcatctaaaatttgtcttgtcttgtttttttcactaaaatttagacgcggtttggtgctcagctctgaagctttttgtcatcaataatatcttcctcgccctcgcaatatgttctggtctagattgtggccattccttgcagcaaactaagactaattactttttccttctttacacgtgacctttcaagaacacttaaatctgttttggacacttaaatcagttgtgtggttacctaactgctactgttcttactttgattttttggttgctcatggagtcatggtgcatatgctcatgttttcaggctatcatttttctcatcgcctacttcaatagcctacagcattagcagtaccgtgctttttacttcacaagaaaaggttggccgaggtccctgctctagcgcaaggatttctactgcaacgattgcaacacacacaggaacttttttgaaaccttcaagcttcaacgcttgaccctttgcattggtggcatagtgaatattgaactactggagagaatacaaaaacaatttacggatgataggtactacatatggcagatgaggcaactggccatggcatatatgttgcttcgacctgtgcagtttatggatgaagacgaagctgacctgcagatgtaaactttgttttctatggaccagaatagagacaagtggtgttgtgtaatggcacttgtaaagagagacagtacacctagggttggtccattgatgatgaacctctgtgcaaactttgtcaaggactttgcaatggaaggcttgcagagtcaacataatattttgaagatctattatgtggtctagcttgtttctaggaatacagattaagaaccagtggtagagccctacggcagttgagtcttctttttgttactcacataagtcaacattttttgttgtttccattgaatagttaggactattttcagttattcaaaatcaaagaaagttgcaagttaattcatatatatgtaataaagtttcttggtaattatctataggcactttcaaatagaacgtgccaagtgctcacaatg

SEQ ID NO: 5525 - DNA, 1300 bp, Zea Mays
cccgataaaaagccgccagcctcccggcctcggctgcaccgctctgtatactctccggtgaatcgctcccagtcccaagtccggatcgcaccgcgaagcgttcagccatgagctccgctgcagccgccgccaatgtcgccgtcatcggaggcggaaggaggtgatggaggatggctcggagctgcggttcgaccacggtgcgccctacttcaccgtcaccaacggcgaggttgcccgggtcgttggtgggtgggaggcgcgggggatcgtcgccgagtggaaggcaacgttcgcgtgcttcgatctggccaccggaaaatttacggacttcgagaaggagggaacagctaaaaagtatgtgggagtgccagccatgaactcgatatgcaaatcactctgtctagaggatggtgtggtggccaaatttggtgtcactgtgggcaagatggattggcttcaagatcggagttcgtggtcactagctagcctggatgggaaagatctaggctattttgattatgttgtggcgacagataagaacatagcgtcaccagcattttctgggttgactggaagaccgccacctcttgatttgtcgtcatttccacgcctgcctacagcacttcaagatatcccagttcgtccatgttttgctcttatggtagcattctcggagccattggctacggtacctgttcatggtttctctttcaacaattccaattctctgagctgggccttctgtaacagcagtaagccagggcgtgcttgcgtacctccaaacagacaatcttgggtgctgcattcgacaactgagtacgcttccaaggtaataaataatattggtccacgcaaaccttcggcggaggcgcttgctaaggtggcagaggaattgttcagagaattccaggcgactggattaagcattccacgaccaatttttttgaaagctcacagatggggtgctgccttcccagccattgcaattagtggagatgataagtgcgtttgggacaagagcacgaacttggcaatttgtggagatttctgtacaagcccaagtgtcgaaggagcagtccttagtgctacgagaggagtttccgaaatccttgaatgtttaaggtgcccgtcaagtatctaacgttattgttaccatccccagggcccctctctgtgattggttgtatttatgcctgcattctcttacacaaataaacaattcaagccttatttggaggcacatattgttcgtttatgctaaataagaaataaagtaacagcagaagttgcaacctttttt

SEQ ID NO: 5526 - DNA, 1215 bp, Zea Mays
ctcccggcctcggctgcaccgctctgtatactctccggtgaatcgctcccagtcccaagtccggatcgcaccgcgaagcgttcagccatgagctccgctgcagccgccgccaatgtcgccgtcatcggaggcggaatatccggctccgtgtgcgcgtcgctcctcgccgcgcggggcgtggccgtgacgctcttcgactccggccgcggcgccggcggccgcatggcgcagcggagggaggtgatggaggatggctcggagctgcggttcgaccacggtgcgccctacttcaccgtcaccaacggcgaggttgcccgggtcgttggtgggtgggaggcgcgggggatcgtcgccgagtggaaggcaacgttcgcgtgcttcgatctggccaccggaaaatttacggacttcgagaagatttgtcgtcatttccacgcctgcctacagcacttcaagatatcccagttcgtccatgttttgctcttatggtagcattctcggagccattggctacggtacctgttcatggtttctctttcaacaattccaattctctgagctgggccttctgtaacagcagtaagccagggcgtgcttgcgtacctccaaacaggtgcatgccttttgttcttttgtgtgtacacattagtaatgttatccgctgtcacaatctcacctgatgtattttcgtttgtgttcagacaatcttgggtgctgcattcgacaactgagtacgcttccaaggtaataaataatattggtccacgcaaaccttcggcggaggcgcttgctaaggtggcagaggaattgttcagagaattccaggcgactggattaagcattccacgaccaatttttttgaaagctcacagatggggtgctgccttcccagccattgcaattagtggagatgataagtgcgtttgggacaagagcacgaacttggcaatttgtggagatttctgtacaagcccaagtgtcgaaggagcagtccttagtgctacgagaggagtttccgaaatccttgaatgtttaaggtgcccgtcaagtatctaacgttattgttaccatccccagggcccctctctgtgattggttgtatttatgcctgcattctcttacacaaataaacaattcaagccttatttggaggcacatattgttcgtttatgctaaataagaaataaagtaacagcagaagttgcaacctttttt

SEQ ID NO: 5527 - DNA, 1821 bp, Zea Mays
ctcccggcctcggctgcaccgctctgtatactctccggtgaatcgctcccagtcccaagtccggatcgcaccgcgaagcgttcagccatgagctccgctgcagccgccgccaatgtcgccgtcatcggaggcggaatatccggctccgtgtgcgcgtcgctcctcgccgcgcggggcgtggccgtgacgctcttcgactccggccgcggcgccggcggccgcatggcgcagcggagggaggtgatggaggatggctcggagctgcggttcgaccacggtgcgccctacttcaccgtcaccaacggcgaggttgcccgggtcgttggtgggtgggaggcgcgggggatcgtcgccgagtggaaggcaacgttcgcgtgcttcgatctggccaccggaaaatttacggacttcgagaaggagggaacagctaaaaagtatgtgggagtgccagccatgaactcgatatgcaaatcactctgtctagaggatggtgtggtggccaaatttggtgtcactgtgggcaagatggattggcttcaagatcggagttcgtggtcactagctagcctggatgggaaagatctaggctattttgattatgttgtggcgacagataagaacatagcgtcaccagcattttctgggttgactggaagaccgccacctcttgatttgtcgtcatttccacgcctgcctacagcacttcaagatatcccagttcgtccatgttttgctcttatggtagcattctcggagccattggctacggtatgtgcaatcttcaataatatccgttcacacagttcctcgctttcccaattgctttagactaaagacttcgttgctgtagtcagttcatacttatttactacgcacatgggcccaccatttttcattgtgcgtagaactagaacctcagcgcacaccaaaatgcatgcacatggagtaatggaccataagctagaacctcagagactctgtagtcaccaaaccaaagtgctactacaatgcagcattgtaggaaatatttgtttcccagaatcctcaagttagcaagctgtatattagctaccattatgataattatgagcatgaggctgctccttagcctaatgatattataagcaactttcatttaccggtttctgaatttattcgtctgcctcctgcaaaaatgtctatttgtcttcctaatggcgttataaccaggtacctgttcatggtttctctttcaacaattccaattctctgagctgggccttctgtaacagcagtaagccagggcgtgcttgcgtacctccaaacagacaatcttgggtgctgcattcgacaactgagtacgcttccaaggtaataaataatattggtccacgcaaaccttcggcggaggcgcttgctaaggtggcagaggaattgttcagagaattccaggcgactggattaagcattccacgaccaatttttttgaaagctcacagatggggtgctgccttcccagccattgcaattagtggagatgataagtgcgtttgggacaagagcacgaacttggcaatttgtggagatttctgtacaagcccaagtgtcgaaggagcagtccttagtgctacgagaggagtttccgaaatccttgaatgtttaaggtgcccgtcaagtatctaacgttattgttaccatccccagggcccctctctgtgattggttgtatttatgcctgcattctcttacacaaataaacaattcaagccttatttggaggcacatattgttcgtttatgctaaataagaaataaagtaacagcagaagttgcaacctttttt

SEQ ID NO: 5528 - DNA, 1842 bp, Zea Mays
cttcgcatgtgaactgcccactgccgcactgcgacaccgctccacccaccccaacctaggcagtaggcagtaggcatcaagcgtcctgcgtggctgcgtccaagtccaagcgccgtccggccaccagcgcaggtaccgagccaccgaggtaggagccagccaccgggcagatcccaggctgccagccaccggcgtccagcactccggctgccagctaccggccacccgcagcgcaggccacaccaatgggtagcaaccgcatggcgccatggctgccgacgaacaccagcagcgagacggccagaccccagtaattcgatttattatatcttcgtcgaggatagtgacacgtcacgtcagtgtccggccatcgcttgagaggcgcgaatgtcttcgctgcgccgtcacgatccagagtccaacccaaggatggtttaggctactgaagggcaatgcactgattcttagactattgaagaatttacaggatgatgtgcaggagcagagcgtgggcagtaaatgcaaagaaaaaacacagttgcagaaattgctagcaatagactatacaagatagagccaaattgagcaaaaaaaaagaccattcccatttggatcaccattccctaaccacagcaaaatgaaggtggaaaattgagtagttgagtgccgtgtatgcacatgagcagggctaatactttataagaaatgtgctggttcttgatactcctccaaccagttgtagaagaattctggtttggctgaagtagttttacatccgaaagatggactttgtacagatatattctctgtcaacaatatgtatatccaggcggagatgaacttggagggaagcagatttacagtttggtgatattatatattatcaatcgcagtttattaatgttgcgcttcttctctattatcaaactattcacacaagacttcatgtgtgcgtgtgtgaaagattttattagtgtaaggtctttagggacagttcacattgaagttctggtgcctacataaattgtaaaccatacatgttgacatgggtacacatctcatggctatatacaactttgacatgaggtttatcttaagattgtgtgttccaataaaagctgttactatttcttgcatgtgcatgtctttaggatatacatttttctttatagatttatttatttacatcgcttactgcttactagcctattttttctagcaatttctgcaagtcgacccatcgtgttgaactaaaccatctctaatttcctacagcttcaactccaacaacaggatggccccacacacttaatgaaaacatctctaatttctagcaaattcgactccgaggacaataaaggtaccacaatggacttcttaagaagaataggaatcgtgtacataagcttttttgctctaataaaataagagtggttgttgcaacaatggcattcagaatgggtcttgataagagtgacgttgaaccgatatgaccatttgactagcatacaaagttcaaatgtgacagcctatagctttaagcaatgttacactgcttatcacctggactgattcaagcatttgttcttttaaaggtggttcattgtatcttgccagaaatcgtagaagaatacatacatgtatattccatgcagattccccccaccctcccattttcttctcttttctagacatcttactatgctctttctaggaaactggtcgtgctgattcaacaaaagtcaaagtcttttgcacaaatgaatcttatcgtcttgtcctttttttcttgtaatttacatttccaacctgctctaagtttcctacataatgacttcaatc

SEQ ID NO: 5529 - DNA, 1607 bp, Zea Mays
cttcgcatgtgaactgcccactgccgcactgcgacaccgctccacccaccccaacctaggcagtaggcagtaggcatcaagcgtcctgcgtggctgcgtccaagtccaagcgccgtccggccaccagcgcaggtaccgagccaccgaggtaggagccagccaccgggcagatcccaggctgccagccaccggcgtccagcactccggctgccagctaccggccacccgcagcgcaggccacaccaatgggtagcaaccgcatggcgccatggctgccgacgaacaccagcagcgagacggccagaccccagtaattcgatttattatatcttcgtcgaggatagtgacacgtcacgtcagtgtccggccatcgcttgagaggcgcgaatgtcttcgctgcgccgtcacgatccaggctcgcatccccttctgacgcgcacccattgcgggcagacgtttgggctttgtgtggatggatcatggacgtacataccacgtttgtttttctaactaaatcttcacttctttgaatcgcagagtccaacccaaggatggtttaggctactgaagggcaatgcactgattcttagactattgaagaatttacaggatgatgtgcaggagcagagcgtgggcagtaaatgcaaagaaaaaacacagttgcagaaattgctagcaatagactatacaagatagagccaaattgagcaaaaaaaaagaccattcccatttggatcaccattccctaaccacagcaaaatgaaggtggaaaattgagtagttgagtgccgtgtatgcacatgagcagggctaatactttataagaaatgtgctggttcttgatactcctccaaccagttgtagaagaattctggtttggctgaagtagttttacatccgaaagatggactttgtacagatatattctctgtcaacaatatgtatatccaggcggagatgaacttggagggaagcagatttacacaatttctgcaagtcgacccatcgtgttgaactaaaccatctctaatttcctacagcttcaactccaacaacaggatggccccacacacttaatgaaaacatctctaatttctagcaaattcgactccgaggacaataaaggtaccacaatggacttcttaagaagaataggaatcgtgtacataagcttttttgctctaataaaataagagtggttgttgcaacaatggcattcagaatgggtcttgataagagtgacgttgaaccgatatgaccatttgactagcatacaaagttcaaatgtgacagcctatagctttaagcaatgttacactgcttatcacctggactgattcaagcatttgttcttttaaaggtggttcattgtatcttgccagaaatcgtagaagaatacatacatgtatattccatgcagattccccccaccctcccattttcttctcttttctagacatcttactatgctctttctaggaaactggtcgtgctgattcaacaaaagtcaaagtcttttgcacaaatgaatcttatcgtcttgtcctttttttcttgtaatttacatttccaacctgctctaagtttcctacataatgacttcaatc

SEQ ID NO: 5530 - DNA, 1673 bp, Zea Mays
cttcgcatgtgaactgcccactgccgcactgcgacaccgctccacccaccccaacctaggcagtaggcagtaggcatcaagcgtcctgcgtggctgcgtccaagtccaagcgccgtccggccaccagcgcaggtaccgagccaccgaggtaggagccagccaccgggcagatcccaggctgccagccaccggcgtccagcactccggctgccagctaccggccacccgcagcgcaggccacaccaatgggtagcaaccgcatggcgccatggctgccgacgaacaccagcagcgagacggccagaccccagagtccaacccaaggatggtttaggctactgaagggcaatgcactgattcttagactattgaagaatttacaggatgatgtgcaggagcagagcgtgggcagtaaatgcaaagaaaaaacacagttgcagaaattgctagcaatagactatacaagatagagccaaattgagcaaaaaaaaagaccattcccatttggatcaccattccctaaccacagcaaaatgaaggtggaaaattgagtagttgagtgccgtgtatgcacatgagcagggctaatactttataagaaatgtgctggttcttgatactcctccaaccagttgtagaagaattctggtttggctgaagtagttttacatccgaaagatggactttgtacagatatattctctgtcaacaatatgtatatccaggcggagatgaacttggagggaagcagatttacagtttggtgatattatatattatcaatcgcagtttattaatgttgcgcttcttctctattatcaaactattcacacaagacttcatgtgtgcgtgtgtgaaagattttattagtgtaaggtctttagggacagttcacattgaagttctggtgcctacataaattgtaaaccatacatgttgacatgggtacacatctcatggctatatacaactttgacatgaggtttatcttaagattgtgtgttccaataaaagctgttactatttcttgcatgtgcatgtctttaggatatacatttttctttatagatttatttatttacatcgcttactgcttactagcctattttttctagcaatttctgcaagtcgacccatcgtgttgaactaaaccatctctaatttcctacagcttcaactccaacaacagaggtaccacaatggacttcttaagaagaataggaatcgtgtacataagcttttttgctctaataaaataagagtggttgttgcaacaatggcattcagaatgggtcttgataagagtgacgttgaaccgatatgaccatttgactagcatacaaagttcaaatgtgacagcctatagctttaagcaatgttacactgcttatcacctggactgattcaagcatttgttcttttaaaggtggttcattgtatcttgccagaaatcgtagaagaatacatacatgtatattccatgcagattccccccaccctcccattttcttctcttttctagacatcttactatgctctttctaggaaactggtcgtgctgattcaacaaaagtcaaagtcttttgcacaaatgaatcttatcgtcttgtcctttttttcttgtaatttacatttccaacctgctctaagtttcctacataatgacttcaatc

SEQ ID NO: 5531 - DNA, 1316 bp, Zea Mays
cttcgcatgtgaactgcccactgccgcactgcgacaccgctccacccaccccaacctaggcagtaggcagtaggcatcaagcgtcctgcgtggctgcgtccaagtccaagcgccgtccggccaccagcgcaggtaccgagccaccgaggtaggagccagccaccgggcagatcccaggctgccagccaccggcgtccagcactccggctgccagctaccggccacccgcagcgcaggccacaccaatgggtagcaaccgcatggcgccatggctgccgacgaacaccagcagcgagacggccagaccccagagtccaacccaaggatggtttaggctactgaagggcaatgcactgattcttagactattgaagaatttacaggatgatgtgcaggagcagagcgtgggcagtaaatgcaaagaaaaaacacagttgcagaaattgctagcaatagactatacaagatagagccaaattgagcaaaaaaaaagaccattcccatttggatcaccattccctaaccacagcaaaatgaaggtggaaaattgagtagttgagtgccgtgtatgcacatgagcagggctaatactttataagaaatgtgctggttcttgatactcctccaaccagttgtagaagaattctggtttggctgaagtagttttacatccgaaagatggactttgtacagatatattctctgtcaacaatatgtatatccaggcggagatgaacttggagggaagcagatttacacaatttctgcaagtcgacccatcgtgttgaactaaaccatctctaatttcctacagcttcaactccaacaacagaggtaccacaatggacttcttaagaagaataggaatcgtgtacataagcttttttgctctaataaaataagagtggttgttgcaacaatggcattcagaatgggtcttgataagagtgacgttgaaccgatatgaccatttgactagcatacaaagttcaaatgtgacagcctatagctttaagcaatgttacactgcttatcacctggactgattcaagcatttgttcttttaaaggtggttcattgtatcttgccagaaatcgtagaagaatacatacatgtatattccatgcagattccccccaccctcccattttcttctcttttctagacatcttactatgctctttctaggaaactggtcgtgctgattcaacaaaagtcaaagtcttttgcacaaatgaatcttatcgtcttgtcctttttttcttgtaatttacatttccaacctgctctaagtttcctacataatgacttcaatc

SEQ ID NO: 5532 - DNA, 1738 bp, Zea Mays
cttcgcatgtgaactgcccactgccgcactgcgacaccgctccacccaccccaacctaggcagtaggcagtaggcatcaagcgtcctgcgtggctgcgtccaagtccaagcgccgtccggccaccagcgcaggtaccgagccaccgaggtaggagccagccaccgggcagatcccaggctgccagccaccggcgtccagcactccggctgccagctaccggccacccgcagcgcaggccacaccaatgggtagcaaccgcatggcgccatggctgccgacgaacaccagcagcgagacggccagaccccagagtccaacccaaggatggtttaggctactgaagggcaatgcactgattcttagactattgaagaatttacaggatgatgtgcaggagcagagcgtgggcagtaaatgcaaagaaaaaacacagttgcagaaattgctagcaatagactatacaagatagagccaaattgagcaaaaaaaaagaccattcccatttggatcaccattccctaaccacagcaaaatgaaggtggaaaattgagtagttgagtgccgtgtatgcacatgagcagggctaatactttataagaaatgtgctggttcttgatactcctccaaccagttgtagaagaattctggtttggctgaagtagttttacatccgaaagatggactttgtacagatatattctctgtcaacaatatgtatatccaggcggagatgaacttggagggaagcagatttacagtttggtgatattatatattatcaatcgcagtttattaatgttgcgcttcttctctattatcaaactattcacacaagacttcatgtgtgcgtgtgtgaaagattttattagtgtaaggtctttagggacagttcacattgaagttctggtgcctacataaattgtaaaccatacatgttgacatgggtacacatctcatggctatatacaactttgacatgaggtttatcttaagattgtgtgttccaataaaagctgttactatttcttgcatgtgcatgtctttaggatatacatttttctttatagatttatttatttacatcgcttactgcttactagcctattttttctagcaatttctgcaagtcgacccatcgtgttgaactaaaccatctctaatttcctacagcttcaactccaacaacaggatggccccacacacttaatgaaaacatctctaatttctagcaaattcgactccgaggacaataaaggtaccacaatggacttcttaagaagaataggaatcgtgtacataagcttttttgctctaataaaataagagtggttgttgcaacaatggcattcagaatgggtcttgataagagtgacgttgaaccgatatgaccatttgactagcatacaaagttcaaatgtgacagcctatagctttaagcaatgttacactgcttatcacctggactgattcaagcatttgttcttttaaaggtggttcattgtatcttgccagaaatcgtagaagaatacatacatgtatattccatgcagattccccccaccctcccattttcttctcttttctagacatcttactatgctctttctaggaaactggtcgtgctgattcaacaaaagtcaaagtcttttgcacaaatgaatcttatcgtcttgtcctttttttcttgtaatttacatttccaacctgctctaagtttcctacataatgacttcaatc

SEQ ID NO: 5533 - DNA, 3364 bp, Zea Mays
cttcgcatgtgaactgcccactgccgcactgcgacaccgctccacccaccccaacctaggcagtaggcagtaggcatcaagcgtcctgcgtggctgcgtccaagtccaagcgccgtccggccaccagcgcaggtaccgagccaccgaggtaggagccagccaccgggcagatcccaggctgccagccaccggcgtccagcactccggctgccagctaccggccacccgcagcgcaggccacaccaatgggtagcaaccgcatggcgccatggctgccgacgaacaccagcagcgagacggccagaccccagtaattcgatttattatatcttcgtcgaggatagtgacacgtcacgtcagtgtccggccatcgcttgagaggcgcgaatgtcttcgctgcgccgtcacgatccaggctcgcatccccttctgacgcgcacccattgcgggcagacgtttgggctttgtgtggatggatcatggacgtacataccacgtttgtttttctaactaaatcttcacttctttgaatcgcagagtccaacccaaggatggtttaggctactgaagggcaatgcactgattcttagactattgaagaatttacaggatgatgtgcaggagcagagcgtgggcagtaaatgcaaagaaaaaacacagttgcagaaattgctagcaatagactatacaagatagagccaaattgagcaaaaaaaaagaccattcccatttggatcaccattccctaaccacagcaaaatgaaggtggaaaattgagtagttgagtgccgtgtatgcacatgagcagggctaatactttataagaaatgtgctggttcttgatactcctccaaccagttgtagaagaattctggtttggctgaagtagttttacatccgaaagatggactttgtacagatatattctctgtcaacaatatgtatatccaggcggagatgaacttggagggaagcagatttacagtttggtgatattatatattatcaatcgcagtttattaatgttgcgcttcttctctattatcaaactattcacacaagacttcatgtgtgcgtgtgtgaaagattttattagtgtaaggtctttagggacagttcacattgaagttctggtgcctacataaattgtaaaccatacatgttgacatgggtacacatctcatggctatatacaactttgacatgaggtttatcttaagattgtgtgttccaataaaagctgttactatttcttgcatgtgcatgtctttaggatatacatttttctttatagatttatttatttacatcgcttactgcttactagcctattttttctagcaatttctgcaagtcgacccatcgtgttgaactaaaccatctctaatttcctacagcttcaactccaacaacaggatggccccacacacttaatgaaaacatctctaatttctagcaaattcgactccgaggacaataaaggtaccacaatggacttcttaagaagaataggaatcgtgtacataagcttttttgctctaataaaataagagtggttgttgcaacaatggcattcagaatgggtcttgataagagtgacgttgaaccgatatgaccatttgactagcatacaaagttcaaatgtgacagcctatagctttaagcaatgttacactgcttatcacctggactgattcaagcatttgttcttttaaaggtggttcattgtatcttgccagaaatcgtagaagaatacatacattgaagttcacgaatatgctatgagaaaattctttgccagatattttcttgtgaaaattcagttggatgcatttgctccttggttaaagagtcgacttcagacaagttcgatataaaagaggagtttgttagttttgcagttttctataggttcacccagcagaacctcccagcttggaagccagcaatgacacctggatgtataatagcaatgttcttgattatcggaataattttcatacctttcgggcttctttgtctccaaacttcaaatcatattgcagaaatcatctaccgctatgatgttgactgtgtgcctgatgcttacagaggaaataggcaagcttatattaaggacagctcgatttctaagaactgtactctggaagcgaaggttctggaatacatgagagcaccaatttatgtttattatgaacttgagaatttctatcagaatcaccgcaggtatgtcaaaagtagaagcgataaacagctgcgttttggggcaaaatacacggccgactcgtgcagtcctgttgagtgggataataatggttccccaattgttccctgcggcttgattgcctggagcttattcaatgatacatatggttttactcgtgggtccaaggaaataaaggtcaacaggaaaaacatttcatggaagagcgaccgggagcataagtttggcaaacatgtgtttccttccaactttcagaacggaaccttgattggaggggggaaactcgaccctactgtcccactgagtgaacaggaagaccttattgtgtggatgaggacatccgctctccccaaatttcgaaagctctatggtgtgattgaagacgacctgcatgcggatgagaccatagctattttcgtaggaaacaattacaacacctacacttttggtggaaagaagagcatagtcctgtcgactgcgtcctggctaggcggcaagaacgacttccttggacacgcttatattgtcactggttcgttgagcatcatcatatcgattctctttgctctgatccatgtgaagtacccaaggccgcaaggtgaccccaattgcctatcctggaacaggaaaaacagcaatagctaaggggccccgcctgtatctaccatctatgagggcgcctccacatgaatcagtattacacatctgtatctgaaacatgtcagacactgtgccgcaaggttaatcccagatgatgaaaagaaactgcgtacaccatgtccatcagaaatactagttccaattccgacacatgcgctgggcatcaaggtcaacaccgggagtttttattattattattccagaatgcgcacggtaatttgaaaatgaaattgtggtggaaactgtggaatccgctaatccggtgcggatctgcacagagaaactctggtggctgctgtgactaatgaaaagtggttattctggcttggccgttgtccatcgagggagatgtaatacctgatcagccctgaaatcttaaagggctcccttctttcctcatgctgggacaacatttatttacatcgggtgtgttcttggagttctctccatcaccgaatatatgtcggcgtgattgctggt

SEQ ID NO: 5534 - DNA, 3319 bp, Zea Mays
cttcgcatgtgaactgcccactgccgcactgcgacaccgctccacccaccccaacctaggcagtaggcagtaggcatcaagcgtcctgcgtggctgcgtccaagtccaagcgccgtccggccaccagcgcaggtaccgagccaccgaggtaggagccagccaccgggcagatcccaggctgccagccaccggcgtccagcactccggctgccagctaccggccacccgcagcgcaggccacaccaatgggtagcaaccgcatggcgccatggctgccgacgaacaccagcagcgagacggccagaccccagtaattcgatttattatatcttcgtcgaggatagtgacacgtcacgtcagtgtccggccatcgcttgagaggcgcgaatgtcttcgctgcgccgtcacgatccaggctcgcatccccttctgacgcgcacccattgcgggcagacgtttgggctttgtgtggatggatcatggacgtacataccacgtttgtttttctaactaaatcttcacttctttgaatcgcagagtccaacccaaggatggtttaggctactgaagggcaatgcactgattcttagactattgaagaatttacaggatgatgtgcaggagcagagcgtgggcagtaaatgcaaagaaaaaacacagttgcagaaattgctagcaatagactatacaagatagagccaaattgagcaaaaaaaaagaccattcccatttggatcaccattccctaaccacagcaaaatgaaggtggaaaattgagtagttgagtgccgtgtatgcacatgagcagggctaatactttataagaaatgtgctggttcttgatactcctccaaccagttgtagaagaattctggtttggctgaagtagttttacatccgaaagatggactttgtacagatatattctctgtcaacaatatgtatatccaggcggagatgaacttggagggaagcagatttacagtttggtgatattatatattatcaatcgcagtttattaatgttgcgcttcttctctattatcaaactattcacacaagacttcatgtgtgcgtgtgtgaaagattttattagtgtaaggtctttagggacagttcacattgaagttctggtgcctacataaattgtaaaccatacatgttgacatgggtacacatctcatggctatatacaactttgacatgaggtttatcttaagattgtgtgttccaataaaagctgttactatttcttgcatgtgcatgtctttaggatatacatttttctttatagatttatttatttacatcgcttactgcttactagcctattttttctagcaatttctgcaagtcgacccatcgtgttgaactaaaccatctctaatttcctacagcttcaactccaacaacaggatggccccacacacttaatgaaaacatctctaatttctagcaaattcgactccgaggacaataaaggtaccacaatggacttcttaagaagaataggaatcgtgtacataagcttttttgctctaataaaataagagtggttgttgcaacaatggcattcagaatgggtcttgataagagtgacgttgaaccgatatgaccatttgactagcatacaaagttcaaatgtgacagcctatagctttaagcaatgttacactgcttatcacctggactgattcaagcatttgttcttttaaagtgaagttcacgaatatgctatgagaaaattctttgccagatattttcttgtgaaaattcagttggatgcatttgctccttggttaaagagtcgacttcagacaagttcgatataaaagaggagtttgttagttttgcagttttctataggttcacccagcagaacctcccagcttggaagccagcaatgacacctggatgtataatagcaatgttcttgattatcggaataattttcatacctttcgggcttctttgtctccaaacttcaaatcatattgcagaaatcatctaccgctatgatgttgactgtgtgcctgatgcttacagaggaaataggcaagcttatattaaggacagctcgatttctaagaactgtactctggaagcgaaggttctggaatacatgagagcaccaatttatgtttattatgaacttgagaatttctatcagaatcaccgcaggtatgtcaaaagtagaagcgataaacagctgcgttttggggcaaaatacacggccgactcgtgcagtcctgttgagtgggataataatggttccccaattgttccctgcggcttgattgcctggagcttattcaatgatacatatggttttactcgtgggtccaaggaaataaaggtcaacaggaaaaacatttcatggaagagcgaccgggagcataagtttggcaaacatgtgtttccttccaactttcagaacggaaccttgattggaggggggaaactcgaccctactgtcccactgagtgaacaggaagaccttattgtgtggatgaggacatccgctctccccaaatttcgaaagctctatggtgtgattgaagacgacctgcatgcggatgagaccatagctattttcgtaggaaacaattacaacacctacacttttggtggaaagaagagcatagtcctgtcgactgcgtcctggctaggcggcaagaacgacttccttggacacgcttatattgtcactggttcgttgagcatcatcatatcgattctctttgctctgatccatgtgaagtacccaaggccgcaaggtgaccccaattgcctatcctggaacaggaaaaacagcaatagctaaggggccccgcctgtatctaccatctatgagggcgcctccacatgaatcagtattacacatctgtatctgaaacatgtcagacactgtgccgcaaggttaatcccagatgatgaaaagaaactgcgtacaccatgtccatcagaaatactagttccaattccgacacatgcgctgggcatcaaggtcaacaccgggagtttttattattattattccagaatgcgcacggtaatttgaaaatgaaattgtggtggaaactgtggaatccgctaatccggtgcggatctgcacagagaaactctggtggctgctgtgactaatgaaaagtggttattctggcttggccgttgtccatcgagggagatgtaatacctgatcagccctgaaatcttaaagggctcccttctttcctcatgctgggacaacatttatttacatcgggtgtgttcttggagttctctccatcaccgaatatatgtcggcgtgattgctggt

SEQ ID NO: 5535 - DNA, 1492 bp, Zea Mays
cttcagacaagttcgatataaaagaggagttttctataggttcacccagcagaacctcccagcttggaagccagcaatgacacctggatgtataatagcaatgttcttgattatcggaataattttcatacctttcgggcttctttgtctccaaacttcaaatcatattgcagaaatcatctaccgctatgatgttgactgtgtgcctgatgcttacagaggaaataggcaagcttatattaaggacagctcgatttctaagaactgtactctggaagcgaaggttctggaatacatgagagcaccaatttatgtttattatgaacttgagaatttctatcagaatcaccgcaggtatgtcaaaagtagaagcgataaacagctgcgttttggggcaaaatacacggccgactcgtgcagtcctgttgagtgggataataatggttccccaattgttccctgcggcttgattgcctggagcttattcaatgatacatatggttttactcgtgggtccaaggaaataaaggtcaacaggaaaaacatttcatggaagagcgaccgggagcataagtttggcaaacatgtgtttccttccaactttcagaacggaaccttgattggaggggggaaactcgaccctactgtcccactgagtgaacaggaagaccttattgtgtggatgaggacatccgctctccccaaatttcgaaagctctatggtgtgattgaagacgacctgcatgcggatgagaccatagctattttcgtaggaaacaattacaacacctacacttttggtggaaagaagagcatagtcctgtcgactgcgtcctggctaggcggcaagaacgacttccttggacacgcttatattgtcactggttcgttgagcatcatcatatcgattctctttgctctgatccatgtgaagtacccaaggccgcaaggtgaccccaattgcctatcctggaacaggaaaaacagcaatagctaaggggccccgcctgtatctaccatctatgagggcgcctccacatgaatcagtattacacatctgtatctgaaacatgtcagacactgtgccgcaaggttaatcccagatgatgaaaagaaactgcgtacaccatgtccatcagaaatactagttccaattccgacacatgcgctgggcatcaaggtcaacaccgggagtttttattattattattccagaatgcgcacggtaatttgaaaatgaaattgtggtggaaactgtggaatccgctaatccggtgcggatctgcacagagaaactctggtggctgctgtgactaatgaaaagtggttattctggcttggccgttgtccatcgagggagatgtaatacctgatcagccctgaaatcttaaagggctcccttctttcctcatgctgggacaacatttatttacatcgggtgtgttcttggagttctctccatcaccgaatatatgtcggcgtgattgctggt

SEQ ID NO: 5536 - DNA, 1641 bp, Zea Mays
gtggactctccactcttcttctgcggtcggatcccccggcgggtcggactgcggagcacgggctccggcgagccgctgacgagggcctgtgcggcgaccgagctcgtggcgggagaagatggacgaagcgagcacctccgcgtccggcgccgcgacgaggcgcggcttcgtgcctgcgagatcgggaggttcacccagcagaacctcccagcttggaagccagcaatgacacctggatgtataatagcaatgttcttgattatcggaataattttcatacctttcgggcttctttgtctccaaacttcaaatcatattgcagaaatcatctaccgctatgatgttgactgtgtgcctgatgcttacagaggaaataggcaagcttatattaaggacagctcgatttctaagaactgtactctggaagcgaaggttctggaatacatgagagcaccaatttatgtttattatgaacttgagaatttctatcagaatcaccgcaggtatgtcaaaagtagaagcgataaacagctgcgttttggggcaaaatacacggccgactcgtgcagtcctgttgagtgggataataatggttccccaattgttccctgcggcttgattgcctggagcttattcaatgatacatatggttttactcgtgggtccaaggaaataaaggtcaacaggaaaaacatttcatggaagagcgaccgggagcataagtttggcaaacatgtgtttccttccaactttcagaacggaaccttgattggaggggggaaactcgaccctactgtcccactgagtgaacaggaagaccttattgtgtggatgaggacatccgctctccccaaatttcgaaagctctatggtgtgattgaagacgacctgcatgcggatgagaccatagctattttcgtaggaaacaattacaacacctacacttttggtggaaagaagagcatagtcctgtcgactgcgtcctggctaggcggcaagaacgacttccttggacacgcttatattgtcactggttcgttgagcatcatcatatcgattctctttgctctgatccatgtgaagtacccaaggccgcaaggtgaccccaattgcctatcctggaacaggaaaaacagcaatagctaaggggccccgcctgtatctaccatctatgagggcgcctccacatgaatcagtattacacatctgtatctgaaacatgtcagacactgtgccgcaaggttaatcccagatgatgaaaagaaactgcgtacaccatgtccatcagaaatactagttccaattccgacacatgcgctgggcatcaaggtcaacaccgggagtttttattattattattccagaatgcgcacggtaatttgaaaatgaaattgtggtggaaactgtggaatccgctaatccggtgcggatctgcacagagaaactctggtggctgctgtgactaatgaaaagtggttattctggcttggccgttgtccatcgagggagatgtaatacctgatcagccctgaaatcttaaagggctcccttctttcctcatgctgggacaacatttatttacatcgggtgtgttcttggagttctctccatcaccgaatatatgtcggcgtgattgctggt

SEQ ID NO: 5537 - DNA, 1659 bp, Zea Mays
gtggactctccactcttcttctgcggtcggatcccccggcgggtcggactgcggagcacgggctccggcgagccgctgacgagggcctgtgcggcgaccgagctcgtggcgggagaagatggacgaagcgagcacctccgcgtccggcgccgcgacgaggcgcggcttcgtgcctgcgagatcgggagttttgcagttttctataggttcacccagcagaacctcccagcttggaagccagcaatgacacctggatgtataatagcaatgttcttgattatcggaataattttcatacctttcgggcttctttgtctccaaacttcaaatcatattgcagaaatcatctaccgctatgatgttgactgtgtgcctgatgcttacagaggaaataggcaagcttatattaaggacagctcgatttctaagaactgtactctggaagcgaaggttctggaatacatgagagcaccaatttatgtttattatgaacttgagaatttctatcagaatcaccgcaggtatgtcaaaagtagaagcgataaacagctgcgttttggggcaaaatacacggccgactcgtgcagtcctgttgagtgggataataatggttccccaattgttccctgcggcttgattgcctggagcttattcaatgatacatatggttttactcgtgggtccaaggaaataaaggtcaacaggaaaaacatttcatggaagagcgaccgggagcataagtttggcaaacatgtgtttccttccaactttcagaacggaaccttgattggaggggggaaactcgaccctactgtcccactgagtgaacaggaagaccttattgtgtggatgaggacatccgctctccccaaatttcgaaagctctatggtgtgattgaagacgacctgcatgcggatgagaccatagctattttcgtaggaaacaattacaacacctacacttttggtggaaagaagagcatagtcctgtcgactgcgtcctggctaggcggcaagaacgacttccttggacacgcttatattgtcactggttcgttgagcatcatcatatcgattctctttgctctgatccatgtgaagtacccaaggccgcaaggtgaccccaattgcctatcctggaacaggaaaaacagcaatagctaaggggccccgcctgtatctaccatctatgagggcgcctccacatgaatcagtattacacatctgtatctgaaacatgtcagacactgtgccgcaaggttaatcccagatgatgaaaagaaactgcgtacaccatgtccatcagaaatactagttccaattccgacacatgcgctgggcatcaaggtcaacaccgggagtttttattattattattccagaatgcgcacggtaatttgaaaatgaaattgtggtggaaactgtggaatccgctaatccggtgcggatctgcacagagaaactctggtggctgctgtgactaatgaaaagtggttattctggcttggccgttgtccatcgagggagatgtaatacctgatcagccctgaaatcttaaagggctcccttctttcctcatgctgggacaacatttatttacatcgggtgtgttcttggagttctctccatcaccgaatatatgtcggcgtgattgctggt

SEQ ID NO: 5538 - DNA, 1460 bp, Zea Mays
gggagtttctataggttcacccagcagaacctcccagcttggaagccagcaatgacacctggatgtataatagcaatgttcttgattatcggaataattttcatacctttcgggcttctttgtctccaaacttcaaatcataaatcatctaccgctatgatgttgactgtgtgcctgatgcttacagaggaaataggcaagcttatattaaggacagctcgatttctaagaactgtactctggaagcgaaggttctggaatacatgagagcaccaatttatgtttattatgaacttgagaatttctatcagaatcaccgcaggtatgtcaaaagtagaagcgataaacagctgcgttttggggcaaaatacacggccgactcgtgcagtcctgttgagtgggataataatggttccccaattgttccctgcggcttgattgcctggagcttattcaatgatacatatggttttactcgtgggtccaaggaaataaaggtcaacaggaaaaacatttcatggaagagcgaccgggagcataagtttggcaaacatgtgtttccttccaactttcagaacggaaccttgattggaggggggaaactcgaccctactgtcccactgagtgaacaggaagaccttattgtgtggatgaggacatccgctctccccaaatttcgaaagctctatggtgtgattgaagacgacctgcatgcggatgagaccatagctattttcgtaggaaacaattacaacacctacacttttggtggaaagaagagcatagtcctgtcgactgcgtcctggctaggcggcaagaacgacttccttggacacgcttatattgtcactggttcgttgagcatcatcatatcgattctctttgctctgatccatgtgaagtacccaaggccgcaaggtgaccccaattgcctatcctggaacaggaaaaacagcaatagctaaggggccccgcctgtatctaccatctatgagggcgcctccacatgaatcagtattacacatctgtatctgaaacatgtcagacactgtgccgcaaggttaatcccagatgatgaaaagaaactgcgtacaccatgtccatcagaaatactagttccaattccgacacatgcgctgggcatcaaggtcaacaccgggagtttttattattattattccagaatgcgcacggtaatttgaaaatgaaattgtggtggaaactgtggaatccgctaatccggtgcggatctgcacagagaaactctggtggctgctgtgactaatgaaaagtggttattctggcttggccgttgtccatcgagggagatgtaatacctgatcagccctgaaatcttaaagggctcccttctttcctcatgctgggacaacatttatttacatcgggtgtgttcttggagttctctccatcaccgaatatatgtcggcgtgattgctggt

SEQ ID NO: 5539 - DNA, 2311 bp, Zea Mays
tatgcttgcagttgcaggctagctagctgcaaaaggtacgagacatcatggcaccgctagtgttgaagagcagtagcagcggcacctctattctggtgatcggtggtacggggacgatcggccgccacctggtgacggcgagcctcgacgccggccaccccacggccgtgctcgtccggccggcggccgcggccgaggaccccgccaaggccagcctcctggaggcgttcaagaccagaggggcaagccttatctacggggacatcaacgatgccgaggcgttggttgcagcgatcaagcaggccggcgacgtggtcatctccgccaccggccacagctcgccggaagaggtggagagccagctcaggattgtggccgccataaaagaagcaggcaatgttaagcggttcttgccttctgaatacggctgcgacgtggagcatgtggcggagcacatggtggagccggcgaggagcatcctcggggccaaagtccgagtccgccatgctctcaaagctgcagggattccacacaccatcgtctgcagcaactgggctcagggcttcctgctgccaagagctggggaccctcagctgccagacggtcgtcctccggacaccaccgccaccatcttcggcgacggacaagtacaagcgacgttcgtgaatgagcaagacatgagcagggtggctatcaaagccgtgcaagacccccgcacactcaacaagaaattacacgtgtgccctccaaccaatctctgctccctcaaccaactagtctcactctgggaggataaaatcggcaagcccctccacaggcactatgttgctgaagaagagttactcaagaaaatacaagagtctccgtttccactcaactttcagctggcgattgtgcacgcgtcgtttatcgctgccggccgtgcccctagcaccaaaagaaacatccacaccaaggatagccatggggagacgatgacacaaggcgtggatgatgtggacgcaacgcagctgtacccgggcatcagctacatcaccgtcaaagactacctggacgctctccctccccacaacacactacgatctgacggttcacgaccggactctagatgatcaaccaatatgcaagcaagcacacgctcacatcgtcctcgtaccattttaggagtctgcataaatatatctccgtttacaaatgtcacaccgttgattttttttcaaaacttttatcattcatcttatttaaaatatttattaaaaatgtaaaattagaagaagcactaaaacaaccttaagtgataaaacaaatcacaacaaaataaaagttttttttaaataagacgagtggttaaagtttcgaaaaaagataaagtgtcatatatttgtgaacagagagggtaataaaataatacggtgtgtatgtgcatgcacggagacgtctgactgaatcattcgtcctaccttataccattttagatcttgtttggatatagtcggattcatattagtagacacgtgctaagatggatcggagtacaacttcaactatatactatctcaatgtatgtggattaaagtgaacctaacaacatccaaataaggcatatagagtattatctctcctctctttgttttgggttttaagtgctctcgagggtcagatatgatggagagtactacataatagaaaatattactatatatataatattatgtatgtgtttaatttgttattattttaaaataatacatgggttctcgtgcctagagctagaatatattaattgcattggtaaaagatataacaaggatgctatcagcattatttattccggtaatacggatcagcatatcaagcacatgaaatcagaagcacataaggcacgaggattgatacgctatgcgtagtttggaggtgatatatctctttgcttgtatgattgatcgattagggaggcctattgttccctatatagttcgaggaataggattacaaggtcctgatccatttacatataagttttttagttcgttatgttggtgcctttttggggcgtcaatcacggcgtgagaactggcggcggtgctcgctgcacacgcacggacggttcgcggtcagggccagacggtccgcgacctggagcagggcttagggtttcctacctgacggtcggacggtccgcgcgtgcgcaggggcggcggaagtcgccggtggcgcctggatctcgctcctgggagagaccccgtcggggaggagagatcctaggtgttgtctaggctcggcaggccgacctagacttcttaaatcgacg

SEQ ID NO: 5540 - DNA, 533 bp, Zea Mays
gcggcctgagactgtccgcaacgcagctccctacggctcccctcccctattactgtgctcatacaaggggcaaaaatcatccccttcctcccgcatcgcctctccctgcagtgccccctacatggcgttcgtcttctctctcacgctagatcaagcggagcactattcatcccccatcctttccttctggatgatggcagcgagcacgccttggcgaagaaacctcccgctcctttgcggtgggtttggacccgagcgcggaggaaggccgactcggatccgctcgatctcgccgccgaccaggcccaacagcaggacgttgcggcgcaggaagcattcccgtcgatgtactccgagcaggcaccgcaagaacaaccctcactgccgcaggtgttcttcatcgccacatccgacgtccttgattcagtcaatcgatgctgctctcaaatctagttcccctcccatcgccgctccatctcaaagcacagatcttgacgtactccatcagactttgcgccacgcataatcagttt

SEQ ID NO: 5541 - DNA, 529 bp, Zea Mays
ctattactgtgctcatacaaggggcaaaaatcatccccttcctcccgcatcgcctctccctgcagtgccccctacatggcgttcgtcttctctctcacgctagatcaagcggagcactattcatcccccatcctttccttctggatgatggcagcgagcacgccttggcgaagaaacctcccgctcctttgcggtgggtttggacccgagcgcggaggaaggccgactcggatccgctcgatctcgccgccgaccaggcccaacagcaggacgttgcggcgcaggaagcattcccgtcgatgtactccgagcaggcaccgcaagaacaaccctcactgccgcaggtgttcttcatcgccacatccgacgtccttgattcagtcaatcgatgctgctctcaaatctagttcccctcccatcgccgctccatctcaaagcacagatcttgacgtactccatcaggactcgtggggagccagatcgcccatggaggagacaggggatgcgcagagaccgacggggaggagcc

SEQ ID NO: 5542 - DNA, 760 bp, Zea Mays
caaggggcaaaaatcatccccttcctcccgcatcgcctctccctgcagtgccccctacatggcgttcgtcttctctctcacgctagatcaagcggagcactattcatcccccatcctttccttctggatgatggcagcgagcacgccttggcgaagaaacctcccgctcctttgcggtgggtttggacccgagcgcggaggaaggccgactcggatccgctcgatctcgccgccgaccaggcccaacagcaggacgttgcggcgcaggaagcattcccgtcgatgtactccgagcaggcaccgcaagaacaaccctcactgccgcaggtgttcttcatcgccacatccgacgtccttgattcagtcaatcgatgctgctctcaaatctagttcccctcccatcgccgctccatctcaaagcacagatcttgacgtactccatcagtggccgggctcgagggctcggatgagtcggagtactcctcggacgaggagaattcctccgactcgtccgaggagggtggcggcggcgacggcgacgacgacggaggcgacggtgacggcggcggtgacagcggcaagggtggcggcggcgacggcagtggcggcagcaagggcagcagcaagggcagcaacaaggccagtggctagacgccactagttttatatgttagtgtagattagtagtagaaatagtattagcgaagtaatgtagtagaagctagtagtatagttagttaaatgtaatgtagtagaaggg

SEQ ID NO: 5543 - DNA, 2955 bp, Zea Mays
ggacaacgtcgaactttggcccagcaagctcacaccccgaaattccacctcaaaaatcaaaaagagaaaaaaagaaagaaaaaaaaggcgaaacccttctctcccccgccccaacccgatctctcgctgcctgcctccctccggtcccccgtggccccgtcccctcttcgccaccgcaccgactcgctcacaaaatcctcacgccggactcctccgccgcctccgccgcgccatgcccgtcggcgcctgattcatgtctcagccccacgccgccgctcccgcctcgaagcgccccttctcgtccaccaccacatccccgtctccgacgtcctcccctgcgacgccgcttatgaagaaggccaagcacccggccgccaccgcctcctccgttgggacggtcgagaagaacggtatccatcttgataccgccgccgccgccgccacgggcgggggccgaacgaacggcgaggaggatgcggaaatggtgctcgtggaccaagatgagctccccgcgcccagcgcgccggcctccgcgggcgttgccgccaacctcttccgaaagaaggccacgcttccgcagccgtcgacctccgcccgcaagcccctccgcatcagaataggtcaaccaaaactgccaaaaaacttcgaagaggatacatggacgattttgaaggatgctatcacagctatttttctcaagcagaaactttcttgtgatgttgagaaactctatcaggctgctggtgatctttgtctacacaagctaggggcaaacctatacgaacgaatcaagaaagaatgtgaaatacacatagctgaaaagatatcagcattagtgggccaaagcccagatttggttgtatttttgtctctggtccaaagaacatggcaagatttttgtgatcagatgttgattattcgcggtattgctttacttcttgatgtaaaatatgtcaagaatgtagcaaatatttgttcagtatgggatatggggctgcagctgtttcgcaagcatctatcactatccccagagattgaacacaaaactgtaactggccttctcagattgattgagagtgagaggcttggtgaagcaatagataggacattacttagtcatcttttgaagatgcttaccgctcttggaatgtattctgagagttttgaaaagccctttcttgagtgcacttctgaattttatgctacggaaggtgttaaatatatgcaacaatctgatattccagactacctgaagcatgtagagtcgaggttgcaagaagaacatgaaaggtgcattctgtatttggaagctaacacgaggaagccactgatcgcaactactgaaacacaattgctagaccgtcatacatctgcaattattgagaaggggttcgcaatgctcatggatgcaaatcgtataaatgacctcttgaggatgtacaaccttttccagagggttaatgctgttgagctgctaaaacaagcacttagttcatatatccgggctacaggccagggcattattatggatgaagaaaaggacagagagttagttccatttcttcttgattttaaggcatccctcgacaaaatattggaagaaagttttgctaaaaatgaggctttctccaataccatgaaagattcgtttgagcaccttatcaatctaagacagaaccgtcctgcggaattgattgcaaagtttcttgatgagaaacttcgagctggcaataaagggacatcagaagaagagctggagggcatacttgataaagttttggtcatgtttcggtttatacaaggtaaagatgtatttgaggcattctacaagaaagatctagctaagaggttgctgcttgggaagagcgcatcaatagatgctgaaaaatcgatgatcacaaaactcaaaactgagtgtggaagtcagtttaccaataagctggagggaatgttcaaggacattgaattatccaaagaaataaacgattcattcaggcaatcatctcaagctaggacaaagcttccctcaggcattgaaatgagtgttcatgtgcttacaacaggctattggcctacatatccaccaatggacgtgaaactcccacacgaactgaatgtgtatcaggatatatttaaagagttctatttgagcaagtacagtggaaggcgtttaatgtggcatgcctatcagttgaaactatctgagatcaataattatgttttcccgtaacttattgctgccatcagagtgtggttttgatgttgttcaatgacgcacaaaaattaagcttccttgacatcaaagattccactggtatcgaggataaagaattgagacggacactgcaatcgcttgcatgtggtaaagttcgggttctccaaaagataccaaaagggagagatgtagaagataaggatgactttgtattcaatgaagattttagtgctcccctctatcgcataaaggtaaatgcaattcaaatgaaggagacggtagaagaaaacacgagcaccactgagagagtgttccaggatcggcagtatcaggttgatgcggccatagttcgaataatgaagacgcggaaggtcctgagccacacccttctaataaccgagctttaccagcagcttaagttccctgttaagccagctgatatcaagaaaagaatagagagcttaatagaccgggagtacctggagcgggacaggagtaacccccagatctacaactatctggcttgacagagctttggaggatcattaaagagaccgctcactttattatcagaaaagacactgtaaattggtttgttttccagttccttgttctttcctgtttttcttctctgggagggagttgtaactgttgcaacgtgtctgtatacgagaacgtctttttttcagtattagtataaaatgtataagcataatgcatgtatctgtttacattacatg

SEQ ID NO: 5544 - DNA, 4020 bp, Zea Mays
ggacaacgtcgaactttggcccagcaagctcacaccccgaaattccacctcaaaaatcaaaaagagaaaaaaagaaagaaaaaaaaggcgaaacccttctctcccccgccccaacccgatctctcgctgcctgcctccctccggtcccccgtggccccgtcccctcttcgccaccgcaccgactcgctcacaaaatcctcacgccggactcctccgccgcctccgccgcgccatgcccgtcggcgcctgattcatgtctcagccccacgccgccgctcccgcctcgaagcgccccttctcgtccaccaccacatccccgtctccgacgtcctcccctgcgacgccgcttatgaagaaggccaagcacccggccgccaccgcctcctccgttgggacggtcgagaagaacggtatccatcttgataccgccgccgccgccgccacgggcgggggccgaacgaacggcgaggaggatgcggaaatggtgctcgtggaccaagatgagctccccgcgcccagcgcgccggcctccgcgggcgttgccgccaacctcttccgaaagaaggccacgcttccgcagccgtcgacctccgcccgcaagcccctccgcatcagaataggcgcgcccccaataccttattatgcgaattgcttactctgcgagtcttgtgcgattgatcgtcatcgtcactgagggggtgtggtcgcaattgattccagtcctgttgtttcggatatgttacttgccatctcgcgggctagcccaaagttttttcatgcctgacattagggttaaaagtcatatatccgtttacatatcacttgtttacctttcactaccagccgccacctggacccacctaaaattagctctttgatggacgcaatatggaaattggctagatctgcacattgtttctggaaaactggtgttttggtagcctattatggcatttcgggttttcttttctcgagagttgattattgttgggacatttcatattttatacctgctcataccatcagactgatcagaagagagatttgccataggaaacataatacttctgttgagcggctgcgtttagttgtttgcttctgtatatttcaagtactttgtaaattgccacacggttcacctgtctttctaactagccgttcataagcatttgattaacacatatgtaaacgagagagaaaccgagaaggatctgttttccactgagaagaattaggcacacaaatctagtcaaaggggaatataatcttggtggtggactggtatacagacacctcacccccagcaactgagctggagtcagttcctgtttgattaattgtacccctagtaccatggtttggcttggcattcgttggcacctatgtgtgacaacctccaatattgggaaatgacagcccaattcctttgaaacaactcattatgatgtacttcagcacacactatttgctgattccttttacttgctacgacaccagttgctggcaaattcatattgaacgcatgtatgcaaatcttataaatcacgagtcactagcaaagacatgctgaacatgtgtatttgaaaatttgaatatcagaattcattgggtttccttttcacaacctttgcttaatgccatagcactatgtctaaatgccattctggccatcatgcactcattaggtcaaccaaaactgccaaaaaacttcgaagaggatacatggacgattttgaaggatgctatcacagctatttttctcaagcagaaactttcttgtgatgttgagaaactctatcaggctgctggtgatctttgtctacacaagctaggggcaaacctatacgaacgaatcaagaaagaatgtgaaatacacatagctgaaaagatatcagcattagtgggccaaagcccagatttggttgtatttttgtctctggtccaaagaacatggcaagatttttgtgatcagatgttgattattcgcggtattgctttacttcttgatgtaaaatatgtcaagaatgtagcaaatatttgttcagtatgggatatggggctgcagctgtttcgcaagcatctatcactatccccagagattgaacacaaaactgtaactggccttctcagattgattgagagtgagaggcttggtgaagcaatagataggacattacttagtcatcttttgaagatgcttaccgctcttggaatgtattctgagagttttgaaaagccctttcttgagtgcacttctgaattttatgctacggaaggtgttaaatatatgcaacaatctgatattccagactacctgaagcatgtagagtcgaggttgcaagaagaacatgaaaggtgcattctgtatttggaagctaacacgaggaagccactgatcgcaactactgaaacacaattgctagaccgtcatacatctgcaattattgagaaggggttcgcaatgctcatggatgcaaatcgtataaatgacctcttgaggatgtacaaccttttccagagggttaatgctgttgagctgctaaaacaagcacttagttcatatatccgggctacaggccagggcattattatggatgaagaaaaggacagagagttagttccatttcttcttgattttaaggcatccctcgacaaaatattggaagaaagttttgctaaaaatgaggctttctccaataccatgaaagattcgtttgagcaccttatcaatctaagacagaaccgtcctgcggaattgattgcaaagtttcttgatgagaaacttcgagctggcaataaagggacatcagaagaagagctggagggcatacttgataaagttttggtcatgtttcggtttatacaaggtaaagatgtatttgaggcattctacaagaaagatctagctaagaggttgctgcttgggaagagcgcatcaatagatgctgaaaaatcgatgatcacaaaactcaaaactgagtgtggaagtcagtttaccaataagctggagggaatgttcaaggacattgaattatccaaagaaataaacgattcattcaggcaatcatctcaagctaggacaaagcttccctcaggcattgaaatgagtgttcatgtgcttacaacaggctattggcctacatatccaccaatggacgtgaaactcccacacgaactgaatgtgtatcaggatatatttaaagagttctatttgagcaagtacagtggaaggcgtttaatgtggcatgcctatcagttgaaactatctgagatcaataattatgttttcccgtaacttattgctgccatcagagtgtggttttgatgttgttcaatgacgcacaaaaattaagcttccttgacatcaaagattccactggtatcgaggataaagaattgagacggacactgcaatcgcttgcatgtggtaaagttcgggttctccaaaagataccaaaagggagagatgtagaagataaggatgactttgtattcaatgaagattttagtgctcccctctatcgcataaaggtaaatgcaattcaaatgaaggagacggtagaagaaaacacgagcaccactgagagagtgttccaggatcggcagtatcaggttgatgcggccatagttcgaataatgaagacgcggaaggtcctgagccacacccttctaataaccgagctttaccagcagcttaagttccctgttaagccagctgatatcaagaaaagaatagagagcttaatagaccgggagtacctggagcgggacaggagtaacccccagatctacaactatctggcttgacagagctttggaggatcattaaagagaccgctcactttattatcagaaaagacactgtaaattggtttgttttccagttccttgttctttcctgtttttcttctctgggagggagttgtaactgttgcaacgtgtctgtatacgagaacgtctttttttcagtattagtataaaatgtataagcataatgcatgtatctgtttacattacatg

SEQ ID NO: 5545 - DNA, 4668 bp, Zea Mays
acggccagtcgtcgactcgtcgtcttctctacctggcgctctcccagatcagatcaccaccaccgcccaccgcccaccaccgctcaccgagctcgcggtcgccggagatcaccgttctccggcggccccgcgtacgccggtatcagtaaagaccagcgccgctagggttttggacctatggatccgctccggagctacctgggccggatcctcctcgaagagatcacaccggtggtgatggtgctgtccacaccgctcgccgaggccgcctgccgtaagaacggcctcagcttcgtcgacatgctctccccgttctcgctcttcaaaaaaatcgacgtgcccgtgcggacggcgagcgaggttccgtacaggctgcaaatgtttaagatccggatggtttacgcgtccgacgtccggaaggaggactgcgaggtggcagacgagaagattaagcctgtagtttctgaggccaatgagaaggctcttccggatttgctttcagacccgcctcaggctgaagatgtacttggaaagcctgaggccgagctgtgcccattgtggattaagaagttcaatagagaactaatgcgaacactctcattttcggagcatgaaacgtttgaccatcccgtggcatgtcttctagttgtgtcatcaatggacaaagaaccagtcaataaatttgttgatctcttcaacacaaatcagttgccatctcttttgaatgaaggcataatggatccacagattttgaagcattatcttgtacttcatgaccagcaagaggggccacaagacatagctgtgaatgtcttagctgaaatgaggagtacccttggtctgaatgactgtaaattattatgcataaattcgtctacagaagcaggtggtagtaatgctgacaattcatggctaccttataaagctcttgttttgaacaatcatgatggatcctgtattcttagtgtggatgatctgaatgagataaaggacttcatgcaagattttgtttcaaaccatatcatcccctacatggaacaaaagatccgtgtcctcaatcagcaggtagccacaacaagaaagggttttagaaatcagatcaagaacttgtggtggagaaaaagagatgatgtcccagaagctccaaatgggccaatgtatacattcacctccatagaatcacagatcagagtacttggtgatttcgccttcatgttacgggactacgagcttgccttgtcaaactacagactactcgctactgattataagcttgataaggcttggaagcgatttgctggtgtacaggagatgagtggactttgctatttcattttggatcagtcgaggaaggacgcggagtattgcatggaaaatgccttcagtacatatttgagaattggatcttctggccagagaaatgctactagatgtggcctttggtgggctgaaatgcttaaaacaagaggacagtatagggaagcatctaatgtgtatttccgtgtttctaatgaggaaccttctttgcattctgctgtactgcttgagcaagccgcttgttgctatctattatgcaatccacccatgcttcggaaatacggatttcacctaatcttagctgggaatagctacttcgtgtctgatcagaaacaacatgctgttcgggtgtacagaaatgctttgttcgtttacaaacaaaacccttggagttacatcaacaatcatgtacactttaatattggaaggtggtatggagttctcgggatacttgacgtagccatcaagcacttgcttgaggtcattgcttgtagccatcagtcgctgactacacaaaacatgttcctcaatgattttttccattatgttcagagcatggggaagaaatttgatgtgtacaagctccaacttcctgtttttaacatgtcatctctcaaagttctacatgaggatcatcgcacttatgcatcacatgcagatgttggcgttagtgaaagcacgtggcaggagctggaggaagaattgatcccatcatcatcaattgtcaaaactaattggctggatactcagccaatgagaaaatacaaggactcctgtatttgtgtggctggagaagcagtaaaattgagtgttgaacttaaaaatcccctccaaattcctgttgctgtttctggcatctctattatatgccagctttccagcactttggatgcattaagttctgatgttagtggactggacttggatggtggggaagataaggttaacacagagccatctatttcaatgttggagactgatggagataagtttacattgtcaaagcttgacattgtattaggaggaggtgaaagtaaaagagtgcaacttgatgttactccaaaggttgaaggtattttgaagttggttgggataaggtggactctttcagagtcagtagtaggttatcaatactttgaatttaatgcacagaaaaaaatcaagaaagggaaaagaggcccacaccgttcttggaataacagcctggttgtaatcaagggtttaccaaaacttacaggatctattgatcgcatgcctacaaaagcgtttgctggtgatttaaagctgcttacactaaatctgagaaaccattccgaatatgctgtgaagggtataaaaatgaaacttagcaacccaagatttttaattcccggcgattcatcggacattggcctcaagttcccacactgcttaaagaggcacgtgcaatcagaaagcagtgttgtatcagccaaaactatgaaggacaatttcaagagtctgctctttgcatttcctcaggatatagaaattcaagcaggggcagcactctcttggcctatttggtttcatgcggcaactcctggaaatgtttctctttatatatctctgtattacgaaatggggagttccagtgatattaaataccgtacactacgcatgcacttcaatcttgaggttttgccgtcacttgacgtatccttttctgtaagcacgtcctcatcaagattgcaagagtatattgttcgcatggatgtcatgaacaagactccatcagagtcatttgtgcttcatcagttatcatgtgtcggtgataaatgggcagtttcagcattggcggcgtgcagttcaatcaactctgttgaaacagtatcagaaaatcaggctgtgtcgtacttcttcaaaattaaggattgtgaggcggattcttgtaaagaggcagaaagtgattcctgcacaagcgatatggctttgtgtccaggaagtagcactgatctgtttgacattgcacgatctccttttgttgattttcaccatcaagaaagatgcaggcaagtgaagatggcaaaggggccatgcagccttcttgattttgttctaatctcaaaggcagttgataactcttccaagcctactccagacttcgaactactttctcatcacacatgtcattgcagtgctctaagccagaaccctatatggtggcttatggaagggcctcggacaattagtcatgatttctcaaagtcttattgtgaggctaacctccaattggtcattcacaattcagaagctcataagattttggtgagagtggtcacttttgatgtaattccagagaaaaccgtccatcctcatgactcaaccagtgctcagggtggatggtatgatgtatcactggaaagtgacgtaaaggccatctctagttccaagagtacacatcaagagaagcgatcttcgaagagcattccaccatatgtttggtgttcattgagttgtgctcaaatcgagctccaacctgacagttgtgctagagttcctctaaaagtgtgcatatttgcaccgggcacatacaatttttccaattatgagctgcaatggaaagtgcatctatctgagggaccacatgtgggtgaaaatgagaaccggttatctggcggtggtctaggctatcctttctatgtcactgtccttcaaggtgtctaagtaattatcaggattcaagaagtaccttcttgagcgtcaatatagaccagtgcaaaactcaggaactacacccaattgcaacgggctgatgataataggtgccagccagtccagtttgtgcaaagatctgccccggaagttccctgactgaatatacttggatacgctcatggttctgcttcggtaccgatatatttacacgtcattttgaaggatgagttctggtgagtacatgtatacaattgtcgctgggaacaaaaactaacggtaattgctggtggatttttggcagacagaatataccgatagaagttttgcttgtctaattgttgatggtggctagtaggagcatatactattcctgtacatcctgtttaacttgtcgctgctagacgatttcgcaaatgtagtatgtagtggtagatggatccgataaattttctgtaattttgacgaggtaatcaggcaatcgtctcgagattgttgttgtatgggcgacagtattttttcattgtttgtacaatccttttaaaaatcatcgtctggccttgagcctttatgccatatgggtatatgttgattccccttttcagttcctcgtatcgacgtccagctgtccacatcaggtgcaagtgtctgaggggtgctgttatttttgatattttc

SEQ ID NO: 5546 - DNA, 4775 bp, Zea Mays
gtcgactcgtcgtcttctctacctggcgctctcccagatcagatcaccaccaccgcccaccgcccaccaccgctcaccgagctcgcggtcgccggagatcaccgttctccggcggccccgcgtacgccggtatcagtaaaggttggttatccacatcgaaaccccagctcgcgcctcccacccgagtcagtcacgccgctaaatttggctcatccgccattcagaccagcgccgctagggttttggacctatggatccgctccggagctacctgggccggatcctcctcgaagagatcacaccggtggtgatggtgctgtccacaccgctcgccgaggccgcctgccgtaagaacggcctcagcttcgtcgacatgctctccccgttctcgctcttcaaaaaaatcgacgtgcccgtgcggacggcgagcgaggttccgtacaggctgcaaatgtttaagatccggatggtttacgcgtccgacgtccggaaggaggactgcgaggtgatcctcaaacattctgacgttgctatcctaggtgtatgtagctacttcggtgtttgatgacctcgatgtttgggaacaggtggcagacgagaagattaagcctgtagtttctgaggccaatgagaaggctcttccggatttgctttcagacccgcctcaggctgaagatgtacttggaaagcctgaggccgagctgtgcccattgtggattaagaagttcaatagagaactaatgcgaacactctcattttcggagcatgaaacgtttgaccatcccgtggcatgtcttctagttgtgtcatcaatggacaaagaaccagtcaataaatttgttgatctcttcaacacaaatcagttgccatctcttttgaatgaaggcataatggatccacagattttgaagcattatcttgtacttcatgaccagcaagaggggccacaagacataaagctcttgttttgaacaatcatgatggatcctgtattcttagtgtggatgatctgaatgagataaaggacttcatgcaagattttgtttcaaaccatatcatcccctacatggaacaaaagatccgtgtcctcaatcagcaggtacacagttgagagtttggtatatcattatgttcatcttatcatttcccaacaagattcagtaccgttttaggtagccacaacaagaaagggttttagaaatcagatcaagaacttgtggtggagaaaaagagatgatgtcccagaagctccaaatgggccaatgtatacattcacctccatagaatcacagatcagagtacttggtgatttcgccttcatgttacgggactacgagcttgccttgtcaaactacagactactcgctactgattataagcttgataaggcttggaagcgatttgctggtgtacaggagatgagtggactttgctatttcattttggatcagtcgaggaaggacgcggagtattgcatggaaaatgccttcagtacatatttgagaattggatcttctggccagagaaatgctactagatgtggcctttggtgggctgaaatgcttaaaacaagaggacagtatagggaagcatctaatgtgtatttccgtgtttctaatgaggaaccttctttgcattctgctgtactgcttgagcaagccgcttgttgctatctattatgcaatccacccatgcttcggaaatacggatttcacctaatcttagctgggaatagctacttcgtgtctgatcagaaacaacatgctgttcgggtgtacagaaatgctttgttcgtttacaaacaaaacccttggagttacatcaacaatcatgtacactttaatattggaaggtggtatggagttctcgggatacttgacgtagccatcaagcacttgcttgaggtcattgcttgtagccatcagtcgctgactacacaaaacatgttcctcaatgattttttccattatgttcagagcatggggaagaaatttgatgtgtacaagctccaacttcctgtttttaacatgtcatctctcaaagttctacatgaggatcatcgcacttatgcatcacatgcagatgttggcgttagtgaaagcacgtggcaggagctggaggaagaattgatcccatcatcatcaattgtcaaaactaattggctggatactcagccaatgagaaaatacaaggactcctgtatttgtgtggctggagaagcagtaaaattgagtgttgaacttaaaaatcccctccaaattcctgttgctgtttctggcatctctattatatgccagctttccagcactttggatgcattaagttctgatgttagtggactggacttggatggtggggaagataaggttaacacagagccatctatttcaatgttggagactgatggagataagtttacattgtcaaagcttgacattgtattaggaggaggtgaaagtaaaagagtgcaacttgatgttactccaaaggttgaaggtattttgaagttggttgggataaggtggactctttcagagtcagtagtaggttatcaatactttgaatttaatgcacagaaaaaaatcaagaaagggaaaagaggcccacaccgttcttggaataacagcctggttgtaatcaagggtttaccaaaacttacaggatctattgatcgcatgcctacaaaagcgtttgctggtgatttaaagctgcttacactaaatctgagaaaccattccgaatatgctgtgaagggtataaaaatgaaacttagcaacccaagatttttaattcccggcgattcatcggacattggcctcaagttcccacactgcttaaagaggcacgtgcaatcagaaagcagtgttgtatcagccaaaactatgaaggacaatttcaagagtctgctctttgcatttcctcaggatatagaaattcaagcaggggcagcactctcttggcctatttggtttcatgcggcaactcctggaaatgtttctctttatatatctctgtattacgaaatggggagttccagtgatattaaataccgtacactacgcatgcacttcaatcttgaggttttgccgtcacttgacgtatccttttctgtaagcacgtcctcatcaagattgcaagagtatattgttcgcatggatgtcatgaacaagactccatcagagtcatttgtgcttcatcagttatcatgtgtcggtgataaatgggcagtttcagcattggcggcgtgcagttcaatcaactctgttgaaacagtatcagaaaatcaggctgtgtcgtacttcttcaaaattaaggattgtgaggcggattcttgtaaagaggcagaaagtgattcctgcacaagcgatatggctttgtgtccaggaagtagcactgatctgtttgacattgcacgatctccttttgttgattttcaccatcaagaaagatgcaggcaagtgaagatggcaaaggggccatgcagccttcttgattttgttctaatctcaaaggcagttgataactcttccaagcctactccagacttcgaactactttctcatcacacatgtcattgcagtgctctaagccagaaccctatatggtggcttatggaagggcctcggacaattagtcatgatttctcaaagtcttattgtgaggctaacctccaattggtcattcacaattcagaagctcataagattttggtgagagtggtcacttttgatgtaattccagagaaaaccgtccatcctcatgactcaaccagtgctcagggtggatggtatgatgtatcactggaaagtgacgtaaaggccatctctagttccaagagtacacatcaagagaagcgatcttcgaagagcattccaccatatgtttggtgttcattgagttgtgctcaaatcgagctccaacctgacagttgtgctagagttcctctaaaagtgtgcatatttgcaccgggcacatacaatttttccaattatgagctgcaatggaaagtgcatctatctgagggaccacatgtgggtgaaaatgagaaccggttatctggcggtggtctaggctatcctttctatgtcactgtccttcaaggtgtctaagtaattatcaggattcaagaagtaccttcttgagcgtcaatatagaccagtgcaaaactcaggaactacacccaattgcaacgggctgatgataataggtgccagccagtccagtttgtgcaaagatctgccccggaagttccctgactgaatatacttggatacgctcatggttctgcttcggtaccgatatatttacacgtcattttgaaggatgagttctggtgagtacatgtatacaattgtcgctgggaacaaaaactaacggtaattgctggtggatttttggcagacagaatataccgatagaagttttgcttgtctaattgttgatggtggctagtaggagcatatactattcctgtacatcctgtttaacttgtcgctgctagacgatttcgcaaatgtagtatgtagtggtagatggatccgataaattttctgtaattttgacgaggtaatcaggcaatcgtctcgagattgttgttgtatgggcgacagtattttttcattgtttgtacaatccttttaaaaatcatcgtctggccttgagcctttatgccatatgggtatatgttgattccccttttcagttcctcgtatcgacgtccagctgtccacatcaggtgcaagtgtctgaggggtgctgttatttttgatattttc

SEQ ID NO: 5547 - DNA, 4823 bp, Zea Mays
gtcttctctacctggcgctctcccagatcagatcaccaccaccgcccaccgcccaccaccgctcaccgagctcgcggtcgccggagatcaccgttctccggcggccccgcgtacgccggtatcagtaaaggttggttatccacatcgaaaccccagctcgcgcctcccacccgagtcagtcacgccgctaaatttggctcatccgccattcagaccagcgccgctagggttttggacctatggatccgctccggagctacctgggccggatcctcctcgaagagatcacaccggtggtgatggtgctgtccacaccgctcgccgaggccgcctgccgtaagaacggcctcagcttcgtcgacatgctctccccgttctcgctcttcaaaaaaatcgacgtgcccgtgcggacggcgagcgaggttccgtacaggctgcaaatgtttaagatccggatggtttacgcgtccgacgtccggaaggaggactgcgaggtgatcctcaaacattctgacgttgctatcctaggtgtatgtagctacttcggtgtttgatgacctcgatgtttgggaacaggtggcagacgagaagattaagcctgtagtttctgaggccaatgagaaggctcttccggatttgctttcagacccgcctcaggctgaagatgtacttggaaagcctgaggccgagctgtgcccattgtggattaagaagttcaatagagaactaatgcgaacactctcattttcggagcatgaaacgtttgaccatcccgtggcatgtcttctagttgtgtcatcaatggacaaagaaccagtcaataaatttgttgatctcttcaacacaaatcagttgccatctcttttgaatgaaggcataatggatccacagattttgaagcattatcttgtacttcatgaccagcaagaggggccacaagacatagctgtgaatgtcttagctgaaatgaggagtacccttggtctgaatgactgtaaattattatgcataaattcgtctacagaagcaggtggtagtaatgctgacaattcatggctaccttataaagctcttgttttgaacaatcatgatggatcctgtattcttagtgtggatgatctgaatgagataaaggacttcatgcaagattttgtttcaaaccatatcatcccctacatggaacaaaagatccgtgtcctcaatcagcagtaccgttttaggtagccacaacaagaaagggttttagaaatcagatcaagaacttgtggtggagaaaaagagatgatgtcccagaagctccaaatgggccaatgtatacattcacctccatagaatcacagatcagagtacttggtgatttcgccttcatgttacgggactacgagcttgccttgtcaaactacagactactcgctactgattataagcttgataaggcttggaagcgatttgctggtgtacaggagatgagtggactttgctatttcattttggatcagtcgaggaaggacgcggagtattgcatggaaaatgccttcagtacatatttgagaattggatcttctggccagagaaatgctactagatgtggcctttggtgggctgaaatgcttaaaacaagaggacagtatagggaagcatctaatgtgtatttccgtgtttctaatgaggaaccttctttgcattctgctgtactgcttgagcaagccgcttgttgctatctattatgcaatccacccatgcttcggaaatacggatttcacctaatcttagctgggaatagctacttcgtgtctgatcagaaacaacatgctgttcgggtgtacagaaatgctttgttcgtttacaaacaaaacccttggagttacatcaacaatcatgtacactttaatattggaaggtggtatggagttctcgggatacttgacgtagccatcaagcacttgcttgaggtcattgcttgtagccatcagtcgctgactacacaaaacatgttcctcaatgattttttccattatgttcagagcatggggaagaaatttgatgtgtacaagctccaacttcctgtttttaacatgtcatctctcaaagttctacatgaggatcatcgcacttatgcatcacatgcagatgttggcgttagtgaaagcacgtggcaggagctggaggaagaattgatcccatcatcatcaattgtcaaaactaattggctggatactcagccaatgagaaaatacaaggactcctgtatttgtgtggctggagaagcagtaaaattgagtgttgaacttaaaaatcccctccaaattcctgttgctgtttctggcatctctattatatgccagctttccagcactttggatgcattaagttctgatgttagtggactggacttggatggtggggaagataaggttaacacagagccatctatttcaatgttggagactgatggagataagtttacattgtcaaagcttgacattgtattaggaggaggtgaaagtaaaagagtgcaacttgatgttactccaaaggttgaaggtattttgaagttggttgggataaggtggactctttcagagtcagtagtaggttatcaatactttgaatttaatgcacagaaaaaaatcaagaaagggaaaagaggcccacaccgttcttggaataacagcctggttgtaatcaagggtttaccaaaacttacaggatctattgatcgcatgcctacaaaagcgtttgctggtgatttaaagctgcttacactaaatctgagaaaccattccgaatatgctgtgaagggtataaaaatgaaacttagcaacccaagatttttaattcccggcgattcatcggacattggcctcaagttcccacactgcttaaagaggcacgtgcaatcagaaagcagtgttgtatcagccaaaactatgaaggacaatttcaagagtctgctctttgcatttcctcaggatatagaaattcaagcaggggcagcactctcttggcctatttggtttcatgcggcaactcctggaaatgtttctctttatatatctctgtattacgaaatggggagttccagtgatattaaataccgtacactacgcatgcacttcaatcttgaggttttgccgtcacttgacgtatccttttctgtaagcacgtcctcatcaagattgcaagagtatattgttcgcatggatgtcatgaacaagactccatcagagtcatttgtgcttcatcagttatcatgtgtcggtgataaatgggcagtttcagcattggcggcgtgcagttcaatcaactctgttgaaacagtatcagaaaatcaggctgtgtcgtacttcttcaaaattaaggattgtgaggcggattcttgtaaagaggcagaaagtgattcctgcacaagcgatatggctttgtgtccaggaagtagcactgatctgtttgacattgcacgatctccttttgttgattttcaccatcaagaaagatgcaggcaagtgaagatggcaaaggggccatgcagccttcttgattttgttctaatctcaaaggcagttgataactcttccaagcctactccagacttcgaactactttctcatcacacatgtcattgcagtgctctaagccagaaccctatatggtggcttatggaagggcctcggacaattagtcatgatttctcaaagtcttattgtgaggctaacctccaattggtcattcacaattcagaagctcataagattttggtgagagtggtcacttttgatgtaattccagagaaaaccgtccatcctcatgactcaaccagtgctcagggtggatggtatgatgtatcactggaaagtgacgtaaaggccatctctagttccaagagtacacatcaagagaagcgatcttcgaagagcattccaccatatgtttggtgttcattgagttgtgctcaaatcgagctccaacctgacagttgtgctagagttcctctaaaagtgtgcatatttgcaccgggcacatacaatttttccaattatgagctgcaatggaaagtgcatctatctgagggaccacatgtgggtgaaaatgagaaccggttatctggcggtggtctaggctatcctttctatgtcactgtccttcaaggtgtctaagtaattatcaggattcaagaagtaccttcttgagcgtcaatatagaccagtgcaaaactcaggaactacacccaattgcaacgggctgatgataataggtgccagccagtccagtttgtgcaaagatctgccccggaagttccctgactgaatatacttggatacgctcatggttctgcttcggtaccgatatatttacacgtcattttgaaggatgagttctggtgagtacatgtatacaattgtcgctgggaacaaaaactaacggtaattgctggtggatttttggcagacagaatataccgatagaagttttgcttgtctaattgttgatggtggctagtaggagcatatactattcctgtacatcctgtttaacttgtcgctgctagacgatttcgcaaatgtagtatgtagtggtagatggatccgataaattttctgtaattttgacgaggtaatcaggcaatcgtctcgagattgttgttgtatgggcgacagtattttttcattgtttgtacaatccttttaaaaatcatcgtctggccttgagcctttatgccatatgggtatatgttgattccccttttcagttcctcgtatcgacgtccagctgtccacatcaggtgcaagtgtctgaggggtgctgttatttttgatattttc

SEQ ID NO: 5548 - DNA, 4702 bp, Zea Mays
cccagatcagatcaccaccaccgcccaccgcccaccaccgctcaccgagctcgcggtcgccggagatcaccgttctccggcggccccgcgtacgccggtatcagtaaaggttggttatccacatcgaaaccccagctcgcgcctcccacccgagtcagtcacgccgctaaatttggctcatccgccattcagaccagcgccgctagggttttggacctatggatccgctccggagctacctgggccggatcctcctcgaagagatcacaccggtggtgatggtgctgtccacaccgctcgccgaggccgcctgccgtaagaacggcctcagcttcgtcgacatgctctccccgttctcgctcttcaaaaaaatcgacgtgcccgtgcggacggcgagcgaggttccgtacaggctgcaaatgtttaagatccggatggtttacgcgtccgacgtccggaaggaggactgcgagacgagaagattaagcctgtagtttctgaggccaatgagaaggctcttccggatttgctttcagacccgcctcaggctgaagatgtacttggaaagcctgaggccgagctgtgcccattgtggattaagaagttcaatagagaactaatgcgaacactctcattttcggagcatgaaacgtttgaccatcccgtggcatgtcttctagttgtgtcatcaatggacaaagaaccagtcaataaatttgttgatctcttcaacacaaatcagttgccatctcttttgaatgaaggcataatggatccacagattttgaagcattatcttgtacttcatgaccagcaagaggggccacaagacatagctgtgaatgtcttagctgaaatgaggagtacccttggtctgaatgactgtaaattattatgcataaattcgtctacagaagcaggtggtagtaatgctgacaattcatggctaccttataaagctcttgttttgaacaatcatgatggatcctgtattcttagtgtggatgatctgaatgagataaaggacttcatgcaagattttgtttcaaaccatatcatcccctacatggaacaaaagatccgtgtcctcaatcagcaggtagccacaacaagaaagggttttagaaatcagatcaagaacttgtggtggagaaaaagagatgatgtcccagaagctccaaatgggccaatgtatacattcacctccatagaatcacagatcagagtacttggtgatttcgccttcatgttacgggactacgagcttgccttgtcaaactacagactactcgctactgattataagcttgataaggcttggaagcgatttgctggtgtacaggagatgagtggactttgctatttcattttggatcagtcgaggaaggacgcggagtattgcatggaaaatgccttcagtacatatttgagaattggatcttctggccagagaaatgctactagatgtggcctttggtgggctgaaatgcttaaaacaagaggacagtatagggaagcatctaatgtgtatttccgtgtttctaatgaggaaccttctttgcattctgctgtactgcttgagcaagccgcttgttgctatctattatgcaatccacccatgcttcggaaatacggatttcacctaatcttagctgggaatagctacttcgtgtctgatcagaaacaacatgctgttcgggtgtacagaaatgctttgttcgtttacaaacaaaacccttggagttacatcaacaatcatgtacactttaatattggaaggtggtatggagttctcgggatacttgacgtagccatcaagcacttgcttgaggtcattgcttgtagccatcagtcgctgactacacaaaacatgttcctcaatgattttttccattatgttcagagcatggggaagaaatttgatgtgtacaagctccaacttcctgtttttaacatgtcatctctcaaagttctacatgaggatcatcgcacttatgcatcacatgcagatgttggcgttagtgaaagcacgtggcaggagctggaggaagaattgatcccatcatcatcaattgtcaaaactaattggctggatactcagccaatgagaaaatacaaggactcctgtatttgtgtggctggagaagcagtaaaattgagtgttgaacttaaaaatcccctccaaattcctgttgctgtttctggcatctctattatatgccagctttccagcactttggatgcattaagttctgatgttagtggactggacttggatggtggggaagataaggttaacacagagccatctatttcaatgttggagactgatggagataagtttacattgtcaaagcttgacattgtattaggaggaggtgaaagtaaaagagtgcaacttgatgttactccaaaggttgaaggtattttgaagttggttgggataaggtggactctttcagagtcagtagtaggttatcaatactttgaatttaatgcacagaaaaaaatcaagaaagggaaaagaggcccacaccgttcttggaataacagcctggttgtaatcaagggtttaccaaaacttacaggatctattgatcgcatgcctacaaaagcgtttgctggtgatttaaagctgcttacactaaatctgagaaaccattccgaatatgctgtgaagggtataaaaatgaaacttagcaacccaagatttttaattcccggcgattcatcggacattggcctcaagttcccacactgcttaaagaggcacgtgcaatcagaaagcagtgttgtatcagccaaaactatgaaggacaatttcaagagtctgctctttgcatttcctcaggatatagaaattcaagcaggggcagcactctcttggcctatttggtttcatgcggcaactcctggaaatgtttctctttatatatctctgtattacgaaatggggagttccagtgatattaaataccgtacactacgcatgcacttcaatcttgaggttttgccgtcacttgacgtatccttttctgtaagcacgtcctcatcaagattgcaagagtatattgttcgcatggatgtcatgaacaagactccatcagagtcatttgtgcttcatcagttatcatgtgtcggtgataaatgggcagtttcagcattggcggcgtgcagttcaatcaactctgttgaaacagtatcagaaaatcaggctgtgtcgtacttcttcaaaattaaggattgtgaggcggattcttgtaaagaggcagaaagtgattcctgcacaagcgatatggctttgtgtccaggaagtagcactgatctgtttgacattgcacgatctccttttgttgattttcaccatcaagaaagatgcaggcaagtgaagatggcaaaggggccatgcagccttcttgattttgttctaatctcaaaggcagttgataactcttccaagcctactccagacttcgaactactttctcatcacacatgtcattgcagtgctctaagccagaaccctatatggtggcttatggaagggcctcggacaattagtcatgatttctcaaagtcttattgtgaggctaacctccaattggtcattcacaattcagaagctcataagattttggtgagagtggtcacttttgatgtaattccagagaaaaccgtccatcctcatgactcaaccagtgctcagggtggatggtatgatgtatcactggaaagtgacgtaaaggccatctctagttccaagagtacacatcaagagaagcgatcttcgaagagcattccaccatatgtttggtgttcattgagttgtgctcaaatcgagctccaacctgacagttgtgctagagttcctctaaaagtgtgcatatttgcaccgggcacatacaatttttccaattatgagctgcaatggaaagtgcatctatctgagggaccacatgtgggtgaaaatgagaaccggttatctggcggtggtctaggctatcctttctatgtcactgtccttcaaggtgtctaagtaattatcaggattcaagaagtaccttcttgagcgtcaatatagaccagtgcaaaactcaggaactacacccaattgcaacgggctgatgataataggtgccagccagtccagtttgtgcaaagatctgccccggaagttccctgactgaatatacttggatacgctcatggttctgcttcggtaccgatatatttacacgtcattttgaaggatgagttctggtgagtacatgtatacaattgtcgctgggaacaaaaactaacggtaattgctggtggatttttggcagacagaatataccgatagaagttttgcttgtctaattgttgatggtggctagtaggagcatatactattcctgtacatcctgtttaacttgtcgctgctagacgatttcgcaaatgtagtatgtagtggtagatggatccgataaattttctgtaattttgacgaggtaatcaggcaatcgtctcgagattgttgttgtatgggcgacagtattttttcattgtttgtacaatccttttaaaaatcatcgtctggccttgagcctttatgccatatgggtatatgttgattccccttttcagttcctcgtatcgacgtccagctgtccacatcaggtgcaagtgtctgaggggtgctgttatttttgatattttc

SEQ ID NO: 5549 - DNA, 4897 bp, Zea Mays
cgcccaccgcccaccaccgctcaccgagctcgcggtcgccggagatcaccgttctccggcggccccgcgtacgccggtatcagtaaaggttggttatccacatcgaaaccccagctcgcgcctcccacccgagtcagtcacgccgctaaatttggctcatccgccattcagaccagcgccgctagggttttggacctatggatccgctccggagctacctgggccggatcctcctcgaagagatcacaccggtggtgatggtgctgtccacaccgctcgccgaggccgcctgccgtaagaacggcctcagcttcgtcgacatgctctccccgttctcgctcttcaaaaaaatcgacgtgcccgtgcggacggcgagcgaggttccgtacaggctgcaaatgtttaagatccggatggtttacgcgtccgacgtccggaaggaggactgcgaggtgatcctcaaacattctgacgttgctatcctaggtgtatgtagctacttcggtgtttgatgacctcgatgtttgggaacaggtggcagacgagaagattaagcctgtagtttctgaggccaatgagaaggctcttccggatttgctttcagacccgcctcaggctgaagatgtacttggaaagcctgaggccgagctgtgcccattgtggattaagaagttcaatagagaactaatgcgaacactctcattttcggagcatgaaacgtttgaccatcccgtggcatgtcttctagttgtgtcatcaatggacaaagaaccagtcaataaatttgttgatctcttcaacacaaatcagttgccatctcttttgaatgaaggcataatggatccacagattttgaagcattatcttgtacttcatgaccagcaagaggggccacaagacatagctgtgaatgtcttagctgaaatgaggagtacccttggtctgaatgactgtaaattattatgcataaattcgtctacagaagcaggtggtagtaatgctgacaattcatggctaccttataaagctcttgttttgaacaatcatgatggatcctgtattcttagtgtggatgatctgaatgagataaaggacttcatgcaagattttgtttcaaaccatatcatcccctacatggaacaaaagatccgtgtcctcaatcagcaggtagccacaacaagaaagggttttagaaatcagatcaagaacttgtggtggagaaaaagagatgatgtcccagaagctccaaatgggccaatgtatacattcacctccatagaatcacagatcagagtacttggtgatttcgccttcatgttacgggactacgagcttgccttgtcaaactacagactactcgctactgattataagcttgataaggcttggaagcgatttgctggtgtacaggagatgagtggactttgctatttcattttggatcagtcgaggaaggacgcggagtattgcatggaaaatgccttcagtacatatttgagaattggatcttctggccagagaaatgctactagatgtggcctttggtgggctgaaatgcttaaaacaagaggacagtatagggaagcatctaatgtgtatttccgtgtttctaatgaggaaccttctttgcattctgctgtactgcttgagcaagccgcttgttgctatctattatgcaatccacccatgcttcggaaatacggatttcacctaatcttagctgggaatagctacttcgtgtctgatcagaaacaacatgctgttcgggtgtacagaaatgctttgttcgtttacaaacaaaacccttggagttacatcaacaatcatgtacactttaatattggaaggtggtatggagttctcgggatacttgacgtagccatcaagcacttgcttgaggtcattgcttgtagccatcagtcgctgactacacaaaacatgttcctcaatgattttttccattatgttcagagcatggggaagaaatttgatgtgtacaagctccaacttcctgtttttaacatgtcatctctcaaagttctacatgaggatcatcgcacttatgcatcacatgcagatgttggcgttagtgaaagcacgtggcaggagctggaggaagaattgatcccatcatcatcaattgtcaaaactaattggctggatactcagccaatgagaaaatacaaggactcctgtatttgtgtggctggagaagcagtaaaattgagtgttgaacttaaaaatcccctccaaattcctgttgctgtttctggcatctctattatatgccagctttccagcactttggatgcattaagttctgatgttagtggactggacttggatggtggggaagataaggttaacacagagccatctatttcaatgttggagactgatggagataagtttacattgtcaaagcttgacattgtattaggaggaggtgaaagtaaaagagtgcaacttgatgttactccaaaggttgaaggtattttgaagttggttgggataaggtggactctttcagagtcagtagtaggttatcaatactttgaatttaatgcacagaaaaaaatcaagaaagggaaaagaggcccacaccgttcttggaataacagcctggttgtaatcaagggtttaccaaaacttacaggatctattgatcgcatgcctacaaaagcgtttgctggtgatttaaagctgcttacactaaatctgagaaaccattccgaatatgctgtgaagggtataaaaatgaaacttagcaacccaagatttttaattcccggcgattcatcggacattggcctcaagttcccacactgcttaaagaggcacgtgcaatcagaaagcagtgttgtatcagccaaaactatgaaggacaatttcaagagtctgctctttgcatttcctcaggatatagaaattcaagcaggggcagcactctcttggcctatttggtttcatgcggcaactcctggaaatgtttctctttatatatctctgtattacgaaatggggagttccagtgatattaaataccgtacactacgcatgcacttcaatcttgaggttttgccgtcacttgacgtatccttttctgtaagcacgtcctcatcaagattgcaagagtatattgttcgcatggatgtcatgaacaagactccatcagagtcatttgtgcttcatcagttatcatgtgtcggtgataaatgggcagtttcagcattggcggcgtgcagttcaatcaactctgttgaaacagtatcagaaaatcaggctgtgtcgtacttcttcaaaattaaggttgaaggcacattcttcaatgaactgccagatacagaacacttcgatggtttccattgtcttattcaatgctcttgttttataagtcttgtgaattcaaggttgtgatatattttcccaatgcatgcttgtttgaaggattgtgaggcggattcttgtaaagaggcagaaagtgattcctgcacaagcgatatggctttgtgtccaggaagtagcactgatctgtttgacattgcacgatctccttttgttgattttcaccatcaagaaagatgcaggcaagtgaagatggcaaagccttcttgattttgttctaatctcaaaggcagttgataactcttccaagcctactccagacttcgaactactttctcatcacacatgtcattgcagtgctctaagccagaaccctatatggtggcttatggaagggcctcggacaattagtcatgatttctcaaagtcttattgtgaggctaacctccaattggtcattcacaattcagaagctcataagattttggtgagagtggtcacttttgatgtaattccagagaaaaccgtccatcctcatgactcaaccagtgctcagggtggatggtatgatgtatcactggaaagtgacgtaaaggccatctctagttccaagagtacacatcaagagaagcgatcttcgaagagcattccaccatatgtttggtgttcattgagttgtgctcaaatcgagctccaacctgacagttgtgctagagttcctctaaaagtgtgcatatttgcaccgggcacatacaatttttccaattatgagctgcaatggaaagtgcatctatctgagggaccacatgtgggtgaaaatgagaaccggttatctggcggtggtctaggctatcctttctatgtcactgtccttcaaggtgtctaagtaattatcaggattcaagaagtaccttcttgagcgtcaatatagaccagtgcaaaactcaggaactacacccaattgcaacgggctgatgataataggtgccagccagtccagtttgtgcaaagatctgccccggaagttccctgactgaatatacttggatacgctcatggttctgcttcggtaccgatatatttacacgtcattttgaaggatgagttctggtgagtacatgtatacaattgtcgctgggaacaaaaactaacggtaattgctggtggatttttggcagacagaatataccgatagaagttttgcttgtctaattgttgatggtggctagtaggagcatatactattcctgtacatcctgtttaacttgtcgctgctagacgatttcgcaaatgtagtatgtagtggtagatggatccgataaattttctgtaattttgacgaggtaatcaggcaatcgtctcgagattgttgttgtatgggcgacagtattttttcattgtttgtacaatccttttaaaaatcatcgtctggccttgagcctttatgccatatgggtatatgttgattccccttttcagttcctcgtatcgacgtccagctgtccacatcaggtgcaagtgtctgaggggtgctgttatttttgatattttc

SEQ ID NO: 5550 - DNA, 4175 bp, Zea Mays
gtatggtaggcctgaatgctgctgaggtaactaggagagagcctgaggccgagctgtgcccattgtggattaagaagttcaatagagaactaatgcgaacactctcattttcggagcatgaaacgtttgaccatcccgtggcatgtcttctagttgtgtcatcaatggacaaagaaccagtcaataaatttgttgatctcttcaacacaaatcagttgccatctcttttgaatgaaggcataatggatccacagattttgaagcattatcttgtacttcatgaccagcaagaggggccacaagacatagctgtgaatgtcttagctgaaatgaggagtacccttggtctgaatgactgtaaattattatgcataaattcgtctacagaagcaggtggtagtaatgctgacaattcatggctaccttataaagctcttgttttgaacaatcatgatggatcctgtattcttagtgtggatgatctgaatgagataaaggacttcatgcaagattttgtttcaaaccatatcatcccctacatggaacaaaagatccgtgtcctcaatcagcaggtagccacaacaagaaagggttttagaaatcagatcaagaacttgtggtggagaaaaagagatgatgtcccagaagctccaaatgggccaatgtatacattcacctccatagaatcacagatcagagtacttggtgatttcgccttcatgttacgggactacgagcttgccttgtcaaactacagactactcgctactgattataagcttgataaggcttggaagcgatttgctggtgtacaggagatgagtggactttgctatttcattttggatcagtcgaggaaggacgcggagtattgcatggaaaatgccttcagtacatatttgagaattggatcttctggccagagaaatgctactagatgtggcctttggtgggctgaaatgcttaaaacaagaggacagtatagggaagcatctaatgtgtatttccgtgtttctaatgaggaaccttctttgcattctgctgtactgcttgagcaagccgcttgttgctatctattatgcaatccacccatgcttcggaaatacggatttcacctaatcttagctgggaatagctacttcgtgtctgatcagaaacaacatgctgttcgggtgtacagaaatgctttgttcgtttacaaacaaaacccttggagttacatcaacaatcatgtacactttaatattggaaggtggtatggagttctcgggatacttgacgtagccatcaagcacttgcttgaggtcattgcttgtagccatcagtcgctgactacacaaaacatgttcctcaatgattttttccattatgttcagagcatggggaagaaatttgatgtgtacaagctccaacttcctgtttttaacatgtcatctctcaaagttctacatgaggatcatcgcacttatgcatcacatgcagatgttggcgttagtgaaagcacgtggcaggagctggaggaagaattgatcccatcatcatcaattgtcaaaactaattggctggatactcagccaatgagaaaatacaaggactcctgtatttgtgtggctggagaagcagtaaaattgagtgttgaacttaaaaatcccctccaaattcctgttgctgtttctggcatctctattatatgccagctttccagcactttggatgcattaagttctgatgttagtggactggacttggatggtggggaagataaggttaacacagagccatctatttcaatgttggagactgatggagataagtttacattgtcaaagcttgacattgtattaggaggaggtgaaagtaaaagagtgcaacttgatgttactccaaaggttgaaggtattttgaagttggttgggataaggtggactctttcagagtcagtagtaggttatcaatactttgaatttaatgcacagaaaaaaatcaagaaagggaaaagaggcccacaccgttcttggaataacagcctggttgtaatcaagggtttaccaaaacttacaggatctattgatcgcatgcctacaaaagcgtttgctggtgatttaaagctgcttacactaaatctgagaaaccattccgaatatgctgtgaagggtataaaaatgaaacttagcaacccaagatttttaattcccggcgattcatcggacattggcctcaagttcccacactgcttaaagaggcacgtgcaatcagaaagcagtgttgtatcagccaaaactatgaaggacaatttcaagagtctgctctttgcatttcctcaggatatagaaattcaagcaggggcagcactctcttggcctatttggtttcatgcggcaactcctggaaatgtttctctttatatatctctgtattacgaaatggggagttccagtgatattaaataccgtacactacgcatgcacttcaatcttgaggttttgccgtcacttgacgtatccttttctgtaagcacgtcctcatcaagattgcaagagtatattgttcgcatggatgtcatgaacaagactccatcagagtcatttgtgcttcatcagttatcatgtgtcggtgataaatgggcagtttcagcattggcggcgtgcagttcaatcaactctgttgaaacagtatcagaaaatcaggctgtgtcgtacttcttcaaaattaaggattgtgaggcggattcttgtaaagaggcagaaagtgattcctgcacaagcgatatggctttgtgtccaggaagtagcactgatctgtttgacattgcacgatctccttttgttgattttcaccatcaagaaagatgcaggcaagtgaagatggcaaaggggccatgcagccttcttgattttgttctaatctcaaaggcagttgataactcttccaagcctactccagacttcgaactactttctcatcacacatgtcattgcagtgctctaagccagaaccctatatggtggcttatggaagggcctcggacaattagtcatgatttctcaaagtcttattgtgaggctaacctccaattggtcattcacaattcagaagctcataagattttggtgagagtggtcacttttgatgtaattccagagaaaaccgtccatcctcatgactcaaccagtgctcagggtggatggtatgatgtatcactggaaagtgacgtaaaggccatctctagttccaagagtacacatcaagagaagcgatcttcgaagagcattccaccatatgtttggtgttcattgagttgtgctcaaatcgagctccaacctgacagttgtgctagagttcctctaaaagtgtgcatatttgcaccgggcacatacaatttttccaattatgagctgcaatggaaagtgcatctatctgagggaccacatgtgggtgaaaatgagaaccggttatctggcggtggtctaggctatcctttctatgtcactgtccttcaaggtgtctaagtaattatcaggattcaagaagtaccttcttgagcgtcaatatagaccagtgcaaaactcaggaactacacccaattgcaacgggctgatgataataggtgccagccagtccagtttgtgcaaagatctgccccggaagttccctgactgaatatacttggatacgctcatggttctgcttcggtaccgatatatttacacgtcattttgaaggatgagttctggtgagtacatgtatacaattgtcgctgggaacaaaaactaacggtaattgctggtggatttttggcagacagaatataccgatagaagttttgcttgtctaattgttgatggtggctagtaggagcatatactattcctgtacatcctgtttaacttgtcgctgctagacgatttcgcaaatgtagtatgtagtggtagatggatccgataaattttctgtaattttgacgaggtaatcaggcaatcgtctcgagattgttgttgtatgggcgacagtattttttcattgtttgtacaatccttttaaaaatcatcgtctggccttgagcctttatgccatatgggtatatgttgattccccttttcagttcctcgtatcgacgtccagctgtccacatcaggtgcaagtgtctgaggggtgctgttatttttgatattttc

SEQ ID NO: 5551 - DNA, 4043 bp, Zea Mays
ctgaatgctgctgaggtaactaggagagagcctgaggccgagctgtgcccattgtggattaagaagttcaatagagaactaatgcgaacactctcattttcggagcatgaaacgtttgaccatcccgtggcatgtcttctagttgtgtcatcaatggacaaagaaccagtcaataaatttgttgatctcttcaacacaaatcagttgccatctcttttgaatgaaggcataatggatccacagattttgaagcattatcttgtacttcatgaccagcaagaggggccacaagacataaagctcttgttttgaacaatcatgatggatcctgtattcttagtgtggatgatctgaatgagataaaggacttcatgcaagattttgtttcaaaccatatcatcccctacatggaacaaaagatccgtgtcctcaatcagcaggtagccacaacaagaaagggttttagaaatcagatcaagaacttgtggtggagaaaaagagatgatgtcccagaagctccaaatgggccaatgtatacattcacctccatagaatcacagatcagagtacttggtgatttcgccttcatgttacgggactacgagcttgccttgtcaaactacagactactcgctactgattataagcttgataaggcttggaagcgatttgctggtgtacaggagatgagtggactttgctatttcattttggatcagtcgaggaaggacgcggagtattgcatggaaaatgccttcagtacatatttgagaattggatcttctggccagagaaatgctactagatgtggcctttggtgggctgaaatgcttaaaacaagaggacagtatagggaagcatctaatgtgtatttccgtgtttctaatgaggaaccttctttgcattctgctgtactgcttgagcaagccgcttgttgctatctattatgcaatccacccatgcttcggaaatacggatttcacctaatcttagctgggaatagctacttcgtgtctgatcagaaacaacatgctgttcgggtgtacagaaatgctttgttcgtttacaaacaaaacccttggagttacatcaacaatcatgtacactttaatattggaaggtggtatggagttctcgggatacttgacgtagccatcaagcacttgcttgaggtcattgcttgtagccatcagtcgctgactacacaaaacatgttcctcaatgattttttccattatgttcagagcatggggaagaaatttgatgtgtacaagctccaacttcctgtttttaacatgtcatctctcaaagttctacatgaggatcatcgcacttatgcatcacatgcagatgttggcgttagtgaaagcacgtggcaggagctggaggaagaattgatcccatcatcatcaattgtcaaaactaattggctggatactcagccaatgagaaaatacaaggactcctgtatttgtgtggctggagaagcagtaaaattgagtgttgaacttaaaaatcccctccaaattcctgttgctgtttctggcatctctattatatgccagctttccagcactttggatgcattaagttctgatgttagtggactggacttggatggtggggaagataaggttaacacagagccatctatttcaatgttggagactgatggagataagtttacattgtcaaagcttgacattgtattaggaggaggtgaaagtaaaagagtgcaacttgatgttactccaaaggttgaaggtattttgaagttggttgggataaggtggactctttcagagtcagtagtaggttatcaatactttgaatttaatgcacagaaaaaaatcaagaaagggaaaagaggcccacaccgttcttggaataacagcctggttgtaatcaagggtttaccaaaacttacaggatctattgatcgcatgcctacaaaagcgtttgctggtgatttaaagctgcttacactaaatctgagaaaccattccgaatatgctgtgaagggtataaaaatgaaacttagcaacccaagatttttaattcccggcgattcatcggacattggcctcaagttcccacactgcttaaagaggcacgtgcaatcagaaagcagtgttgtatcagccaaaactatgaaggacaatttcaagagtctgctctttgcatttcctcaggatatagaaattcaagcaggggcagcactctcttggcctatttggtttcatgcggcaactcctggaaatgtttctctttatatatctctgtattacgaaatggggagttccagtgatattaaataccgtacactacgcatgcacttcaatcttgaggttttgccgtcacttgacgtatccttttctgtaagcacgtcctcatcaagattgcaagagtatattgttcgcatggatgtcatgaacaagactccatcagagtcatttgtgcttcatcagttatcatgtgtcggtgataaatgggcagtttcagcattggcggcgtgcagttcaatcaactctgttgaaacagtatcagaaaatcaggctgtgtcgtacttcttcaaaattaaggattgtgaggcggattcttgtaaagaggcagaaagtgattcctgcacaagcgatatggctttgtgtccaggaagtagcactgatctgtttgacattgcacgatctccttttgttgattttcaccatcaagaaagatgcaggcaagtgaagatggcaaaggggccatgcagccttcttgattttgttctaatctcaaaggcagttgataactcttccaagcctactccagacttcgaactactttctcatcacacatgtcattgcagtgctctaagccagaaccctatatggtggcttatggaagggcctcggacaattagtcatgatttctcaaagtcttattgtgaggctaacctccaattggtcattcacaattcagaagctcataagattttggtgagagtggtcacttttgatgtaattccagagaaaaccgtccatcctcatgactcaaccagtgctcagggtggatggtatgatgtatcactggaaagtgacgtaaaggccatctctagttccaagagtacacatcaagagaagcgatcttcgaagagcattccaccatatgtttggtgttcattgagttgtgctcaaatcgagctccaacctgacagttgtgctagagttcctctaaaagtgtgcatatttgcaccgggcacatacaatttttccaattatgagctgcaatggaaagtgcatctatctgagggaccacatgtgggtgaaaatgagaaccggttatctggcggtggtctaggctatcctttctatgtcactgtccttcaaggtgtctaagtaattatcaggattcaagaagtaccttcttgagcgtcaatatagaccagtgcaaaactcaggaactacacccaattgcaacgggctgatgataataggtgccagccagtccagtttgtgcaaagatctgccccggaagttccctgactgaatatacttggatacgctcatggttctgcttcggtaccgatatatttacacgtcattttgaaggatgagttctggtgagtacatgtatacaattgtcgctgggaacaaaaactaacggtaattgctggtggatttttggcagacagaatataccgatagaagttttgcttgtctaattgttgatggtggctagtaggagcatatactattcctgtacatcctgtttaacttgtcgctgctagacgatttcgcaaatgtagtatgtagtggtagatggatccgataaattttctgtaattttgacgaggtaatcaggcaatcgtctcgagattgttgttgtatgggcgacagtattttttcattgtttgtacaatccttttaaaaatcatcgtctggccttgagcctttatgccatatgggtatatgttgattccccttttcagttcctcgtatcgacgtccagctgtccacatcaggtgcaagtgtctgaggggtgctgttatttttgatattttc

SEQ ID NO: 5552 - DNA, 4171 bp, Zea Mays
caatggttaacctcttaaccttattaacctttatgagcctgaggccgagctgtgcccattgtggattaagaagttcaatagagaactaatgcgaacactctcattttcggagcatgaaacgtttgaccatcccgtggcatgtcttctagttgtgtcatcaatggacaaagaaccagtcaataaatttgttgatctcttcaacacaaatcagttgccatctcttttgaatgaaggcataatggatccacagattttgaagcattatcttgtacttcatgaccagcaagaggggccacaagacatagctgtgaatgtcttagctgaaatgaggagtacccttggtctgaatgactgtaaattattatgcataaattcgtctacagaagcaggtggtagtaatgctgacaattcatggctaccttataaagctcttgttttgaacaatcatgatggatcctgtattcttagtgtggatgatctgaatgagataaaggacttcatgcaagattttgtttcaaaccatatcatcccctacatggaacaaaagatccgtgtcctcaatcagcaggtagccacaacaagaaagggttttagaaatcagatcaagaacttgtggtggagaaaaagagatgatgtcccagaagctccaaatgggccaatgtatacattcacctccatagaatcacagatcagagtacttggtgatttcgccttcatgttacgggactacgagcttgccttgtcaaactacagactactcgctactgattataagcttgataaggcttggaagcgatttgctggtgtacaggagatgagtggactttgctatttcattttggatcagtcgaggaaggacgcggagtattgcatggaaaatgccttcagtacatatttgagaattggatcttctggccagagaaatgctactagatgtggcctttggtgggctgaaatgcttaaaacaagaggacagtatagggaagcatctaatgtgtatttccgtgtttctaatgaggaaccttctttgcattctgctgtactgcttgagcaagccgcttgttgctatctattatgcaatccacccatgcttcggaaatacggatttcacctaatcttagctgggaatagctacttcgtgtctgatcagaaacaacatgctgttcgggtgtacagaaatgctttgttcgtttacaaacaaaacccttggagttacatcaacaatcatgtacactttaatattggaaggtggtatggagttctcgggatacttgacgtagccatcaagcacttgcttgaggtcattgcttgtagccatcagtcgctgactacacaaaacatgttcctcaatgattttttccattatgttcagagcatggggaagaaatttgatgtgtacaagctccaacttcctgtttttaacatgtcatctctcaaagttctacatgaggatcatcgcacttatgcatcacatgcagatgttggcgttagtgaaagcacgtggcaggagctggaggaagaattgatcccatcatcatcaattgtcaaaactaattggctggatactcagccaatgagaaaatacaaggactcctgtatttgtgtggctggagaagcagtaaaattgagtgttgaacttaaaaatcccctccaaattcctgttgctgtttctggcatctctattatatgccagctttccagcactttggatgcattaagttctgatgttagtggactggacttggatggtggggaagataaggttaacacagagccatctatttcaatgttggagactgatggagataagtttacattgtcaaagcttgacattgtattaggaggaggtgaaagtaaaagagtgcaacttgatgttactccaaaggttgaaggtattttgaagttggttgggataaggtggactctttcagagtcagtagtaggttatcaatactttgaatttaatgcacagaaaaaaatcaagaaagggaaaagaggcccacaccgttcttggaataacagcctggttgtaatcaagggtttaccaaaacttacaggatctattgatcgcatgcctacaaaagcgtttgctggtgatttaaagctgcttacactaaatctgagaaaccattccgaatatgctgtgaagggtataaaaatgaaacttagcaacccaagatttttaattcccggcgattcatcggacattggcctcaagttcccacactgcttaaagaggcacgtgcaatcagaaagcagtgttgtatcagccaaaactatgaaggacaatttcaagagtctgctctttgcatttcctcaggatatagaaattcaagcaggggcagcactctcttggcctatttggtttcatgcggcaactcctggaaatgtttctctttatatatctctgtattacgaaatggggagttccagtgatattaaataccgtacactacgcatgcacttcaatcttgaggttttgccgtcacttgacgtatccttttctgtaagcacgtcctcatcaagattgcaagagtatattgttcgcatggatgtcatgaacaagactccatcagagtcatttgtgcttcatcagttatcatgtgtcggtgataaatgggcagtttcagcattggcggcgtgcagttcaatcaactctgttgaaacagtatcagaaaatcaggctgtgtcgtacttcttcaaaattaaggattgtgaggcggattcttgtaaagaggcagaaagtgattcctgcacaagcgatatggctttgtgtccaggaagtagcactgatctgtttgacattgcacgatctccttttgttgattttcaccatcaagaaagatgcaggcaagtgaagatggcaaaggggccatgcagccttcttgattttgttctaatctcaaaggcagttgataactcttccaagcctactccagacttcgaactactttctcatcacacatgtcattgcagtgctctaagccagaaccctatatggtggcttatggaagggcctcggacaattagtcatgatttctcaaagtcttattgtgaggctaacctccaattggtcattcacaattcagaagctcataagattttggtgagagtggtcacttttgatgtaattccagagaaaaccgtccatcctcatgactcaaccagtgctcagggtggatggtatgatgtatcactggaaagtgacgtaaaggccatctctagttccaagagtacacatcaagagaagcgatcttcgaagagcattccaccatatgtttggtgttcattgagttgtgctcaaatcgagctccaacctgacagttgtgctagagttcctctaaaagtgtgcatatttgcaccgggcacatacaatttttccaattatgagctgcaatggaaagtgcatctatctgagggaccacatgtgggtgaaaatgagaaccggttatctggcggtggtctaggctatcctttctatgtcactgtccttcaaggtgtctaagtaattatcaggattcaagaagtaccttcttgagcgtcaatatagaccagtgcaaaactcaggaactacacccaattgcaacgggctgatgataataggtgccagccagtccagtttgtgcaaagatctgccccggaagttccctgactgaatatacttggatacgctcatggttctgcttcggtaccgatatatttacacgtcattttgaaggatgagttctggtgagtacatgtatacaattgtcgctgggaacaaaaactaacggtaattgctggtggatttttggcagacagaatataccgatagaagttttgcttgtctaattgttgatggtggctagtaggagcatatactattcctgtacatcctgtttaacttgtcgctgctagacgatttcgcaaatgtagtatgtagtggtagatggatccgataaattttctgtaattttgacgaggtaatcaggcaatcgtctcgagattgttgttgtatgggcgacagtattttttcattgtttgtacaatccttttaaaaatcatcgtctggccttgagcctttatgccatatgggtatatgttgattccccttttcagttcctcgtatcgacgtccagctgtccacatcaggtgcaagtgtctgaggggtgctgttatttttgatattttc

SEQ ID NO: 5553 - DNA, 2584 bp, Zea Mays
cagatttggcgttagtgaaagcacgtggcaggagctggaggaagaattgatcccatcatcatcaattgtcaaaactaattggctggatactcagccaatgagaaaatacaaggactcctgtatttgtgtggctggagaagcagtaaaattgagtgttgaacttaaaaatcccctccaaattcctgttgctgtttctggcatctctattatatgccagctttccagcactttggatgcattaagttctgatgttagtggactggacttggatggtggggaagataaggttaacacagagccatctatttcaatgttggagactgatggagataagtttacattgtcaaagcttgacattgtattaggaggaggtgaaagtaaaagagtgcaacttgatgttactccaaaggttgaaggtattttgaagttggttgggataaggtggactctttcagagtcagtagtaggttatcaatactttgaatttaatgcacagaaaaaaatcaagaaagggaaaagaggcccacaccgttcttggaataacagcctggttgtaatcaagggtataaaaatgaaacttagcaacccaagatttttaattcccggcgattcatcggacattggcctcaagttcccacactgcttaaagaggcacgtgcaatcagaaagcagtgttgtatcagccaaaactatgaaggacaatttcaagagtctgctctttgcatttcctcaggatatagaaattcaagcaggggcagcactctcttggcctatttggtttcatgcggcaactcctggaaatgtttctctttatatatctctgtattacgaaatggggagttccagtgatattaaataccgtacactacgcatgcacttcaatcttgaggttttgccgtcacttgacgtatccttttctgtaagcacgtcctcatcaagattgcaagagtatattgttcgcatggatgtcatgaacaagactccatcagagtcatttgtgcttcatcagttatcatgtgtcggtgataaatgggcagtttcagcattggcggcgtgcagttcaatcaactctgttgaaacagtatcagaaaatcaggctgtgtcgtacttcttcaaaattaaggattgtgaggcggattcttgtaaagaggcagaaagtgattcctgcacaagcgatatggctttgtgtccaggaagtagcactgatctgtttgacattgcacgatctccttttgttgattttcaccatcaagaaagatgcaggcaagtgaagatggcaaaggggccatgcagccttcttgattttgttctaatctcaaaggcagttgataactcttccaagcctactccagacttcgaactactttctcatcacacatgtcattgcagtgctctaagccagaaccctatatggtggcttatggaagggcctcggacaattagtcatgatttctcaaagtcttattgtgaggctaacctccaattggtcattcacaattcagaagctcataagattttggtgagagtggtcacttttgatgtaattccagagaaaaccgtccatcctcatgactcaaccagtgctcagggtggatggtatgatgtatcactggaaagtgacgtaaaggccatctctagttccaagagtacacatcaagagaagcgatcttcgaagagcattccaccatatgtttggtgttcattgagttgtgctcaaatcgagctccaacctgacagttgtgctagagttcctctaaaagtgtgcatatttgcaccgggcacatacaatttttccaattatgagctgcaatggaaagtgcatctatctgagggaccacatgtgggtgaaaatgagaaccggttatctggcggtggtctaggctatcctttctatgtcactgtccttcaaggtgtctaagtaattatcaggattcaagaagtaccttcttgagcgtcaatatagaccagtgcaaaactcaggaactacacccaattgcaacgggctgatgataataggtgccagccagtccagtttgtgcaaagatctgccccggaagttccctgactgaatatacttggatacgctcatggttctgcttcggtaccgatatatttacacgtcattttgaaggatgagttctggtgagtacatgtatacaattgtcgctgggaacaaaaactaacggtaattgctggtggatttttggcagacagaatataccgatagaagttttgcttgtctaattgttgatggtggctagtaggagcatatactattcctgtacatcctgtttaacttgtcgctgctagacgatttcgcaaatgtagtatgtagtggtagatggatccgataaattttctgtaattttgacgaggtaatcaggcaatcgtctcgagattgttgttgtatgggcgacagtattttttcattgtttgtacaatccttttaaaaatcatcgtctggccttgagcctttatgccatatgggtatatgttgattccccttttcagttcctcgtatcgacgtccagctgtccacatcaggtgcaagtgtctgaggggtgctgttatttttgatattttc

SEQ ID NO: 5554 - DNA, 2650 bp, Zea Mays
cggaggtggtccttgcatgttgcatccagtggcgcccgttctcacgcaaagcagcgcctgtatcccaggggcaaatcttatctttgcacatgaagcagtaaaattgagtgttgaacttaaaaatcccctccaaattcctgttgctgtttctggcatctctattatatgccagctttccagcactttggatgcattaagttctgatgttagtggactggacttggatggtggggaagataaggttaacacagagccatctatttcaatgttggagactgatggagataagtttacattgtcaaagcttgacattgtattaggaggaggtgaaagtaaaagagtgcaacttgatgttactccaaaggttgaaggtattttgaagttggttgggataaggtggactctttcagagtcagtagtaggttatcaatactttgaatttaatgcacagaaaaaaatcaagaaagggaaaagaggcccacaccgttcttggaataacagcctggttgtaatcaagggtttaccaaaacttacaggatctattgatcgcatgcctacaaaagcgtttgctggtgatttaaagctgcttacactaaatctgagaaaccattccgaatatgctgtgaagggtataaaaatgaaacttagcaacccaagatttttaattcccggcgattcatcggacattggcctcaagttcccacactgcttaaagaggcacgtgcaatcagaaagcagtgttgtatcagccaaaactatgaaggacaatttcaagagtctgctctttgcatttcctcaggatatagaaattcaagcaggggcagcactctcttggcctatttggtttcatgcggcaactcctggaaatgtttctctttatatatctctgtattacgaaatggggagttccagtgatattaaataccgtacactacgcatgcacttcaatcttgaggttttgccgtcacttgacgtatccttttctgtaagcacgtcctcatcaagattgcaagagtatattgttcgcatggatgtcatgaacaagactccatcagagtcatttgtgcttcatcagttatcatgtgtcggtgataaatgggcagtttcagcattggcggcgtgcagttcaatcaactctgttgaaacagtatcagaaaatcaggctgtgtcgtacttcttcaaaattaaggattgtgaggcggattcttgtaaagaggcagaaagtgattcctgcacaagcgatatggctttgtgtccaggaagtagcactgatctgtttgacattgcacgatctccttttgttgattttcaccatcaagaaagatgcaggcaagtgaagatggcaaaggggccatgcagccttcttgattttgttctaatctcaaaggcagttgataactcttccaagcctactccagacttcgaactactttctcatcacacatgtcattgcagtgctctaagccagaaccctatatggtggcttatggaagggcctcggacaattagtcatgatttctcaaagtcttattgtgaggctaacctccaattggtcattcacaattcagaagctcataagattttggtgagagtggtcacttttgatgtaattccagagaaaaccgtccatcctcatgactcaaccagtgctcagggtggatggtatgatgtatcactggaaagtgacgtaaaggccatctctagttccaagagtacacatcaagagaagcgatcttcgaagagcattccaccatatgtttggtgttcattgagttgtgctcaaatcgagctccaacctgacagttgtgctagagttcctctaaaagtgtgcatatttgcaccgggcacatacaatttttccaattatgagctgcaatggaaagtgcatctatctgagggaccacatgtgggtgaaaatgagaaccggttatctggcggtggtctaggctatcctttctatgtcactgtccttcaaggtgtctaagtaattatcaggattcaagaagtaccttcttgagcgtcaatatagaccagtgcaaaactcaggaactacacccaattgcaacgggctgatgataataggtgccagccagtccagtttgtgcaaagatctgccccggaagttccctgactgaatatacttggatacgctcatggttctgcttcggtaccgatatatttacacgtcattttgaaggatgagttctggtgagtacatgtatacaattgtcgctgggaacaaaaactaacggtaattgctggtggatttttggcagacagaatataccgatagaagttttgcttgtctaattgttgatggtggctagtaggagcatatactattcctgtacatcctgtttaacttgtcgctgctagacgatttcgcaaatgtagtatgtagtggtagatggatccgataaattttctgtaattttgacgaggtaatcaggcaatcgtctcgagattgttgttgtatgggcgacagtattttttcattgtttgtacaatccttttaaaaatcatcgtctggccttgagcctttatgccatatgggtatatgttgattccccttttcagttcctcgtatcgacgtccagctgtccacatcaggtgcaagtgtctgaggggtgctgttatttttgatattttc

SEQ ID NO: 5555 - DNA, 1556 bp, Zea Mays
gtcaaacactccaaagtcacacagctcacaaactggtggattcgtggcgtcacctgctaaaccatctgctattctgctcgacggctcagctctagcctccactccaggcaccggagtccgagagcccgcctacagtgatggcgcccaagcacctcaacctcttcgccgcggcgctgctcctcctcctcctcccctccggctccagcgccaccgccgtcgagtactgcaaaaaggggtgggactacccagtgaaggtgagcagcgtggaggtcgtccccgatcccgtcgtcaggggacagccggccaccttcaagatttccgcctccacagataaaaacatcactaaagggaaactaacgatagatgttgcatacttcatcttccacgtccactcggaaactcataacctctgtgatgagacttcttgcccagtaacaggtgaatttgtgctagctagccaacagacattaccatcgttcaccccgccaggttcctacaccctcacgatgaagttgctgggggacagcaacgaggaactgacctgcatctctttcgggttcagcatcgggcattggatgttggagaggaaactagcagatgcagatgtatctgaagaagagcaaaacaatatactgaaagatttagaaaaaaaggaggcggaatacatgcgcctacgaaggcataaaatgggcgttgatgactttgaattgctcaccattattgggagaggtgcatttggggaggtgagactttgtagagaaaaaactacatccaatgtgtatgcaatgaaaaagcttaagaagtctaaaatgttacgaagagggcagcatatatatttggagccattctgcctgctttttatggtcgcaggactttacttctttgatcacagcgtagattcacagttggcacagcaaaaagagtataatttgaagaagccttctgcctaccactataacattttggtccttggattcgtggtcctactctgcggtttgcttggtatccctccatctaatggagtgcttcatcagtctcccatgcacacaaaaagtcttgttgtccttaagaggcaattgctaagcaaaaagatggttgatactgccaaggagagcataggaggaagtgctaccagtttggaattatatggcaagatggaagaagttttcatcaaaatggatagcgaagagaatattgattctgttgacagggagttgaagaacttcaatgatgctgttctgcaagaaggcaacgaagaagggagattggctagagaatttgactctcgcaaacatatagaagcccacttgcctgttcgagtgaacgaatagagactgagcaatctgctgcagtccatactggttggtgggtgtgttggagctatgccagtcatcaagatgatacccacatcggtcctccagggttactttgcctacatggccattgatagtctaccagggaatcagttctgggagaggatacaacttctgttcattacagaaagacgacactacaaggttcttgaaggtccccatgcatcgtttgtgaggttgata

SEQ ID NO: 5556 - DNA, 3014 bp, Zea Mays
aaacactccaaagtcacacagctcacaaactggtggattcgtggcgtcacctgctaaaccatctgctattctgctcgacggctcagctctagcctccactccaggcaccggagtccgagagcccgcctacagtgatggcgcccaagcacctcaacctcttcgccgcggcgctgctcctcctcctcctcccctccggctccagcgccaccgccgtcgagtactgcaaaaaggggtgggactacccagtgaaggtgagcagcgtggaggtcgtccccgatcccgtcgtcaggggacagccggccaccttcaagatttccgcctccacagataaaaacatcactaaagggaaactaacgatagatgttgcatacttcatcttccacgtccactcggaaactcataacctctgtgatgagacttcttgcccagtaacaggtgaatttgtgctagctagccaacagacattaccatcgttcaccccgccaggttcctacaccctcacgatgaagttgctgggggacagcaacgaggaactgacctgcatctctttcgggttcagcatcgggtttgttgcgccgaatcccgtcatctgaacccagtatcgaatgtcatggatgtactttacatgaaccttgtagtgcaacattctccatggagtcagggcatcccgaggcatattttcccagagctcttctcctttgccaagaactcaaaaatgaccatcaaagaggtcaaggatcaagagcagttccatgatctttttcatttacctgtctctgatcaagcgtttgatcaatttctggtactcaaggggtcttgggagcaaattattcttaataatgttcatgaccgctggaagtatatttggggatcggacaaattctcgtcccaaaaagcttacagatctttcatgggccagatgcagactcatcctatctacaaactagtttggaaaagctggtacgtggccagcatcctgcaatccccacgctctggatctgggaacgagcaatcagcgcctccatccgcaatcagcgtcttcccgcagccgcagccttcgcctccactcgccccgatgccccctgccctcgcaatcagcaccttcgcctccataagattggaccaaaatctaacatggagagcggaatccccactgcaatcagcattcgcttccactcgccccgacgcccccgcgcccgtcttcccccagctgcagccttcgcctcgacagaggacgcacggccgctatgcccgccctgctcgcggtgaccccctccctccccccgatagtcatcgccgcacccagatccattttccccaaccctccacgcccttctccaagaaacagagcaacgatagtcgtgtcgacgagatcgacccagtagcaggatcgatctgcgggagaggaggcgagcgactcctacagggcacggaggcgctggctgttgaggtagagcaggagcagcgcgtccaggatctgcacggggtcctgctcgaactgcacaacgggggagaagcggtgcatctcgatcttcaccttctcgcgctccacggtgagcttcccctccctggtggtgaggcgaaagagctcgtcctcggtggcgtccacgtagacggcgacgttggcagctccgcgaggatggccgccgcggcgggggaggaggcgcagtctagcgccaccaagcagaaggtggcggcggcaaagcagtacatcgagaaccactacaagtcgcagatgaagtcgcttcaggagctcaaggagaggcattggatgttggagaggaaactagcagatgcagatgtatctgaagaagagcaaaacaatatactgaaagatttagaaaaaaaggaggcggaatacatgcgcctacgaaggcataaaatgggcgttgatgactttgaattgctcaccattattgggagaggtgcatttggggaggtgagactttgtagagaaaaaactacatccaatgtgtatgcaatgaaaaagcttaagaagtctaaaatgttacgaagagggcagcatatatatttggagccattctgcctgctttttatggtcgcaggactttacttctttgatcacagcgtagattcacagttggcacagcaaaaagagtataatttgaagaagccttctgcctaccactataacattttggtccttggattcgtggtatgtggcacatgagtctgtcatacaaattgtttatttagagtgttcatttggttgtaagtttaacctcagtttcttgggatctcaatcacattcgtcagaccaagtgtgacaatctgtttgtcttccaactatagtagaaatgatacagatgcttggtctgtgtttttagttcagatattatggctgttagttagtttcttttctcacgatattaaatgccagtcctactctgcggtttgcttggtatccctccatctaatggagtgcttcatcagtctcccatgcacacaaaaagtcttgttgtccttaagaggcaattgctaagcaaaaagatggttgatactgccaaggagagcataggaggaagtgctaccagtttggaattatatggcaagatggaagaagttttcatcaaaatggatagcgaagagaatattgattctgttgacagggagttgaagaacttcaatgatgctgttctgcaagaaggcaacgaagaagggagattggctagagaatttgactctcgcaaacatatagaagcccacttgcctgttcgagtgaacgaatagagactgagcaatctgctgcagtccatactggttggtgggtgtgttggagctatgccagtcatcaagatgatacccacatcggtcctccagggttactttgcctacatggccattgatagtctaccagggaatcagttctgggagaggatacaacttctgttcattacagaaagacgacactacaaggttcttgaaggtccccatgcatcgtttgtgaggttctctactatgtgtaatctcatatcaagattaatgagtatcgt

SEQ ID NO: 5557 - DNA, 341 bp, Zea Mays
aaagtcacacagctcacaaactggtggattcgtggcgtcacctgctaaaccatctgctattctgctcgacggctcagctctagcctccactccaggcaccggagtccgagagcccgcctacagtgatggcgcccaagcacctcaacctcttcgccgcggcgctgctcctcctcctcctcccctccggctccagcgccaccgccgtcgagtactgcaaaaaggggtgggactacccagtgaaggtgagcagcgtggaggtcgtccccgatcccgtcgtcaggggacagccggccaccttcaagatttccgcctccacagtttggataatgaaggacgctctt

SEQ ID NO: 5558 - DNA, 774 bp, Zea Mays
aaagtcacacagctcacaaactggtggattcgtggcgtcacctgctaaaccatctgctattctgctcgacggctcagctctagcctccactccaggcaccggagtccgagagcccgcctacagtgatggcgcccaagcacctcaacctcttcgccgcggcgctgctcctcctcctcctcccctccggctccagcgccaccgccgtcgagtactgcaaaaaggggtgggactacccagtgaaggtgagcagcgtggaggtcgtccccgatcccgtcgtcaggggacagccggccaccttcaagatttccgcctccacagggttcctacaccctcacgatgaagttgctgggggacagcaacgaggaactgacctgcatctctttcgggttcagcatcgggtttgttgcgccgaatcccgtcatctgaacccagtatcgaatgtcatggatgtactttacatgaaccttgtagtgcaacattctccagtaagactcggaactcccaggctgggcgcctggaattggttaattcggtcttctcagccttaccaatgttcatcatgtgcacgctcaagattcctaaaaccatcattaaggaaattgatattttcagaaagcactgcctgtggagaggaaatgacatcaactccaagaggccacctttgattgcttggaattcggtcactcaaaggaaagtgaatggtggcctgggtgttcttcgattagaaacacagaacgaggctcttctaattaaatttttgcataaatttttcaa

SEQ ID NO: 5559 - DNA, 1772 bp, Zea Mays
aaagtcacacagctcacaaactggtggattcgtggcgtcacctgctaaaccatctgctattctgctcgacggctcagctctagcctccactccaggcaccggagtccgagagcccgcctacagtgatggcgcccaagcacctcaacctcttcgccgcggcgctgctcctcctcctcctcccctccggctccagcgccaccgccgtcgagtactgcaaaaaggggtgggactacccagtgaaggtgagcagcgtggaggtcgtccccgatcccgtcgtcaggggacagccggccaccttcaagatttccgcctccacagataaaaacatcactaaagggaaactaacgatagatgttgcatacttcatcttccacgtccactcggaaactcataacctctgtgatgagacttcttgcccagtaacaggtgaatttgtgctagctagccaacagacattaccatcgttcaccccgccaggttcctacaccctcacgatgaagttgctgggggacagcaacgaggaactgacctgcatctctttcgggttcagcatcgggcattggatgttggagaggaaactagcagatgcagatgtatctgaagaagagcaaaacaatatactgaaagatttagaaaaaaaggaggcggaatacatgcgcctacgaaggcataaaatgggcgttgatgactttgaattgctcaccattattgggagaggtgcatttggggaggtgagactttgtagagaaaaaactacatccaatgtgtatgcaatgaaaaagcttaagaagtctaaaatgttacgaagagggcagcatatatatttggagccattctgcctgctttttatggtcgcaggactttacttctttgatcacagcgtagattcacagttggcacagcaaaaagagtataatttgaagaagccttctgcctaccactataacattttggtccttggattcgtggtatgtggcacatgagtctgtcatacaaattgtttatttagagtgttcatttggttgtaagtttaacctcagtttcttgggatctcaatcacattcgtcagaccaagtgtgacaatctgtttgtcttccaactatagtagaaatgatacagatgcttggtctgtgtttttagttcagatattatggctgttagttagtttcttttctcacgatattaaatgccagtcctactctgcggtttgcttggtatccctccatctaatggagtgcttcatcagtctcccatgcacacaaaaagtcttgttgtccttaagaggcaattgctaagcaaaaagatggttgatactgccaaggagagcataggaggaagtgctaccagtttggaattatatggcaagatggaagaagttttcatcaaaatggatagcgaagagaatattgattctgttgacagggagttgaagaacttcaatgatgctgttctgcaagaaggcaacgaagaagggagattggctagagaatttgactctcgcaaacatatagaagcccacttgcctgttcgagtgaacgaatagagactgagcaatctgctgcagtccatactggttggtgggtgtgttggagctatgccagtcatcaagatgatacccacatcggtcctccagggttactttgcctacatggccattgatagtctaccagggaatcagttctgggagaggatacaacttctgttcattacagaaagacgacactacaaggttcttgaaggtccccatgcatcgtttgtgaggttgatataag

SEQ ID NO: 5560 - DNA, 3615 bp, Zea Mays
aaagtcacacagctcacaaactggtggattcgtggcgtcacctgctaaaccatctgctattctgctcgacggctcagctctagcctccactccaggcaccggagtccgagagcccgcctacagtgatggcgcccaagcacctcaacctcttcgccgcggcgctgctcctcctcctcctcccctccggctccagcgccaccgccgtcgagtactgcaaaaaggggtgggactacccagtgaaggtgagcagcgtggaggtcgtccccgatcccgtcgtcaggggacagccggccaccttcaagatttccgcctccacagataaaaacatcactaaagggaaactaacgatagatgttgcatacttcatcttccacgtccactcggaaactcataacctctgtgatgagacttcttgcccagtaacaggtgaatttgtgctagctagccaacagacattaccatcgttcaccccgccaggttcctacaccctcacgatgaagttgctgggggacagcaacgaggaactgacctgcatctctttcgggttcagcatcgggtttgttgcgccgaatcccgtcatctgaacccagtatcgaatgtcatggatgtactttacatgaaccttgtagtgcaacattctccataagactcggaacgtgtgaccaactgctgtcttgcattcggagttgggcgcctgacctaacgatcttaactgcatacagttttatcatggacctaccagagtttggtgctccgtgctccatgtcagcatgccttttacatgtatataagactatgtacaacggctcccacgggcatccctctccccttgatttagcggctgcagtgacacctctattgcttcactagtccccgtacgccggtttggatggtttcgatgcagcagctgccttctctccaatggggaatctaggatttcaagttaagttagggtggtctatcttatgaaaatcaaaataaataaattagattgtattttaagttctacaacatatctctactactacttaagttactagtgtagacgtccacattttgtttggcgcacggttctgccggcgccccccgctctcctctctcgcgccccgctctctcgcccgccatcatggaaggagaatttggaaggtccgcatggttccatagaactctcctctctgctgtctctctcgcccaccatttgcgcgctctctggctgccatctccgtgcctcgctctcctctctgctcgccgccagacccagcgcgatccactcgtcaaaatcttctgcgcgatgcaccgctcccccctccaccttcgctccatggcgtgatgcaggctggtacgtggccagcatcctgcaatccccacgctctggatctgggaacgagcaatcagcgcctccatccgcaatcagcgtcttcccgcagccgcagccttcgcctccactcgccccgatgccccctgccctcgcaatcagcaccttcgcctccataagattggaccaaaatctaacatggagagcggaatccccactgcaatcagcattcgcttccactcgccccgacgcccccgcgcccgtcttcccccagctgcagccttcgcctcgacagaggacgcacggccgctatgcccgccctgctcgcggtgaccccctccctccccccgatagtcatcgccgcacccagatccattttccccaaccctccacgcccttctccaagaaacagagcaacgatagtcgtgtcgacgagatcgacccagtagcaggatcgatctgcgggagaggaggcgagcgactcctacagggcacggaggcgctggctgttgaggtagagcaggagcagcgcgtccaggatctgcacggggtcctgctcgaactgcacaacgggggagaagcggtgcatctcgatcttcaccttctcgcgctccacggtgagcttcccctccctggtggtgaggcgaaagagctcgtcctcggtggcgtccacgtagacggcgacgttggcagctccgcgaggatggccgccgcggcgggggaggaggcgcagtctagcgccaccaagcagaaggtggcggcggcaaagcagtacatcgagaaccactacaagtcgcagatgaagtcgcttcaggagctcaaggagaggcattggatgttggagaggaaactagcagatgcagatgtatctgaagaagagcaaaacaatatactgaaagatttagaaaaaaaggaggcggaatacatgcgcctacgaaggcataaaatgggcgttgatgactttgaattgctcaccattattgggagaggtgcatttggggaggtgagactttgtagagaaaaaactacatccaatgtgtatgcaatgaaaaagcttaagaagtctaaaatgttacgaagagggcaggtattccatgatgtttactcctgccaggagactatgtatccctccaaaaaaaagttgtcaccgttttattgttttgcttccatgtactatttagcttccagagatgcatgtatatatatatctcaagaactgctactagagcactaaaatgttgaaaacaattattatggtggtggacataatacatctaaagacatgttcatctattatcattgttcacatattttccaaaaatagtatttactactttcaaattcatctaaccatacagtctgattatatcccttctagatgaaaaaaattctaacattcgtagagatttcctgcatgtcatgattctgaatgcttcctcttctatctcctccagcatatatatttggagccattctgcctgctttttatggtcgcaggactttacttctttgatcacagcgtagattcacagttggcacagcaaaaagagtataatttgaagaagccttctgcctaccactataacattttggtccttggattcgtggtcctactctgcggtttgcttggtatccctccatctaatggagtgcttcatcagtctcccatgcacacaaaaagtcttgttgtccttaagaggcaagttggtgaaattcaaatcgattcatgtggtttgctaacctaaacagctttcttcatacatttacatctcttaagttcagttgctaagcaaaaagatggttgatactgccaaggagagcataggaggaagtgctaccagtttggaattatatggcaagatggaagaagttttcatcaaaatggatagcgaagagaatattgattctgttgacagggagttgaagaacttcaatgatgctgttctgcaagaaggcaacgaagaagggagattggctagagaatttgactctcgcaaacatatagaagcccacttgcctgttcgagtgaacgaatagagactgagcaatctgctgcagtccatactggttggtgggtgtgttggagctatgccagtcatcaagatgatacccacatcggtcctccagggttactttgcctacatggccattgatagtctaccagggaatcagttctgggagaggatacaacttctgttcattacagaaagacgacactacaaggttcttgaaggtccccatgcatcgtttgtgaggttctctactatgtgtaatctcatatcaagattaatgagtatcgt

SEQ ID NO: 5561 - DNA, 3760 bp, Zea Mays
aaagtcacacagctcacaaactggtggattcgtggcgtcacctgctaaaccatctgctattctgctcgacggctcagctctagcctccactccaggcaccggagtccgagagcccgcctacagtgatggcgcccaagcacctcaacctcttcgccgcggcgctgctcctcctcctcctcccctccggctccagcgccaccgccgtcgagtactgcaaaaaggggtgggactacccagtgaaggtgagcagcgtggaggtcgtccccgatcccgtcgtcaggggacagccggccaccttcaagatttccgcctccacagataaaaacatcactaaagggaaactaacgatagatgttgcatacttcatcttccacgtccactcggaaactcataacctctgtgatgagacttcttgcccagtaacaggtgaatttgtgctagctagccaacagacattaccatcgttcaccccgccaggttcctacaccctcacgatgaagttgctgggggacagcaacgaggaactgacctgcatctctttcgggttcagcatcgggtttgttgcgccgaatcccgtcatctgaacccagtatcgaatgtcatggatgtactttacatgaaccttgtagtgcaacattctccataagactcggaacgtgtgaccaactgctgtcttgcattcggagttgggcgcctgacctaacgatcttaactgcatacagttttatcatggacctaccagagtttggtgctccgtgctccatgtcagcatgccttttacatgtatataagactatgtacaacggctcccacgggcatccctctccccttgatttagcggctgcagtgacacctctattgcttcactagtccccgtacgccggtttggatggtttcgatgcagcagctgccttctctccaatggggaatctaggatttcaagttaagttagggtggtctatcttatgaaaatcaaaataaataaattagattgtattttaagttctacaacatatctctactactacttaagttactagtgtagacgtccacattttgtttggcgcacggttctgccggcgccccccgctctcctctctcgcgccccgctctctcgcccgccatcatggaaggagaatttggaaggtccgcatggttccatagaactctcctctctgctgtctctctcgcccaccatttgcgcgctctctggctgccatctccgtgcctcgctctcctctctgctcgccgccagacccagcgcgatccactcgtcaaaatcttctgcgcgatgcaccgctcccccctccaccttcgctccatggcgtgatgcaggctggtacgtggccagcatcctgcaatccccacgctctggatctgggaacgagcaatcagcgcctccatccgcaatcagcgtcttcccgcagccgcagccttcgcctccactcgccccgatgccccctgccctcgcaatcagcaccttcgcctccataagattggaccaaaatctaacatggagagcggaatccccactgcaatcagcattcgcttccactcgccccgacgcccccgcgcccgtcttcccccagctgcagccttcgcctcgacagaggacgcacggccgctatgcccgccctgctcgcggtgaccccctccctccccccgatagtcatcgccgcacccagatccattttccccaaccctccacgcccttctccaagaaacagagcaacgatagtcgtgtcgacgagatcgacccagtagcaggatcgatctgcgggagaggaggcgagcgactcctacagggcacggaggcgctggctgttgaggtagagcaggagcagcgcgtccaggatctgcacggggtcctgctcgaactgcacaacgggggagaagcggtgcatctcgatcttcaccttctcgcgctccacggtgagcttcccctccctggtggtgaggcgaaagagctcgtcctcggtggcgtccacgtagacggcgacgttggcagctccgcgaggatggccgccgcggcgggggaggaggcgcagtctagcgccaccaagcagaaggtggcggcggcaaagcagtacatcgagaaccactacaagtcgcagatgaagtcgcttcaggagctcaaggagaggcattggatgttggagaggaaactagcagatgcagatgtatctgaagaagagcaaaacaatatactgaaagatttagaaaaaaaggaggcggaatacatgcgcctacgaaggcataaaatgggcgttgatgactttgaattgctcaccattattgggagaggtgcatttggggaggtgagactttgtagagaaaaaactacatccaatgtgtatgcaatgaaaaagcttaagaagtctaaaatgttacgaagagggcaggtattccatgatgtttactcctgccaggagactatgtatccctccaaaaaaaagttgtcaccgttttattgttttgcttccatgtactatttagcttccagagatgcatgtatatatatatctcaagaactgctactagagcactaaaatgttgaaaacaattattatggtggtggacataatacatctaaagacatgttcatctattatcattgttcacatattttccaaaaatagtatttactactttcaaattcatctaaccatacagtctgattatatcccttctagatgaaaaaaattctaacattcgtagagatttcctgcatgtcatgattctgaatgcttcctcttctatctcctccagcatatatatttggagccattctgcctgctttttatggtcgcaggactttacttctttgatcacagcgtagattcacagttggcacagcaaaaagagtataatttgaagaagccttctgcctaccactataacattttggtccttggattcgtggtatgtggcacatgagtctgtcatacaaattgtttatttagagtgttcatttggttgtaagtttaacctcagtttcttgggatctcaatcacattcgtcagaccaagtgtgacaatctgtttgtcttccaactatagtagaaatgatacagatgcttggtctgtgtttttagttcagatattatggctgttagttagtttcttttctcacgatattaaatgccagtcctactctgcggtttgcttggtatccctccatctaatggagtgcttcatcagtctcccatgcacacaaaaagtcttgttgtccttaagaggcaattgctaagcaaaaagatggttgatactgccaaggagagcataggaggaagtgctaccagtttggaattatatggcaagatggaagaagttttcatcaaaatggatagcgaagagaatattgattctgttgacagggagttgaagaacttcaatgatgctgttctgcaagaaggcaacgaagaagggagattggctagagaatttgactctcgcaaacatatagaagcccacttgcctgttcgagtgaacgaatagagactgagcaatctgctgcagtccatactggttggtgggtgtgttggagctatgccagtcatcaagatgatacccacatcggtcctccagggttactttgcctacatggccattgatagtctaccagggaatcagttctgggagaggatacaacttctgttcattacagaaagacgacactacaaggttcttgaaggtccccatgcatcgtttgtgaggttctctactatgtgtaatctcatatcaagattaatgagtatcgt

SEQ ID NO: 5562 - DNA, 2048 bp, Zea Mays
gcaaacaaccataagtagttgaagtgagcagaccggaaattaggtgccacctgttctagacctgcatatgtagccatgtagataaaaacatcactaaagggaaactaacgatagatgttgcatacttcatcttccacgtccactcggaaactcataacctctgtgatgagacttcttgcccagtaacaggtgaatttgtgctagctagccaacagacattaccatcgttcaccccgccaggttcctacaccctcacgatgaagttgctgggggacagcaacgaggaactgacctgcatctctttcgggttcagcatcgggcattggatgttggagaggaaactagcagatgcagatgtatctgaagaagagcaaaacaatatactgaaagatttagaaaaaaaggaggcggaatacatgcgcctacgaaggcataaaatgggcgttgatgactttgaattgctcaccattattgggagaggtgcatttggggaggtgagactttgtagagaaaaaactacatccaatgtgtatgcaatgaaaaagcttaagaagtctaaaatgttacgaagagggcaggtattccatgatgtttactcctgccaggagactatgtatccctccaaaaaaaagttgtcaccgttttattgttttgcttccatgtactatttagcttccagagatgcatgtatatatatatctcaagaactgctactagagcactaaaatgttgaaaacaattattatggtggtggacataatacatctaaagacatgttcatctattatcattgttcacatattttccaaaaatagtatttactactttcaaattcatctaaccatacagtctgattatatcccttctagatgaaaaaaattctaacattcgtagagatttcctgcatgtcatgattctgaatgcttcctcttctatctcctccagcatatatatttggagccattctgcctgctttttatggtcgcaggactttacttctttgatcacagcgtagattcacagttggcacagcaaaaagagtataatttgaagaagccttctgcctaccactataacattttggtccttggattcgtggtatgtggcacatgagtctgtcatacaaattgtttatttagagtgttcatttggttgtaagtttaacctcagtttcttgggatctcaatcacattcgtcagaccaagtgtgacaatctgtttgtcttccaactatagtagaaatgatacagatgcttggtctgtgtttttagttcagatattatggctgttagttagtttcttttctcacgatattaaatgccagtcctactctgcggtttgcttggtatccctccatctaatggagtgcttcatcagtctcccatgcacacaaaaagtcttgttgtccttaagaggcaagttggtgaaattcaaatcgattcatgtggtttgctaacctaaacagctttcttcatacatttacatctcttaagttcagttgctaagcaaaaagatggttgatactgccaaggagagcataggaggaagtgctaccagtttggaattatatggcaagatggaagaagttttcatcaaaatggatagcgaagagaatattgattctgttgacagggagttgaagaacttcaatgatgctgttctgcaagaaggcaacgaagaagggagattggctagagaatttgactctcgcaaacatatagaagcccacttgcctgttcgagtgaacgaatagagactgagcaatctgctgcagtccatactggttggtgggtgtgttggagctatgccagtcatcaagatgatacccacatcggtcctccagggttactttgcctacatggccattgatagtctaccagggaatcagttctgggagaggatacaacttctgttcattacagaaagacgacactacaaggttcttgaaggtccccatgcatcgtttgtgaggttgatataagcttttactgtagtacacaatcatgaaactcttttatctttgagagccttgtgcttctttctactgag

SEQ ID NO: 5563 - DNA, 4684 bp, Zea Mays
ccacgccccgcgcacgccaacacgccagagcaccgaaatagagacaggagaggctgcgcagcagcacacaggcctcgcgacgcgactcgcgggacggaagccctagtttttttccttgcgttattccacccccttccttcctaccccgcgcctccgccccatcctccaccctgcgcccccgcctccgccgcgccatgtacccaagcccgtacgacggttccggcgccggaggaaagatccggcgccgcccgcacctccgcgccgcctccacgccctacgaacggccccccgccgccgcggcggcgcaccgcctcgcggccgctgctgcagcggcttccgcatcctcggagcccggcggggagcgcggcggcgggggcggtggctgggtgtcccggctggtggacccggcctcccgcctcatcgcgggtggcgccgcgcgcctcttcggctcggtgttccgcaagcgcctcgccccgccgccggccccttctccgccgctgtcgtcgcctcctggacgaaacaatgagccaaaacagggcttacctgattcaacacatgttgattcacttccaatcccagagggtggaatggagaaagggaagagcatagttgacacatcagatgtcaaagcaatgtctgaagtagagcacttgttaatgcgaaagacatttactaaggttgagtttgatcgtcttacagacttattgcgtgcaagaaccattgagtctgatccacctaaaccaattgtttctcgtgaggaaaagaatgaagaaagtatcaaagttgatggaattagaggctcagcgttacgtcatatggacctagatgattctcctgctgttaaagtacataatcatggtgctagttctcctgcagaactcgcgaaacaatatatgagctctcgttatttgagggaaccccaatccagtagtctgcggagccgattgtttcttgagaataaaggtgaagcaagcaacactgtcaatgataggaggtctgtaccaccaattgttcagacaccacttgaacttcggaatgaaaaccctggtctccctgtaaatggctatgtgacttcgggattacgtgggcgttcagcgatatatagaatgtctcgctctccatattttaagggtcagaactattccagtgatttgaacacgtcttcattgtcccaacgatcacaaagcttgcatgttggtggcaggcaggtcttgaaacgaagcggggctgaattagagaatgaacttggatctataggccccattcgtagaattcggcagaaatcaaatatgatgtcttcatttagagattctcgtgcaaatcctaaaggaaaccttcttactagccatataagtagtactgatttcactgaagacggtgcatccattcagtctccgagctcaaaaaaattattggttgggagtagtcaatctctgcgacccttagaatcccaaaagaatgagggagatggtaaatctagtgatagcattccacccataccagctcaatcaaacaagatggctgaaaagatatttgagcagcttaatataatagctccatcgccaaaacaacaacagtctgttactctgaatgctagtaactctatgtcaaagaaacctgtttttcaagatgctgggtcaagcagtatgtataaccaatctagttccctgaagtttcaagatttggatggtgcaaatggaccccatgatacaaacttgaatggttccctgctgaagaaagacaagctaaatataataaaagacggatcgccaaaagctgccttttctgatagacctgcccttttggggaactcggtttctgcttctaaatcatggacgccagcctttaaaatggctgtgatagaggacttaccagagttggatgatgatctggaggtccttattcaatcaagtaagatagaggttgaaacaactgagcagaaaattgattcaaatagaaaagaacagaaggttgaacaaaatatattagagcaaagggttgaaccgaacttgaagaacattgctggttctacgattagtgaacagcctgtagcatcactgtctaaaactgtcacttcatctggtggtttatttttatcaaatgatcctgggaaggcagttcccaaagcttctgtggacaataataccgaatttgcattctcaaatgggcctcctggcacccgccctgcaactggtgtatcagcaatgccacttgcttcagttaataacgataaacagactggtgcttcaaatttcattttcggcatcaagcagccaattacgtcagattttgaaacatcaactgcaaaaaacaaatcaacactcgggcagagtgtcaccaagcccacaacattagccagcactagttcagagagaggtgataaaacagaaaaagcagaagatgtagccaacccatctgagaaggtgttgccttcagctgcatcaacaacactgaatgcacctctccattttacatctgtggcatctacttcgagcctgagcaatggcttgtcatactcaccaccaaagctcacaactcctccacctactgataaacctgctatcagctcagctgtttccacttccatatttgccgtatccagtagcagtccagctatttcatcgtctcctgcatttacgggatttagtttttcttccagtgctccggttggattgtcattggtaacatcagctaaatctgatggcacaactgctgaaaataaggcagctagcaccttatcatttggtatagggggtacaaaagctgaagtgaaatctgttgcaccagatgcaagcagcaaggcatcatcggaactttttatttcacctgtgtcatcaagtattgcaagcttttcaagttcccccgccacatctacgcctactttcaccgcagttgcaccttcaagtgatgctgctggaatatctgtggctgcaccatctagtacttccactgcaccaggtttacagtctgcttcaaccccttcatttacatttccgagctctggaaacaacctttttgggttcagctccccagcccaatctactggcctcagtacatcgtcacttgctggtagtacctctcaaccaccagctgctagcacactctttggtagtaagccgacgcagtcagacggaacaatacaacaaacatcccagagttcaaaaccacaatctggctcaccattcccggtcatgactcctggagttggagcatcctcgtctggacctgggacgctatcttttggacttggagcttcctcaactggttcaggcactgcatcttttggtgtcggagcttcatcttccgcacctggaactttatcaacttttggtgcagcagctcactcttctggacctggagttttctcttttggggcaggaacttcctcatcaggacctagcactgcctcttttggtgcagcaacttccacatcagggactggatttggcaattcaccatttggaactggagctacttttgcgaatccatttagctctagttcaagcactgggttcacattttcttcacctagctcttctgctggtgcatcaacagcggccagtacgagtgtatttgccagcacctctacagcttcttcagcctcagcttttagcaacccttttggctcaagttcatccccacccagcacatttacatttgggcaatcaggttcttcaggcaacacttttgcatttggagcgcagccagctccaacgttcccatctcaaccatcacttttctcatttagttcagccaacactagcatgaattcgtctccacagcctgcatttggaatgataaataccaacacagccttcagcatggcttcccccggaaatgatcagatgaacgaagacagcatggcagatgacactagtcaggcagcacctgcgccagcgccagtatttggttcatcatttggacagcagaacaactcatctgctgccccggtatttggtgctcccgcggtccagccaggtggtgtttttcagttcgggggccaacaaggttcagcacagcagaacccgtccttcccagctgttggcagtctagagtttcagggtgggaacttttcgttgggcagcgggggtggtggcggtgacaagtcgaaccgaagagtgatcaaggtcaaaaggacaccaaagaagagataagggtgcgccctctgttggaatcttcctttgatggtgtcatttgtgattggatcgcactgcttgggaacgaagtcaagtacgacgaggttttatggccacgcagatttccctgcagcagggcgatagcgctatatatctcatggctggcttgtaaacgcatccaccaaggtcagtgtagtctcctgtgcactcaattcatttcctcatcggggccggcggcctgcatgttgtgtaatatgcctgtgctcatggggtgtaaaatagaacaaaaaagtgttgtaatttttgttttcttgcctccaaatgccgacttgatttcttatctgtggtttggctacggtatatttgtatcggagtgtaacgcactgttgtatttttgtttttgggtttattacattcaacaaggtcagaactgtatcgtagaatacctgtccatacttaatcctgcctacgcattgattgtttactcgtcgtccgtgagctgttgcgtgctcgtgccacgctgtgttgtccttgtcgcagcagaatat

SEQ ID NO: 5564 - DNA, 4961 bp, Zea Mays
caccgaaatagagacaggagaggctgcgcagcagcacacaggcctcgcgacgcgactcgcgggacggaagccctagtttttttccttgcgttattccacccccttccttcctaccccgcgcctccgccccatcctccaccctgcgcccccgcctccgccgcgccatgtacccaagcccgtacgacggttccggcgccggaggaaagatccggcgccgcccgcacctccgcgccgcctccacgccctacgaacggccccccgccgccgcggcggcgcaccgcctcgcggccgctgctgcagcggcttccgcatcctcggagcccggcggggagcgcggcggcgggggcggtggctgggtgtcccggctggtggacccggcctcccgcctcatcgcgggtggcgccgcgcgcctcttcggctcggtgttccgcaagcgcctcgccccgccgccggccccttctccgccgctgtcgtcgcctcctggacgaaacaatgagccaaaacagggcttacctgattcaacacatgttgattcacttccaatcccagagggtggaatggagaaagggaagagcatagttgacacatcagatgtcaaagcaatgtctgaagtagagcacttgttaatgcgaaagacatttactaagtatgtagctgcataattactattcttcaatttattgtgtttgatttgctatattttttcttgaaatgaatttcgtaaattctcaattcataactagcattcaccgtcacccctggtattatctggttctgtgatgtcccacctcttccagtctaaaacataattcaaaagaggtttccttttgttgtactgctgcacgtggtgtgttcttcacctttcctttgtttgtgcttgtgtgttgctttcacaatgtattctttttcaatgctactgaagctgttcatgccgagcattacatcctttgcagggttgagtttgatcgtcttacagacttattgcgtgcaagaaccattgagtctgatccacctaaaccaattgtttctcgtgaggaaaagaatgaagaaagtatcaaagttgatggaattagaggctcagcgttacgtcatatggacctagatgattctcctgctgttaaagtacataatcatggtgctagttctcctgcagaactcgcgaaacaatatatgagctctcgttatttgagggaaccccaatccagtagtctgcggagccgattgtttcttgagaataaaggtgaagcaagcaacactgtcaatgataggaggtctgtaccaccaattgttcagacaccacttgaacttcggaatgaaaaccctggtctccctgtaaatggctatgtgacttcgggattacgtgggcgttcagcgatatatagaatgtctcgctctccatattttaagggtcagaactattccagtgatttgaacacgtcttcattgtcccaacgatcacaaagcttgcatgttggtggcaggcaggtcttgaaacgaagcggggctgaattagagaatgaacttggatctataggccccattcgtagaattcggcagaaatcaaatatgatgtcttcatttagagattctcgtgcaaatcctaaaggaaaccttcttactagccatataagtagtactgatttcactgaagacggtgcatccattcagtctccgagctcaaaaaaattattggttgggagtagtcaatctctgcgacccttagaatcccaaaagaatgagggagatggtaaatctagtgatagcattccacccataccagctcaatcaaacaagatggctgaaaagatatttgagcagcttaatataatagctccatcgccaaaacaacaacagtctgttactctgaatgctagtaactctatgtcaaagaaacctgtttttcaagatgctgggtcaagcagtatgtataaccaatctagttccctgaagtttcaagatttggatggtgcaaatggaccccatgatacaaacttgaatggttccctgctgaagaaagacaagctaaatataataaaagacggatcgccaaaagctgccttttctgatagacctgcccttttggggaactcggtttctgcttctaaatcatggacgccagcctttaaaatggctgtgatagaggacttaccagagttggatgatgatctggaggtccttattcaatcaagtaagatagaggttgaaacaactgagcagaaaattgattcaaatagaaaagaacagaaggttgaacaaaatatattagagcaaagggttgaaccgaacttgaagaacattgctggttctacgattagtgaacagcctgtagcatcactgtctaaaactgtcacttcatctggtggtttatttttatcaaatgatcctgggaaggcagttcccaaagcttctgtggacaataataccgaatttgcattctcaaatgggcctcctggcacccgccctgcaactggtgtatcagcaatgccacttgcttcagttaataacgataaacagactggtgcttcaaatttcattttcggcatcaagcagccaattacgtcagattttgaaacatcaactgcaaaaaacaaatcaacactcgggcagagtgtcaccaagcccacaacattagccagcactagttcagagagaggtgataaaacagaaaaagcagaagatgtagccaacccatctgagaaggtgttgccttcagctgcatcaacaacactgaatgcacctctccattttacatctgtggcatctacttcgagcctgagcaatggcttgtcatactcaccaccaaagctcacaactcctccacctactgataaacctgctatcagctcagctgtttccacttccatatttgccgtatccagtagcagtccagctatttcatcgtctcctgcatttacgggatttagtttttcttccagtgctccggttggattgtcattggtaacatcagctaaatctgatggcacaactgctgaaaataaggcagctagcaccttatcatttggtatagggggtacaaaagctgaagtgaaatctgttgcaccagatgcaagcagcaaggcatcatcggaactttttatttcacctgtgtcatcaagtattgcaagcttttcaagttcccccgccacatctacgcctactttcaccgcagttgcaccttcaagtgatgctgctggaatatctgtggctgcaccatctagtacttccactgcaccaggtttacagtctgcttcaaccccttcatttacatttccgagctctggaaacaacctttttgggttcagctccccagcccaatctactggcctcagtacatcgtcacttgctggtagtacctctcaaccaccagctgctagcacactctttggtagtaagccgacgcagtcagacggaacaatacaacaaacatcccagagttcaaaaccacaatctggctcaccattcccggtcatgactcctggagttggagcatcctcgtctggacctgggacgctatcttttggacttggagcttcctcaactggttcaggcactgcatcttttggtgtcggagcttcatcttccgcacctggaactttatcaacttttggtgcagcagctcactcttctggacctggagttttctcttttggggcaggaacttcctcatcaggacctagcactgcctcttttggtgcagcaacttccacatcagggactggatttggcaattcaccatttggaactggagctacttttgcgaatccatttagctctagttcaagcactgggttcacattttcttcacctagctcttctgctggtgcatcaacagcggccagtacgagtgtatttgccagcacctctacagcttcttcagcctcagcttttagcaacccttttggctcaagttcatccccacccagcacatttacatttgggcaatcaggttcttcaggcaacacttttgcatttggagcgcagccagctccaacgttcccatctcaaccatcacttttctcatttagttcagccaacactagcatgaattcgtctccacagcctgcatttggaatgataaataccaacacagccttcagcatggcttcccccggaaatgatcagatgaacgaagacagcatggcagatgacactagtcaggcagcacctgcgccagcgccagtatttggttcatcatttggacagcagaacaactcatctgctgccccggtatttggtgctcccgcggtccagccaggtggtgtttttcagttcgggggccaacaaggttcagcacagcagaacccgtccttcccagctgttggcagtctagagtttcagggtgggaacttttcgttgggcagcgggggtggtggcggtgacaagtcgaaccgaagagtgatcaaggtcaaaaggacaccaaagaagagataagggtgcgccctctgttggaatcttcctttgatggtgtcatttgtgattggatcgcactgcttgggaacgaagtcaagtacgacgaggttttatggccacgcagatttccctgcagcagggcgatagcgctatatatctcatggctggcttgtaaacgcatccaccaaggtcagtgtagtctcctgtgcactcaattcatttcctcatcggggccggcggcctgcatgttgtgtaatatgcctgtgctcatggggtgtaaaatagaacaaaaaagtgttgtaatttttgttttcttgcctccaaatgccgacttgatttcttatctgtggtttggctacggtatatttgtatcggagtgtaacgcactgttgtatttttgtttttgggtttattacattcaacaaggtcagaactgtatcgtagaatacctgtccatacttaatcctgcctacgcattgattgtttactcgtcgtccgtgagctgttgcgtgctcgtgccacgctgtgttgtccttgtcgcagcagaatat

SEQ ID NO: 5565 - DNA, 4650 bp, Zea Mays
caccgaaatagagacaggagaggctgcgcagcagcacacaggcctcgcgacgcgactcgcgggacggaagccctagtttttttccttgcgttattccacccccttccttcctaccccgcgcctccgccccatcctccaccctgcgcccccgcctccgccgcgccatgtacccaagcccgtacgacggttccggcgccggaggaaagatccggcgccgcccgcacctccgcgccgcctccacgccctacgaacggccccccgccgccgcggcggcgcaccgcctcgcggccgctgctgcagcggcttccgcatcctcggagcccggcggggagcgcggcggcgggggcggtggctgggtgtcccggctggtggacccggcctcccgcctcatcgcgggtggcgccgcgcgcctcttcggctcggtgttccgcaagcgcctcgccccgccgccggccccttctccgccgctgtcgtcgcctcctggacgaaacaatgagccaaaacagggcttacctgattcaacacatgttgattcacttccaatcccagagggtggaatggagaaagggaagagcatagttgacacatcagatgtcaaagcaatgtctgaagtagagcacttgttaatgcgaaagacatttactaaggttgagtttgatcgtcttacagacttattgcgtgcaagaaccattgagtctgatccacctaaaccaattgtttctcgtgaggaaaagaatgaagaaagtatcaaagttgatggaattagaggctcagcgttacgtcatatggacctagatgattctcctgctgttaaagtacataatcatggtgctagttctcctgcagaactcgcgaaacaatatatgagctctcgttatttgagggaaccccaatccagtagtctgcggagccgattgtttcttgagaataaaggtgaagcaagcaacactgtcaatgataggaggtctgtaccaccaattgttcagacaccacttgaacttcggaatgaaaaccctggtctccctgtaaatggctatgtgacttcgggattacgtgggcgttcagcgatatatagaatgtctcgctctccatattttaagggtcagaactattccagtgatttgaacacgtcttcattgtcccaacgatcacaaagcttgcatgttggtggcaggtcttgaaacgaagcggggctgaattagagaatgaacttggatctataggccccattcgtagaattcggcagaaatcaaatatgatgtcttcatttagagattctcgtgcaaatcctaaaggaaaccttcttactagccatataagtagtactgatttcactgaagacggtgcatccattcagtctccgagctcaaaaaaattattggttgggagtagtcaatctctgcgacccttagaatcccaaaagaatgagggagatggtaaatctagtgatagcattccacccataccagctcaatcaaacaagatggctgaaaagatatttgagcagcttaatataatagctccatcgccaaaacaacaacagtctgttactctgaatgctagtaactctatgtcaaagaaacctgtttttcaagatgctgggtcaagcagtatgtataaccaatctagttccctgaagtttcaagatttggatggtgcaaatggaccccatgatacaaacttgaatggttccctgctgaagaaagacaagctaaatataataaaagacggatcgccaaaagctgccttttctgatagacctgcccttttggggaactcggtttctgcttctaaatcatggacgccagcctttaaaatggctgtgatagaggacttaccagagttggatgatgatctggaggtccttattcaatcaagtaagatagaggttgaaacaactgagcagaaaattgattcaaatagaaaagaacagaaggttgaacaaaatatattagagcaaagggttgaaccgaacttgaagaacattgctggttctacgattagtgaacagcctgtagcatcactgtctaaaactgtcacttcatctggtggtttatttttatcaaatgatcctgggaaggcagttcccaaagcttctgtggacaataataccgaatttgcattctcaaatgggcctcctggcacccgccctgcaactggtgtatcagcaatgccacttgcttcagttaataacgataaacagactggtgcttcaaatttcattttcggcatcaagcagccaattacgtcagattttgaaacatcaactgcaaaaaacaaatcaacactcgggcagagtgtcaccaagcccacaacattagccagcactagttcagagagaggtgataaaacagaaaaagcagaagatgtagccaacccatctgagaaggtgttgccttcagctgcatcaacaacactgaatgcacctctccattttacatctgtggcatctacttcgagcctgagcaatggcttgtcatactcaccaccaaagctcacaactcctccacctactgataaacctgctatcagctcagctgtttccacttccatatttgccgtatccagtagcagtccagctatttcatcgtctcctgcatttacgggatttagtttttcttccagtgctccggttggattgtcattggtaacatcagctaaatctgatggcacaactgctgaaaataaggcagctagcaccttatcatttggtatagggggtacaaaagctgaagtgaaatctgttgcaccagatgcaagcagcaaggcatcatcggaactttttatttcacctgtgtcatcaagtattgcaagcttttcaagttcccccgccacatctacgcctactttcaccgcagttgcaccttcaagtgatgctgctggaatatctgtggctgcaccatctagtacttccactgcaccaggtttacagtctgcttcaaccccttcatttacatttccgagctctggaaacaacctttttgggttcagctccccagcccaatctactggcctcagtacatcgtcacttgctggtagtacctctcaaccaccagctgctagcacactctttggtagtaagccgacgcagtcagacggaacaatacaacaaacatcccagagttcaaaaccacaatctggctcaccattcccggtcatgactcctggagttggagcatcctcgtctggacctgggacgctatcttttggacttggagcttcctcaactggttcaggcactgcatcttttggtgtcggagcttcatcttccgcacctggaactttatcaacttttggtgcagcagctcactcttctggacctggagttttctcttttggggcaggaacttcctcatcaggacctagcactgcctcttttggtgcagcaacttccacatcagggactggatttggcaattcaccatttggaactggagctacttttgcgaatccatttagctctagttcaagcactgggttcacattttcttcacctagctcttctgctggtgcatcaacagcggccagtacgagtgtatttgccagcacctctacagcttcttcagcctcagcttttagcaacccttttggctcaagttcatccccacccagcacatttacatttgggcaatcaggttcttcaggcaacacttttgcatttggagcgcagccagctccaacgttcccatctcaaccatcacttttctcatttagttcagccaacactagcatgaattcgtctccacagcctgcatttggaatgataaataccaacacagccttcagcatggcttcccccggaaatgatcagatgaacgaagacagcatggcagatgacactagtcaggcagcacctgcgccagcgccagtatttggttcatcatttggacagcagaacaactcatctgctgccccggtatttggtgctcccgcggtccagccaggtggtgtttttcagttcgggggccaacaaggttcagcacagcagaacccgtccttcccagctgttggcagtctagagtttcagggtgggaacttttcgttgggcagcgggggtggtggcggtgacaagtcgaaccgaagagtgatcaaggtcaaaaggacaccaaagaagagataagggtgcgccctctgttggaatcttcctttgatggtgtcatttgtgattggatcgcactgcttgggaacgaagtcaagtacgacgaggttttatggccacgcagatttccctgcagcagggcgatagcgctatatatctcatggctggcttgtaaacgcatccaccaaggtcagtgtagtctcctgtgcactcaattcatttcctcatcggggccggcggcctgcatgttgtgtaatatgcctgtgctcatggggtgtaaaatagaacaaaaaagtgttgtaatttttgttttcttgcctccaaatgccgacttgatttcttatctgtggtttggctacggtatatttgtatcggagtgtaacgcactgttgtatttttgtttttgggtttattacattcaacaaggtcagaactgtatcgtagaatacctgtccatacttaatcctgcctacgcattgattgtttactcgtcgtccgtgagctgttgcgtgctcgtgccacgctgtgttgtccttgtcgcagcagaatat

SEQ ID NO: 5566 - DNA, 4681 bp, Zea Mays
caccgaaatagagacaggagaggctgcgcagcagcacacaggcctcgcgacgcgactcgcgggacggaagccctagtttttttccttgcgttattccacccccttccttcctaccccgcgcctccgccccatcctccaccctgcgcccccgcctccgccgcgccatgtacccaagcccgtacgacggttccggcgccggaggaaagatccggcgccgcccgcacctccgcgccgcctccacgccctacgaacggccccccgccgccgcggcggcgcaccgcctcgcggccgctgctgcagcggcttccgcatcctcggagcccggcggggagcgcggcggcgggggcggtggctgggtgtcccggctggtggacccggcctcccgcctcatcgcgggtggcgccgcgcgcctcttcggctcggtgttccgcaagcgcctcgccccgccgccggccccttctccgccgctgtcgtcgcctcctggacgaaacaatgagccaaaacagggcttacctgattcaacacatgttaccagaacatttcaaaactcaatgcaggattcacttccaatcccagagggtggaatggagaaagggaagagcatagttgacacatcagatgtcaaagcaatgtctgaagtagagcacttgttaatgcgaaagacatttactaaggttgagtttgatcgtcttacagacttattgcgtgcaagaaccattgagtctgatccacctaaaccaattgtttctcgtgaggaaaagaatgaagaaagtatcaaagttgatggaattagaggctcagcgttacgtcatatggacctagatgattctcctgctgttaaagtacataatcatggtgctagttctcctgcagaactcgcgaaacaatatatgagctctcgttatttgagggaaccccaatccagtagtctgcggagccgattgtttcttgagaataaaggtgaagcaagcaacactgtcaatgataggaggtctgtaccaccaattgttcagacaccacttgaacttcggaatgaaaaccctggtctccctgtaaatggctatgtgacttcgggattacgtgggcgttcagcgatatatagaatgtctcgctctccatattttaagggtcagaactattccagtgatttgaacacgtcttcattgtcccaacgatcacaaagcttgcatgttggtggcaggcaggtcttgaaacgaagcggggctgaattagagaatgaacttggatctataggccccattcgtagaattcggcagaaatcaaatatgatgtcttcatttagagattctcgtgcaaatcctaaaggaaaccttcttactagccatataagtagtactgatttcactgaagacggtgcatccattcagtctccgagctcaaaaaaattattggttgggagtagtcaatctctgcgacccttagaatcccaaaagaatgagggagatggtaaatctagtgatagcattccacccataccagctcaatcaaacaagatggctgaaaagatatttgagcagcttaatataatagctccatcgccaaaacaacaacagtctgttactctgaatgctagtaactctatgtcaaagaaacctgtttttcaagatgctgggtcaagcagtatgtataaccaatctagttccctgaagtttcaagatttggatggtgcaaatggaccccatgatacaaacttgaatggttccctgctgaagaaagacaagctaaatataataaaagacggatcgccaaaagctgccttttctgatagacctgcccttttggggaactcggtttctgcttctaaatcatggacgccagcctttaaaatggctgtgatagaggacttaccagagttggatgatgatctggaggtccttattcaatcaagtaagatagaggttgaaacaactgagcagaaaattgattcaaatagaaaagaacagaaggttgaacaaaatatattagagcaaagggttgaaccgaacttgaagaacattgctggttctacgattagtgaacagcctgtagcatcactgtctaaaactgtcacttcatctggtggtttatttttatcaaatgatcctgggaaggcagttcccaaagcttctgtggacaataataccgaatttgcattctcaaatgggcctcctggcacccgccctgcaactggtgtatcagcaatgccacttgcttcagttaataacgataaacagactggtgcttcaaatttcattttcggcatcaagcagccaattacgtcagattttgaaacatcaactgcaaaaaacaaatcaacactcgggcagagtgtcaccaagcccacaacattagccagcactagttcagagagaggtgataaaacagaaaaagcagaagatgtagccaacccatctgagaaggtgttgccttcagctgcatcaacaacactgaatgcacctctccattttacatctgtggcatctacttcgagcctgagcaatggcttgtcatactcaccaccaaagctcacaactcctccacctactgataaacctgctatcagctcagctgtttccacttccatatttgccgtatccagtagcagtccagctatttcatcgtctcctgcatttacgggatttagtttttcttccagtgctccggttggattgtcattggtaacatcagctaaatctgatggcacaactgctgaaaataaggcagctagcaccttatcatttggtatagggggtacaaaagctgaagtgaaatctgttgcaccagatgcaagcagcaaggcatcatcggaactttttatttcacctgtgtcatcaagtattgcaagcttttcaagttcccccgccacatctacgcctactttcaccgcagttgcaccttcaagtgatgctgctggaatatctgtggctgcaccatctagtacttccactgcaccaggtttacagtctgcttcaaccccttcatttacatttccgagctctggaaacaacctttttgggttcagctccccagcccaatctactggcctcagtacatcgtcacttgctggtagtacctctcaaccaccagctgctagcacactctttggtagtaagccgacgcagtcagacggaacaatacaacaaacatcccagagttcaaaaccacaatctggctcaccattcccggtcatgactcctggagttggagcatcctcgtctggacctgggacgctatcttttggacttggagcttcctcaactggttcaggcactgcatcttttggtgtcggagcttcatcttccgcacctggaactttatcaacttttggtgcagcagctcactcttctggacctggagttttctcttttggggcaggaacttcctcatcaggacctagcactgcctcttttggtgcagcaacttccacatcagggactggatttggcaattcaccatttggaactggagctacttttgcgaatccatttagctctagttcaagcactgggttcacattttcttcacctagctcttctgctggtgcatcaacagcggccagtacgagtgtatttgccagcacctctacagcttcttcagcctcagcttttagcaacccttttggctcaagttcatccccacccagcacatttacatttgggcaatcaggttcttcaggcaacacttttgcatttggagcgcagccagctccaacgttcccatctcaaccatcacttttctcatttagttcagccaacactagcatgaattcgtctccacagcctgcatttggaatgataaataccaacacagccttcagcatggcttcccccggaaatgatcagatgaacgaagacagcatggcagatgacactagtcaggcagcacctgcgccagcgccagtatttggttcatcatttggacagcagaacaactcatctgctgccccggtatttggtgctcccgcggtccagccaggtggtgtttttcagttcgggggccaacaaggttcagcacagcagaacccgtccttcccagctgttggcagtctagagtttcagggtgggaacttttcgttgggcagcgggggtggtggcggtgacaagtcgaaccgaagagtgatcaaggtcaaaaggacaccaaagaagagataagggtgcgccctctgttggaatcttcctttgatggtgtcatttgtgattggatcgcactgcttgggaacgaagtcaagtacgacgaggttttatggccacgcagatttccctgcagcagggcgatagcgctatatatctcatggctggcttgtaaacgcatccaccaaggtcagtgtagtctcctgtgcactcaattcatttcctcatcggggccggcggcctgcatgttgtgtaatatgcctgtgctcatggggtgtaaaatagaacaaaaaagtgttgtaatttttgttttcttgcctccaaatgccgacttgatttcttatctgtggtttggctacggtatatttgtatcggagtgtaacgcactgttgtatttttgtttttgggtttattacattcaacaaggtcagaactgtatcgtagaatacctgtccatacttaatcctgcctacgcattgattgtttactcgtcgtccgtgagctgttgcgtgctcgtgccacgctgtgttgtccttgtcgcagcagaatat

SEQ ID NO: 5567 - DNA, 4407 bp, Zea Mays
gtgatgaagctgatgtgttttgccgtggtaactcacatgaactttcctgcagaaacggaaagctttaaaaccgtggtttgcagttatgtataaaaggaaacatatcacaatgattgattggtgtatgatagagtcaattttagcgctcaagcggtgtctaaccaattggatccttatgtttttattggtggatgcgaaataaaagagctctcttactctccgcatcctttcttatggacgaaacaatgagccaaaacagggcttacctgattcaacacatgttgattcacttccaatcccagagggtggaatggagaaagggaagagcatagttgacacatcagatgtcaaagcaatgtctgaagtagagcacttgttaatgcgaaagacatttactaaggttgagtttgatcgtcttacagacttattgcgtgcaagaaccattgagtctgatccacctaaaccaattgtttctcgtgaggaaaagaatgaagaaagtatcaaagttgatggaattagaggctcagcgttacgtcatatggacctagatgattctcctgctgttaaagtacataatcatggtgctagttctcctgcagaactcgcgaaacaatatatgagctctcgttatttgagggaaccccaatccagtagtctgcggagccgattgtttcttgagaataaaggtgaagcaagcaacactgtcaatgataggaggtctgtaccaccaattgttcagacaccacttgaacttcggaatgaaaaccctggtctccctgtaaatggctatgtgacttcgggattacgtgggcgttcagcgatatatagaatgtctcgctctccatattttaagggtcagaactattccagtgatttgaacacgtcttcattgtcccaacgatcacaaagcttgcatgttggtggcaggcaggtcttgaaacgaagcggggctgaattagagaatgaacttggatctataggccccattcgtagaattcggcagaaatcaaatatgatgtcttcatttagagattctcgtgcaaatcctaaaggaaaccttcttactagccatataagtagtactgatttcactgaagacggtgcatccattcagtctccgagctcaaaaaaattattggttgggagtagtcaatctctgcgacccttagaatcccaaaagaatgagggagatggtaaatctagtgatagcattccacccataccagctcaatcaaacaagatggctgaaaagatatttgagcagcttaatataatagctccatcgccaaaacaacaacagtctgttactctgaatgctagtaactctatgtcaaagaaacctgtttttcaagatgctgggtcaagcagtatgtataaccaatctagttccctgaagtttcaagatttggatggtgcaaatggaccccatgatacaaacttgaatggttccctgctgaagaaagacaagctaaatataataaaagacggatcgccaaaagctgccttttctgatagacctgcccttttggggaactcggtttctgcttctaaatcatggacgccagcctttaaaatggctgtgatagaggacttaccagagttggatgatgatctggaggtccttattcaatcaagtaagatagaggttgaaacaactgagcagaaaattgattcaaatagaaaagaacagaaggttgaacaaaatatattagagcaaagggttgaaccgaacttgaagaacattgctggttctacgattagtgaacagcctgtagcatcactgtctaaaactgtcacttcatctggtggtttatttttatcaaatgatcctgggaaggcagttcccaaagcttctgtggacaataataccgaatttgcattctcaaatgggcctcctggcacccgccctgcaactggtgtatcagcaatgccacttgcttcagttaataacgataaacagactggtgcttcaaatttcattttcggcatcaagcagccaattacgtcagattttgaaacatcaactgcaaaaaacaaatcaacactcgggcagagtgtcaccaagcccacaacattagccagcactagttcagagagaggtgataaaacagaaaaagcagaagatgtagccaacccatctgagaaggtgttgccttcagctgcatcaacaacactgaatgcacctctccattttacatctgtggcatctacttcgagcctgagcaatggcttgtcatactcaccaccaaagctcacaactcctccacctactgataaacctgctatcagctcagctgtttccacttccatatttgccgtatccagtagcagtccagctatttcatcgtctcctgcatttacgggatttagtttttcttccagtgctccggttggattgtcattggtaacatcagctaaatctgatggcacaactgctgaaaataaggcagctagcaccttatcatttggtatagggggtacaaaagctgaagtgaaatctgttgcaccagatgcaagcagcaaggcatcatcggaactttttatttcacctgtgtcatcaagtattgcaagcttttcaagttcccccgccacatctacgcctactttcaccgcagttgcaccttcaagtgatgctgctggaatatctgtggctgcaccatctagtacttccactgcaccaggtttacagtctgcttcaaccccttcatttacatttccgagctctggaaacaacctttttgggttcagctccccagcccaatctactggcctcagtacatcgtcacttgctggtagtacctctcaaccaccagctgctagcacactctttggtagtaagccgacgcagtcagacggaacaatacaacaaacatcccagagttcaaaaccacaatctggctcaccattcccggtcatgactcctggagttggagcatcctcgtctggacctgggacgctatcttttggacttggagcttcctcaactggttcaggcactgcatcttttggtgtcggagcttcatcttccgcacctggaactttatcaacttttggtgcagcagctcactcttctggacctggagttttctcttttggggcaggaacttcctcatcaggacctagcactgcctcttttggtgcagcaacttccacatcagggactggatttggcaattcaccatttggaactggagctacttttgcgaatccatttagctctagttcaagcactgggttcacattttcttcacctagctcttctgctggtgcatcaacagcggccagtacgagtgtatttgccagcacctctacagcttcttcagcctcagcttttagcaacccttttggctcaagttcatccccacccagcacatttacatttgggcaatcaggttcttcaggcaacacttttgcatttggagcgcagccagctccaacgttcccatctcaaccatcacttttctcatttagttcagccaacactagcatgaattcgtctccacagcctgcatttggaatgataaataccaacacagccttcagcatggcttcccccggaaatgatcagatgaacgaagacagcatggcagatgacactagtcaggcagcacctgcgccagcgccagtatttggttcatcatttggacagcagaacaactcatctgctgccccggtatttggtgctcccgcggtccagccaggtggtgtttttcagttcgggggccaacaaggttcagcacagcagaacccgtccttcccagctgttggcagtctagagtttcagggtgggaacttttcgttgggcagcgggggtggtggcggtgacaagtcgaaccgaagagtgatcaaggtcaaaaggacaccaaagaagagataagggtgcgccctctgttggaatcttcctttgatggtgtcatttgtgattggatcgcactgcttgggaacgaagtcaagtacgacgaggttttatggccacgcagatttccctgcagcagggcgatagcgctatatatctcatggctggcttgtaaacgcatccaccaaggtcagtgtagtctcctgtgcactcaattcatttcctcatcggggccggcggcctgcatgttgtgtaatatgcctgtgctcatggggtgtaaaatagaacaaaaaagtgttgtaatttttgttttcttgcctccaaatgccgacttgatttcttatctgtggtttggctacggtatatttgtatcggagtgtaacgcactgttgtatttttgtttttgggtttattacattcaacaaggtcagaactgtatcgtagaatacctgtccatacttaatcctgcctacgcattgattgtttactcgtcgtccgtgagctgttgcgtgctcgtgccacgctgtgttgtccttgtcgcagcagaatat

SEQ ID NO: 5568 - DNA, 3858 bp, Zea Mays
tctcttctcactttttctggtacataatcatggtgctagttctcctgcagaactcgcgaaacaatatatgagctctcgttatttgagggaaccccaatccagtagtctgcggagccgattgtttcttgagaataaaggtgaagcaagcaacactgtcaatgataggaggtctgtaccaccaattgttcagacaccacttgaacttcggaatgaaaaccctggtctccctgtaaatggctatgtgacttcgggattacgtgggcgttcagcgatatatagaatgtctcgctctccatattttaagggtcagaactattccagtgatttgaacacgtcttcattgtcccaacgatcacaaagcttgcatgttggtggcaggcaggtcttgaaacgaagcggggctgaattagagaatgaacttggatctataggccccattcgtagaattcggcagaaatcaaatatgatgtcttcatttagagattctcgtgcaaatcctaaaggaaaccttcttactagccatataagtagtactgatttcactgaagacggtgcatccattcagtctccgagctcaaaaaaattattggttgggagtagtcaatctctgcgacccttagaatcccaaaagaatgagggagatggtaaatctagtgatagcattccacccataccagctcaatcaaacaagatggctgaaaagatatttgagcagcttaatataatagctccatcgccaaaacaacaacagtctgttactctgaatgctagtaactctatgtcaaagaaacctgtttttcaagatgctgggtcaagcagtatgtataaccaatctagttccctgaagtttcaagatttggatggtgcaaatggaccccatgatacaaacttgaatggttccctgctgaagaaagacaagctaaatataataaaagacggatcgccaaaagctgccttttctgatagacctgcccttttggggaactcggtttctgcttctaaatcatggacgccagcctttaaaatggctgtgatagaggacttaccagagttggatgatgatctggaggtccttattcaatcaagtaagatagaggttgaaacaactgagcagaaaattgattcaaatagaaaagaacagaaggttgaacaaaatatattagagcaaagggttgaaccgaacttgaagaacattgctggttctacgattagtgaacagcctgtagcatcactgtctaaaactgtcacttcatctggtggtttatttttatcaaatgatcctgggaaggcagttcccaaagcttctgtggacaataataccgaatttgcattctcaaatgggcctcctggcacccgccctgcaactggtgtatcagcaatgccacttgcttcagttaataacgataaacagactggtgcttcaaatttcattttcggcatcaagcagccaattacgtcagattttgaaacatcaactgcaaaaaacaaatcaacactcgggcagagtgtcaccaagcccacaacattagccagcactagttcagagagaggtgataaaacagaaaaagcagaagatgtagccaacccatctgagaaggtgttgccttcagctgcatcaacaacactgaatgcacctctccattttacatctgtggcatctacttcgagcctgagcaatggcttgtcatactcaccaccaaagctcacaactcctccacctactgataaacctgctatcagctcagctgtttccacttccatatttgccgtatccagtagcagtccagctatttcatcgtctcctgcatttacgggatttagtttttcttccagtgctccggttggattgtcattggtaacatcagctaaatctgatggcacaactgctgaaaataaggcagctagcaccttatcatttggtatagggggtacaaaagctgaagtgaaatctgttgcaccagatgcaagcagcaaggcatcatcggaactttttatttcacctgtgtcatcaagtattgcaagcttttcaagttcccccgccacatctacgcctactttcaccgcagttgcaccttcaagtgatgctgctggaatatctgtggctgcaccatctagtacttccactgcaccaggtttacagtctgcttcaaccccttcatttacatttccgagctctggaaacaacctttttgggttcagctccccagcccaatctactggcctcagtacatcgtcacttgctggtagtacctctcaaccaccagctgctagcacactctttggtagtaagccgacgcagtcagacggaacaatacaacaaacatcccagagttcaaaaccacaatctggctcaccattcccggtcatgactcctggagttggagcatcctcgtctggacctgggacgctatcttttggacttggagcttcctcaactggttcaggcactgcatcttttggtgtcggagcttcatcttccgcacctggaactttatcaacttttggtgcagcagctcactcttctggacctggagttttctcttttggggcaggaacttcctcatcaggacctagcactgcctcttttggtgcagcaacttccacatcagggactggatttggcaattcaccatttggaactggagctacttttgcgaatccatttagctctagttcaagcactgggttcacattttcttcacctagctcttctgctggtgcatcaacagcggccagtacgagtgtatttgccagcacctctacagcttcttcagcctcagcttttagcaacccttttggctcaagttcatccccacccagcacatttacatttgggcaatcaggttcttcaggcaacacttttgcatttggagcgcagccagctccaacgttcccatctcaaccatcacttttctcatttagttcagccaacactagcatgaattcgtctccacagcctgcatttggaatgataaataccaacacagccttcagcatggcttcccccggaaatgatcagatgaacgaagacagcatggcagatgacactagtcaggcagcacctgcgccagcgccagtatttggttcatcatttggacagcagaacaactcatctgctgccccggtatttggtgctcccgcggtccagccaggtggtgtttttcagttcgggggccaacaaggttcagcacagcagaacccgtccttcccagctgttggcagtctagagtttcagggtgggaacttttcgttgggcagcgggggtggtggcggtgacaagtcgaaccgaagagtgatcaaggtcaaaaggacaccaaagaagagataagggtgcgccctctgttggaatcttcctttgatggtgtcatttgtgattggatcgcactgcttgggaacgaagtcaagtacgacgaggttttatggccacgcagatttccctgcagcagggcgatagcgctatatatctcatggctggcttgtaaacgcatccaccaaggtcagtgtagtctcctgtgcactcaattcatttcctcatcggggccggcggcctgcatgttgtgtaatatgcctgtgctcatggggtgtaaaatagaacaaaaaagtgttgtaatttttgttttcttgcctccaaatgccgacttgatttcttatctgtggtttggctacggtatatttgtatcggagtgtaacgcactgttgtatttttgtttttgggtttattacattcaacaaggtcagaactgtatcgtagaatacctgtccatacttaatcctgcctacgcattgattgtttactcgtcgtccgtgagctgttgcgtgctcgtgccacgctgtgttgtccttgtcgcagcagaatat

SEQ ID NO: 5569 - DNA, 2708 bp, Zea Mays
caaattctgactaggccgctgtccctcgccgccccccgcttcgcgccctcttcctggtagctcctgcctcctgcaccacgtaccgagggatcacgcgtttcctgaacctcagctcctgcccttttgttgccgccctttcccctcttcaatgttcttgtcatttcttcttctagataagctgcatatcctatcgtggtcgtggtcgagctgttgtccccttgcttgtgaaccttcggccctctttggaggtggtcttcctacccctcaatttgccttgagcaatttggtttctagcgtctgtgggtgctctcctttgactgcttcttcctccacctgctgcgccggcaagacgacgaggtccaaaatctcggtggccgtgctgtcactctcgccgcttcgttattcttgatgcgcaggcacagctgctgtcccaaggcgtccgatttccgcattgcgtgctccgggatacacctcttctcgcgttgacttcgacgcgcactcgaggcgatcggggcacttgtttccatctttgatctccgctttccatagcttcccgcgcgatctatccgatctcctgcccaaagggagccccgttcccggatgctggaggaaggggcacacatatacccgcgacgtgatctgagccggcacggagctccaggagtcgagggctgtgttcttggatccgataaaggttccggccactcgtgttcgccccgccgcacgccgcgatggggaacacgtgcgtcggacccagcatcaccaagaacggcttcttccagtccgtctccacggtgctgtggaagacgtcgcaggacggcgacgcgctgcccgccgccggctctgatgccaatggccccggccggtcgcagtcgacgccgccgccggcactgccgaagccggcgtccgacgtgcacgtcgccgtgcagagcaaggcccctgagcccgtcaagatcgccgcctcccactcggagccggcgcccaaggccgccgcccccgtcgccgccaacgccagccccagctccagccccaactcgtctgccgaggcgctgcccaccaggccgcgtcccaaggcgccgccggtgaagcgcgtgtccagcgccgggctgctggtcggctcggtgctcaagcgcaggacggagaaccttaaggacaagtacagcctggggcggcgcctcgggcagggccagttcggcaccacgtacctgtgcgtggagcgggccacgggcaaggagttcgcgtgcaagtccatcctgaagcgcaagctcgtcaccgacgacgacgtggaggacgtccgccgggagatccagataatgcaccacctggcgggccaccccaacgtgatctccatccgcggcgcctacgaggacgccgtcgccgtgcacctcgtcatggagctctgcggcggcggcgagctgttcgacaggatcgtgcagaagggccactacaccgagaggaaggccgccgagctcgccagggtcatcgtcggcgtcgtcgaggcgtgccactccatgggcgtcatgcaccgggacctcaagccggagaacttcctcttcgctgaccagaaggaggaggccgctctcaagaccatcgattttggtctctccattttctttcaccctggtcaaatattcaccgacgtggtgggtagcccttactacgtggcaccagaggtgctgaagaagaagtacggtccagaggcagacgtctggagcgccggtgtgatcatctacatcctgctgtccggagtgccgccattctgggcagagaacgagcagggcatattcgaagaggttttgcacgggaggctcgacttcgagtcggagccatggcccagcgtctccgaaggcgccaaggatcttgtgaggagaatgctcatcagggacccgaggaagagactgaccgcccatgaagttctacgttggtggtttggctcctgacaagccgctggactcggctgttctttctcgcatgaagcagttctcggccatgaacaagctgaaaaagatggctctcagggtgatcgccgagaacctgtccgaggacgagatcgcggggctgaaggagatgttcaagatgatcgacgcggacaacagcgggcagatcacgttcgaggagctcaaggtggggctgaagaaggtgggcgccaacctccaggagtcggagatctacgcgctgatgcaagctgcggacgtggacaacaacggcacgatcgactacggcgagttcatcgcggccacgctgcacctgaacaaggtggagcgggaggaccacctgttcgcggcgttccagtacttcgacaaggacggcagcggatacatcaccgccgacgagctgcaggtggcgtgcgaggagttcggcctgggcgacgtccagctggaggacgtgatcggggaggtcgaccaggacaacgacggccgcatagactacaacgagttcgtcgcgatgatgcagaagccgccggcgggtctgcccaacaagaaggccggcctgcagaacagcttcagcatcgggttcagggaggcactcaggatggcctgaccctgaacagctggttggctgcctgcctgcctgtagatgacgaacggagttccgaactgggtgagttccagtagagacggcccgaggcgggcttgagacgtgtacatgtgccatggaggcagaagttggactgctcggttccaaaacggttttgtttcatgtcgcgt

SEQ ID NO: 5570 - DNA, 2505 bp, Zea Mays
cgggggtcggggcgtaaagctgcgtacggcggcacggtggtagtgatacacaccgaagcacccaggaaagcatcctggctcctgtccctcctcgccatttcacgagctcccatttcacacgctcactccgtcactcgctcgcctccgccgtcgcaaagcctgccggaaccggcgtgtgcggtcagttccggtgccgcgcagggcctgaggaatgccgcactccgtcctggcccgtctgccccccggctccgtccggctcgtagctgccttcgggctgctgctcctcgtctcgctgctcgttctccaccgccgccccgggaggccccatgtggcggcggccgccgccagcgaccgactcactgatccctcccggtcccggctgttcctgtcgcagtcccccggggccaacgcgagcatcgcggctgacctccgcgcgctcaccgcggggccgcacctcgcggggacgcctgcgtcggcgggtgcagccgcgcacgtgctcgcccgcctccgcgccgcgggactccaaaccctaacgcgcgagtacgagccgctgctctcgtaccctgggcacgcctccctcgcgctgctccggcccgacgggtccctgctcgcgcgcctgtcgctcgaggagcccgcggacgaggggcgccgcgtcgtgcctccgtaccacgcgtacgcgccgtccggcggggccgtcgcggaggcggtgttcgtcaacctcggccgcgaggaggactacgtcgtgctcgagaggcttggagtgggcgtgcgcggccgcgtcgcggtggcgcgccgcgggggtgggtaccgcggcggggttgtggcgcgcgctgcggacaagggagccgtcgccgtgctcatcgcgggcaacgcggacggcggcgtcgagagaggagtcgttcttctcggcggccccggcgatccgctcacccccgggtgggccgccaccagcggtgcggagcgtttgaagttcgacgataaggcagtcaagcagcggtttccgagtatcccctccatgccggtgtcggccaagacggcagcagcgatcattcgaagcctgggcggtccggccataccggcggaatggaaggacggcctcggggtggataccggtggtcttggacctggccccacgctggtcaacttcacgtatcaggaggacaggaagttttataagatacgagacatttttggtatcataaaagggcaagaggaacctgaccgatatgtgatactcggtaaccacagagatgcatggacctatggagcagttgatcctaacagcgggacagctgcacttctagacattgctcggcgtcttggaataatgctgcaatcaggatggaaaccacggaggtccatcattctttgtagttgggacggtgaagaatttgggatggctctttttcgtccccagattggatcaactgaatgggttgaagacaaccttgaagatctgcattccaaagctgtagcttacttgaatgttgattgtgctgtgcaaggtgtgggattttttgctggttctactccccagttggacaaactcttggttgatattacaagacaggtaagggatcctgatgtcacgggaaagatggttcatgatacatggaatgaaatgagtggcggcatcaaaatagaaaggcttgccagaactgattccgattttgctccatttctacatcatgctggaattccatctgtagacttgtactacggagaagaatttcctggttaccatactgctcttgacacttataattggatggaaaagcatggcgatccattctttcttcgtcatttggctatcacagaaatttggggactattagctcttcgattggccaatgatcctgtgttaccttttgattatcaagcttacacttcgcagttacaggagcatataaaaacattgtctgccctgacgagcaatggccatgcagtaaatttgatgaatgggtgcgtcaatgatctttctggtgcagctatggaagttctgaaggagatgaagaaactacagcagatggatttatatgatgaacacgccaggatgagaaggcgattgttgaacgatcgcctcctacttgctgaaagaagcttcctgcaacctgaagggctccaaggaagaggatggtttaagcatctgttgtactcgcctccggaggactacgaaagcaagctgtcgttcttccctgggatcgctgacgccatctcacggtccgccaatctgagtgacaaggaacaggaggtggcaatgcagcatgaagtgtggaaagtctgccgtgcgattcaaagggctgcgagtgttcttagaggtgaattcagtgagcaaaaaccgacgaattttagttctttggtgaccccatgagatgtgtttgtgcaaacaaataacaaacaatggttatttagtatctgcgcgaaatggaagtgtgatgaagaatgtgatgcttttgggcgtacactttacagcgcagcgttggggcagcagcgagtagagggccg

SEQ ID NO: 5571 - DNA, 2399 bp, Zea Mays
cctgtccctcctcgccatttcacgagctcccatttcacacgctcactccgtcactcgctcgcctccgccgtcgcaaagcctgccggaaccggcgtgtgcggtcagttccggtgccgcgcagggcctgaggaatgccgcactccgtcctggcccgtctgccccccggctccgtccggctcgtagctgccttcgggctgctgctcctcgtctcgctgctcgttctccaccgccgccccgggaggccccatgtggcggcggccgccgccagcgaccgactcactgatccctcccggtcccggctgttcctgtcgcagtcccccggggccaacgcgagcatcgcggctgacctccgcgcgctcaccgcggggccgcacctcgcggggacgcctgcgtcggcgggtgcagccgcgcacgtgctcgcccgcctccgcgccgcgggactccaaaccctaacgcgcgagtacgagccgctgctctcgtaccctgggcacgcctccctcgcgctgctccggcccgacgggtccctgctcgcgcgcctgtcgctcgaggagcccgcggacgaggggcgccgcgtcgtgcctccgtaccacgcgtacgcgccgtccggcggggccgtcgcggaggcggtgttcgtcaacctcggccgcgaggaggactacgtcgtgctcgagaggcttggagtgggcgtgcgcggccgcgtcgcggtggcgcgccgcgggggtgggtaccgcggcggggttgtggcgcgcgctgcggacaagggagccgtcgccgtgctcatcgcgggcaacgcggacggcggcgtcgagagaggagtcgttcttctcggcggccccggcgatccgctcacccccgggtgggccgccaccagcggtgcggagcgtttgaagttcgacgataaggcagtcaagcagcggtttccgagtatcccctccatgccggtgtcggccaagacggcagcagcgatcattcgaagcctgggcggtccggccataccggcggaatggaaggacggcctcggggtggataccggtggtcttggacctggccccacgctggtcaacttcacgtatcaggaagttttataagatacgagacatttttggtatcataaaagggcaagaggaacctgaccgatatgtgatactcggtaaccacagagatgcatggacctatggagcagttgatcctaacagcgggacagctgcacttctagacattgctcggcgtcttggaataatgctgcaatcaggatggaaaccacggaggtccatcattctttgtagttgggacggtgaagaatttgggatgattggatcaactgaatgggttgaagacaaccttgaagatctgcattccaaagctgtagcttacttgaatgttgattgtgctgtgcaaggtgtgggattttttgctggttctactccccagttggacaaactcttggttgatattacaagacaggtaagggatcctgatgtcacgggaaagatggttcatgatacatggaatgaaatgagtggcggcatcaaaatagaaaggcttgccagaactgattccgattttgctccatttctacatcatgctggaattccatctgtagacttgtactacggagaagaatttcctggttaccatactgctcttgacacttataattggatggaaaagcatggcgatccattctttcttcgtcatttggctatcacagaaatttggggactattagctcttcgattggccaatgatcctgtgttaccttttgattatcaagcttacacttcgcagttacaggagcatataaaaacattgtctgccctgacgagcaatggccatgcagtaaatttgatgaatgggtgcgtcaatgatctttctggtgcagctatggaagttctgaaggagatgaagaaactacagcagatggatttatatgatgaacacgccaggatgagaaggcgattgttgaacgatcgcctcctacttgctgaaagaagcttcctgcaacctgaagggctccaaggaagaggatggtttaagcatctgttgtactcgcctccggaggactacgaaagcaagctgtcgttcttccctgggatcgctgacgccatctcacggtccgccaatctgagtgacaaggaacaggaggtggcaatgcagcatgaagtgtggaaagtctgccgtgcgattcaaagggctgcgagtgttcttagaggtgaattcagtgagcaaaaaccgacgaattttagttctttggtgaccccatgagatgtgtttgtgcaaacaaataacaaacaatggttatttagtatctgcgcgaaatggaagtgtgatgaagaatgtgatgcttttgggcgtacactttacagcgcagcgttggggcagcagcgagtagagggccg

SEQ ID NO: 5572 - DNA, 2205 bp, Zea Mays
atgccgcactccgtcctggcccgtctgccccccggctccgtccggctcgtagctgccttcgggctgctgctcctcgtctcgctgctcgttctccaccgccgccccgggaggccccatgtggcggcggccgccgccagcgaccgactcactgatccctcccggtcccggctgttcctgtcgcagtcccccggggccaacgcgagcatcgcggctgacctccgcgcgctcaccgcggggccgcacctcgcggggacgcctgcgtcggcgggtgcagccgcgcacgtgctcgcccgcctccgcgccgcgggactccaaaccctaacgcgcgagtacgagccgctgctctcgtaccctgggcacgcctccctcgcgctgctccggcccgacgggtccctgctcgcgcgcctgtcgctcgaggagcccgcggacgaggggcgccgcgtcgtgcctccgtaccacgcgtacgcgccgtccggcggggccgtcgcggaggcggtgttcgtcaacctcggccgcgaggaggactacgtcgtgctcgagaggcttggagtgggcgtgcgcggccgcgtcgcggtggcgcgccgcgggggtgggtaccgcggcggggttgtggcgcgcgctgcggacaagggagccgtcgccgtgctcatcgcgggcaacgcggacggcggcgtcgagagaggagtcgttcttctcggcggccccggcgatccgctcacccccgggtgggccgccaccagcggtgcggagcgtttgaagttcgacgataaggcagtcaagcagcggtttccgagtatcccctccatgccggtgtcggccaagacggcagcagcgatcattcgaagcctgggcggtccggccataccggcggaatggaaggacggcctcggggtggataccggtggtcttggacctggccccacgctggtcaacttcacgtatcaggaggacaggaagttttataagatacgagacatttttggtatcataaaagggcaagaggaacctgaccgatatgtgatactcggtaaccacagagatgcatggacctatggagcagttgatcctaacagcgggacagctgcacttctagacattgctcggcgtcttggaataatgctgcaatcaggatggaaaccacggaggtccatcattctttgtagttgggacggtgaagaatttgggatggctctttttcgtccccagattggatcaactgaatgggttgaagacaaccttgaagatctgcattccaaagctgtagcttacttgaatgttgattgtgctgtgcaaggtgtgggattttttgctggttctactccccagttggacaaactcttggttgatattacaagacaggtaagggatcctgatgtcacgggaaagatggttcatgatacatggaatgaaatgagtggcggcatcaaaatagaaaggcttgccagaactgattccgattttgctccatttctacatcatgctggaattccatctgtagacttgtactacggagaagaatttcctggttaccatactgctcttgacacttataattggatggaaaagcatggcgatccattctttcttcgtcatttggctagagcatataaaaacattgtctgccctgacgagcaatggccatgcagtaaatttgatgaatgggtgcgtcaatgatctttctggtgcagctatggaagttctgaaggagatgaagaaactacagcagatggatttatatgatgaacacgccaggatgagaaggcgattgttgaacgatcgcctcctacttgctgaaagaagcttcctgcaacctgaagggctccaaggaagaggatggtttaagcatctgttgtactcgcctccggaggactacgaaagcaagctgtcgttcttccctgggatcgctgacgccatctcacggtccgccaatctgagtgacaaggaacaggaggtggcaatgcagcatgaagtgtggaaagtctgccgtgcgattcaaagggctgcgagtgttcttagaggtgaattcagtgagcaaaaaccgacgaattttagttctttggtgaccccatgagatgtgtttgtgcaaacaaataacaaacaatggttatttagtatctgcgcgaaatggaagtgtgatgaagaatgtgatgcttttgggcgtacactttacagcgcagcgttggggcagcagcgagtagagggccg

SEQ ID NO: 5573 - DNA, 2244 bp, Zea Mays
atgccgcactccgtcctggcccgtctgccccccggctccgtccggctcgtagctgccttcgggctgctgctcctcgtctcgctgctcgttctccaccgccgccccgggaggccccatgtggcggcggccgccgccagcgaccgactcactgatccctcccggtcccggctgttcctgtcgcagtcccccggggccaacgcgagcatcgcggctgacctccgcgcgctcaccgcggggccgcacctcgcggggacgcctgcgtcggcgggtgcagccgcgcacgtgctcgcccgcctccgcgccgcgggactccaaaccctaacgcgcgagtacgagccgctgctctcgtaccctgggcacgcctccctcgcgctgctccggcccgacgggtccctgctcgcgcgcctgtcgctcgaggagcccgcggacgaggggcgccgcgtcgtgcctccgtaccacgcgtacgcgccgtccggcggggccgtcgcggaggcggtgttcgtcaacctcggccgcgaggaggactacgtcgtgctcgagaggcttggagtgggcgtgcgcggccgcgtcgcggtggcgcgccgcgggggtgggtaccgcggcggggttgtggcgcgcgctgcggacaagggagccgtcgccgtgctcatcgcgggcaacgcggacggcggcgtcgagagaggagtcgttcttctcggcggccccggcgatccgctcacccccgggtgggccgccaccagcggtgcggagcgtttgaagttcgacgataaggcagtcaagcagcggtttccgagtatcccctccatgccggtgtcggccaagacggcagcagcgatcattcgaagcctgggcggtccggccataccggcggaatggaaggacggcctcggggtggataccggtggtcttggacctggccccacgctggtcaacttcacgtatcagagatgcatggacctatggagcagttgatcctaacagcgggacagctgcacttctagacattgctcggcgtcttggaataatgctgcaatcaggatggaaaccacggaggtccatcattctttgtagttgggacggtgaagaatttgggatgattggatcaactgaatgggttgaagacaaccttgaagatctgcattccaaagctgtagcttacttgaatgttgattgtgctgtgcaaggtgtgggattttttgctggttctactccccagttggacaaactcttggttgatattacaagacaggtaagggatcctgatgtcacgggaaagatggttcatgatacatggaatgaaatgagtggcggcatcaaaatagaaaggcttgccagaactgattccgattttgctccatttctacatcatgctggaattccatctgtagacttgtactacggagaagaatttcctggttaccatactgctcttgacacttataattggatggaaaagcatggcgatccattctttcttcgtcatttggctatcacagaaatttggggactattagctcttcgattggccaatgatcctgtgttaccttttgattatcaagcttacacttcgcagttacaggagcatataaaaacattgtctgccctgacgagcaatggccatgcagtaaatttgatgaatgggtgcgtcaatgatctttctggtgcagctatggaagttctgaaggagatgaagaagtggtgtttgaaactagctgatgacgtgctcctttgtatgttcggattcaaaatccagaaactacagcagatggatttatatgatgaacacgccaggatgagaaggcgattgttgaacgatcgcctcctacttgctgaaagaagcttcctgcaacctgaagggctccaaggaagaggatggtttaagcatctgttgtactcgcctccggaggactacgaaagcaagctgtcgttcttccctgggatcgctgacgccatctcacggtccgccaatctgagtgacaaggaacaggaggtggcaatgcagcatgaagtgtggaaagtctgccgtgcgattcaaagggctgcgagtgttcttagaggtgaattcagtgagcaaaaaccgacgaattttagttctttggtgaccccatgagatgtgtttgtgcaaacaaataacaaacaatggttatttagtatctgcgcgaaatggaagtgtgatgaagaatgtgatgcttttgggcgtacactttacagcgcagcgttggggcagcagcgagtagagggccg

SEQ ID NO: 5574 - DNA, 2362 bp, Zea Mays
atgccgcactccgtcctggcccgtctgccccccggctccgtccggctcgtagctgccttcgggctgctgctcctcgtctcgctgctcgttctccaccgccgccccgggaggccccatgtggcggcggccgccgccagcgaccgactcactgatccctcccggtcccggctgttcctgtcgcagtcccccggggccaacgcgagcatcgcggctgacctccgcgcgctcaccgcggggccgcacctcgcggggacgcctgcgtcggcgggtgcagccgcgcacgtgctcgcccgcctccgcgccgcgggactccaaaccctaacgcgcgagtacgagccgctgctctcgtaccctgggcacgcctccctcgcgctgctccggcccgacgggtccctgctcgcgcgcctgtcgctcgaggagcccgcggacgaggggcgccgcgtcgtgcctccgtaccacgcgtacgcgccgtccggcggggccgtcgcggaggcggtgttcgtcaacctcggccgcgaggaggactacgtcgtgctcgagaggcttggagtgggcgtgcgcggccgcgtcgcggtggcgcgccgcgggggtgggtaccgcggcggggttgtggcgcgcgctgcggacaagggagccgtcgccgtgctcatcgcgggcaacgcggacggcggcgtcgagagaggagtcgttcttctcggcggccccggcgatccgctcacccccgggtgggccgccaccagcggtgcggagcgtttgaagttcgacgataaggcagtcaagcagcggtttccgagtatcccctccatgccggtgtcggccaagacggcagcagcgatcattcgaagcctgggcggtccggccataccggcggaatggaaggacggcctcggggtggataccggtggtcttggacctggccccacgctggtcaacttcacgtatcaggaggacaggaagttttataagatacgagacatttttggtatcataaaagggcaagaggaacctgaccgatatgtgatactcggtaaccacagagatgcatggacctatggagcagttgatcctaacagcgggacagctgcacttctagacattgctcggcgtcttggaataatgctgcaatcaggatggaaaccacggaggtccatcattctttgtagttgggacggtgaagaatttgggatgattggatcaactgaatgggttgaagacaaccttgaagatctgcattccaaagctgtagcttacttgaatgttgattgtgctgtgcaaggtgtgggattttttgctggttctactccccagttggacaaactcttggttgatattacaagacaggtaagggatcctgatgtcacgggaaagatggttcatgatacatggaatgaaatgagtggcggcatcaaagggaaaatgcgaacacccgggccaagtcaagacattgcttgtcttatatttgtttgccctatttctaaagaatgtcaaatctgcagatagaaaggcttgccagaactgattccgattttgctccatttctacatcatgctggaattccatctgtagacttgtactacggagaagaatttcctggttaccatactgctcttgacacttataattggatggaaaagcatggcgatccattctttcttcgtcatttggctatcacagaaatttggggactattagctcttcgattggccaatgatcctgtgttaccttttgattatcaagcttacacttcgcagttacaggagcatataaaaacattgtctgccctgacgagcaatggccatgcagtaaatttgatgaatgggtgcgtcaatgatctttctggtgcagctatggaagttctgaaggagatgaagaaactacagcagatggatttatatgatgaacacgccaggatgagaaggcgattgttgaacgatcgcctcctacttgctgaaagaagcttcctgcaacctgaagggctccaaggaagaggatggtttaagcatctgttgtactcgcctccggaggactacgaaagcaagctgtcgttcttccctgggatcgctgacgccatctcacggtccgccaatctgagtgacaaggaacaggaggtggcaatgcagcatgaagtgtggaaagtctgccgtgcgattcaaagggctgcgagtgttcttagaggtgaattcagtgagcaaaaaccgacgaattttagttctttggtgaccccatgagatgtgtttgtgcaaacaaataacaaacaatggttatttagtatctgcgcgaaatggaagtgtgatgaagaatgtgatgcttttgggcgtacactttacagcgcagcgttggggcagcagcgagtagagggccg

SEQ ID NO: 5575 - DNA, 873 bp, Zea Mays
cgcatctgattaaccctttcgagaaataggggaaccagagcaaagaagggaccgccgaccgccggatacctgacgctggcgggcggcggcggcggcggcggcgaagacgtccgttgcggctgcgacgaatccaagtaaccggggcccttgccgaactggcaggcgagataggtcccccgattcaagcggagatggttcactgatttcccttccccgccgccaattcgatcgggctcgcggctcgccgtctctgctctccccaaccggcaccaagccagccaatggcgctcgaggaggcacagcggccactgtccgccggcgtggcctggcgcctaaccggaagctggctaggctccgaactggttcgaggcttcaagccgatccgcatctatccaggcagtacattggaggggaaataccagaagcttggagctctgccccgactttcttgatcggcttgccaactggcttgtattcatcaccgaaaaccatttcttgtcttgagtgtattggtaaataatttctgtcaacctcaagattttccttcagaggataagaaggtgaacaagaagctgacagccaagctgaccctatactcaggatgtgttgtgccttctggtggtgaaaccgtctctttaagcaactgaactgctttaagtataacagaagagctcagtgattttccctttagaaaatcctctaccttgctagctctgatggcatggtcagctccataagcaccgaacaccaagcatatatcctccatgatgttcttccctgaagctgcatcagttgaagtccttgccaagagagcagcattgacatatgaagcagcattgccaaatggccgaggcgctgcccggaatgtctcaa

SEQ ID NO: 5576 - DNA, 1171 bp, Zea Mays
gagaaataggggaaccagagcaaagaagggaccgccgaccgccggatacctgacgctggcgggcggcggcggcggcggcggcgaagacgtccgttgcggctgcgacgaatccaagtaaccggggcccttgccgaactggcaggcgagataggtcccccgattcaagcggagatggttcactgatttcccttccccgccgccaattcgatcgggctcgcggctcgccgtctctgctctccccaaccggcaccaagccagccaatggcgctcgaggaggcacagcggccactgtccgccggcgtggcctggcgcctaaccggaagctggctaggctccgaactggttcgaggcttcaagccgatccgcatctatccagttcaagaagatacatatggaatgggctcatgggatcggtagaaaacccatggagtcagaagcaacgaccagaaggaaggcctatcagcagggggttccagaaggttaaacatgacagagatcttaagagatcttatctagatcaagttgtactcatctcatggtggataatggtaatacagtagtaaataaaaaccaaggaacaaaggaaagaagatgaagaatccactttatgttagtgagggacaaattcataagaaattaagatgccatttttgcaagaaaattggccatttcaagaaggattgcttgaacaggaagaaatggttcaaaaagaaacatatacatcattatgtttttgtgtgcttagaatcaaattttgttgaagtttatggtaataccttacggttattttgtggtgctactaatgtttcacatattacatagggatttcttctgacccaacccataagcgggtgtaaccagttcttgtacatgggaaataaaatgaaggcatgaattgaacagatcgagacatcgaataatcctcgagaccggtctgaatgtagacttgaaagcgtgtctttgtgttcttgaatgttctagaaatcttatatctacaagctagttgtatgtaataagcttaaagttcatggttggtcatggtatgtttcagttatataagaacaaatactagtatggttctattattttaatttgatggtttatatcatttcaatcttgaaggggttttctaaatccctatttaatgttgagcatgttgttggaaataaat

SEQ ID NO: 5577 - DNA, 3368 bp, Zea Mays
gtcgtccaacgcatcagcttcagacgtgttttagcaatccacacatacggacccttaagaactcgtaccatgacaggtcactaccgggaggcgggaggcacgcaggtcgccctacaggcctacacatatcgttctccctctctttcacccatgacccatttataatcatttatactcccagatttgcttctcaccttttctgtatcagatccagcaagtgcgttagacataacctgggggcagcagaggactagccggtagcgtcaacaggctggatggagcaaacttcctcttctactcctcatctgttgccgctccaattcattccatggatgatgccctcattgtgctcgatgaaatgggcacatggtagagcggcggctggcagctcctactcattccatggatgatgccctcaatgtgctcgataacagccggctgccttgctccactattttatgctcattagtatgacaaacactgaaacagagcctgaggcacacaacaaaacaggagctagcaggagtaatacttgtgcaagggaaaatgagttggatctgaatgttccttgctgccggtgcaagtccatcatggaagtcttcttaaatctttccattgacatgagttgatcaatcatgaactgtcaagcatctcgattctgctgctctcgtctgagcaactaatggacacacgacatatttgttctctgtacggtggagtttgccagcaagttcaggatcagcatgtgacctcagaggttgttgtataaggggatttggtcccatcttcgccggtttcttggactcactgcttatctttgttgatctccttggagtccaggcttttcactgaaatttccaattcttctcgcttcttggaggaaggaaacaagggaaacaagaataggatacatgggccctgtttgttttggcttttcgcagcttctaaccaccaaaagttactgcagactgccaaacactcagcttttcagtcagcttttataaaattcgtttggtaaaaaccattcaaaatcaacataaacatataatcggttgagtcatcacaatagtaataatccgtcattttatagatcataagccccatggacaactttatcttcctccgcacgtaatcctaatgatattcagattctctacacagccagattctccccacagctagattctcggaaaagctggtcagaaaaaagctgaaccaaacaggcacatggatagcttcgtgaagctagcgaggacggtggtggagaaaacacgccagtcatagtacagatacaagaactgctttgaggggccgtgggtgtcatgtcaccagcacaggtggatgcttacattgcttctgacataaagaataaaacaaacattggtaagttttctcttcgagcagcagtggatgtggatgtgtgcattcagatgttggtaagaagattcttcgttttcctttgaattccaaaagttcgtgctagaatataagacaatttttattctagtcacataatataataaggcgtgctctttctagacatgtatataccaaaatagtatagagaattaaatacatttattgagttagttacgccttttatactataatggagggagagagagagagagtatattttatgaaatttcttgaacttagtgctggttctgggagtagttgctttagtgatacacgtgaacttacgtcctgtttggatccttggaattgaattccattctaaaaatagtaatttaaacaaagatcaattaagctaatattgttttatgtgaaatatatttgtacactattattagcaatatttgtgaggcctagagacgtcctgggaggcctagaggtgttttgcctcttgccgctaggccccaggcagtaagaccacgtggtggccgtgcccgacgggatgctggtcgtgtgccatatggccaaggaccatgtgacagaggatttggttcatacttccccagcggactacaatttccttcttatggtgatcgcttcccttcgggaccgaggatgtttggtgtttttcctaacacttttcaggggcaaatgccgcagcactggtattcttcacagtttacttaccccagtgctgtgccatttgctcaccccgggtgttactattgatgcaggacggaggcttggagaacacgtggctcatggataccggctgttcgtgccacatgaccggaagctcaaaatggttctccagcctcgaccccgtgattggtaaggaatacatcacattcgaggataagtgaagaggtaaggttgtttctcgtggcaccattcgggtgaacgagagctttattctcaaggatgttgctttggtctcgaatctgcatttcaatctactttcagtttcgcaactccttgaggatgactatgaagtgcgctttaaaaagggcttgtctcgagttttggatgcccgtggggatcttatttgccatatttccccttttgatcgagttttcagtgctgatttttcacattcttctggcccttctcgatgtttgttggtaggatcttcctcttccctttggaagtggcataggaggctaggtcacttgagctttgatcttttgtgtcgtttgagctcacttgacctcatctaaggattgactaaattaaaatttgagaaagatcttgtctgtcacccttgtcgtcgtggcaaaatgattgccgcttcccattccccggtcactaaggtgatgacctcgcatcctggcgaattgcttcatatggacactgttggtccagccagggtttgctcttttagagggaagtggtatgtgcttgtggttgtcgatgacttctctcgctactcttgggtgttctttatgacggcgaaggatgaggcttttactcatgctcgagatttgattcttcggttgtaaaatgagtttcctaaaaatgccatgagagctatacgcagtgacaatggctcaaaattcaaaaacactcaatttgcaaccttttgtgcttctttcggacttgagcatcagtttcctctccgtatgtgccccagcaaaatggtattgttgaacgcaaaaatcggacccttgttgagatggccaggacgatgcttgatgagcataggactccaaggcgtttttgggtcgaagcgatcaacactgcttgccatgtgtccaatcacatctttctttgggctctgaacaaaacttcttatgggctgcgatttggacggccacccaaggtcagtcatttcagggtatttggctgcagatgctttgtgctaagatgtcatgggcatcatagggagcgagaggcaacagccaggctgggataaggctagagaataagattgagatgagctaggataaggctag

SEQ ID NO: 5578 - DNA, 2827 bp, Zea Mays
aaaaaactcggcaggccgcacgcgctaatcgccgcgcgctgaggtcccggcgtcccgcgccgcgtccaccgtgctgggaacccgcttgcccctccacgtgcggtcgtgccgatcgtctccatattcgctgcttcctcggcggccatgctccactcctccaccccgtccccaagccaaaggcaccggcgtccctcggctcctgcctccggcctgtctaccgctacctgtcgcccgcggagaaccccaggtccgcgtcaccgccgcgtaagatgcacacgatgaaaaaaaggccagggaggacaccagtgacacacacgctgcatcctcgcgcgcccctgtgcggcttcccgtgccacagagcgtgccggtaagcgcgcccttgcagatggactggacgacgcccaacagcggctcgaggaaatgccagcaagaatgttatttttgattcaagggagcatgatgcaagcttgctgagggtcattgcttctgaatacgaagttttacattcataatattgattgactgttgctcaagcaaatgattgtgttcctgttacctggatgtcctttcgtggctatattctatacaatttattaatcaacttaactcattgaatgcatagttgtatatacaatacaaccaaccgtacttttctttgaaggtcgtaaacttattttggtgttgcagattatctgaaacatatgggattgtccatgtgaattaagtgttataatgttttcacaaaggcattccacgagttgcaatattactggctccaaaattcgacttcagaattcttgcttaccatttactctctccatcccaaataatatttgttttagctcttgatttatatgtctatattcaactagatgataatgaatgtagacacatatatagaacacatacaccaagtattgtatgaactcattaaaaggttaaaacgaattttattttggaatagagggagtatttattcaaaatcaccagtcttcatccgacgacgacaaaatacctaaggctgtctccagcagttatcctattccatcccctatcttatcccctattttaaattttactctgcaaacaatataatctacagtacaaatcccttattttacacgatctggtgcagacagcctaagaggctccacaatgtacgtaatgggaggcaagctcaggaaccaggaagctggatggtacttgtccagtctccttcctctcctatgcctgccttggcctcccccgctcctagctgtttgaacaaataaatgtccatgtgctaactactgcagacttttttgtaggctaacaacttctgttggtaagtttatgatatctcaatatttttgttccgaaaatcgcatctaaaatgaaggaatcttattttattgcacaattcctaatttctctaaattatagatgctatgaagttttagctaatccataagagatacattcggctactcctacatctgatatattgacattgttacaagttctacaagaagggaacagcttggtgattaagcactttcttctagaacttcacacaacatgtgcggatgtgctaatagcttggccgtttgtcataattaagacctcattggtactgtccattgattgattccttatttttagcttaccataaccagatgctaatgcaaatttcactaacacttcgtgttttttcttctaatcttgtatagtgcgaaaatcagattgcttttttttgtgatacttcccatcactacattgttattttgtgcacgtattggaagcaattctaggctatgacccttgagatgtagagtcagatctcatggcttaacaatatataccagatgatcatcacaaccagttcttgaccttagacagaataaggcacaatggtgtgaattctcagtaaggatttcttttattttttctctcgttctatccaaaaaaggtgtccggtgacaatttgagattatcgtctactttgccacaaaatcttaatgctgttgtctttttttacctaggcagctgaagccgtcactgatgtgttgaccttgtcttgtgaatatttttatagtagtaatgtaggtttttcctgagatggactagaatatactattctttggcttgagctgcctgcttaccatgatgtctctttccagagttcttaagatcaacccatttttgtttttgaattttcacattcacattccacttctactataagacaataacactttgctgcaggtgaagctacaaccacaagaattagcactgtaacttttcgtccactctgagcagtgtgttcatatgtaacacaatagtctacatttatttgaagttttttctcaagaacaagcaggtgagctgcatatatttgtactaagcatattggaaacattgtagttgtatgtttaaatttcaaaaaaaagttgtttgctcagttctccctttggtctattaaattcaatagctaaacgttattcttcttttgtgttgctttaagaggacagtaggcaaatttctataatataagcaaggactaactgtaattatcatcaggtgcatggttgagatttccatgcgtcactctccctattctatattatagatttagagcgatgcatgcatgattagttgtatgctgtgcaatccatttacttttggcacttttctgcttatcagtcgtcaaccattacagatacgactttaaaaattaatgacaagaacaaattgaccaatagaaaatactgtacatctgtacctacactcctacaggttctccgatgggagagcccaagctggtgcggcaacgccgtgcctatggttt

SEQ ID NO: 5579 - DNA, 2912 bp, Zea Mays
ctttgtgctgaccataataagctactcccaggatggagtcactttgcgcaatttacaatagctctagttaataaagaccctaagaaatctaagtatttggtttactgaaagtagtgttttatatacactgcatcggttttggaaggaagagcatgattgggggtggaaaaagtttatggaactgtcagaattacacgatggctttattgcacaggatgctcttaccatcaaagccaaagttcaagtcattagaagatagaccgtccatttcgttgccttgatggccagtaccgaagggaactaattagggtgtatctatcaaatgtggaacaaatttatcggcgttttattgatgaaaaaagaaggacgttcagcaggctgattgaggataaactcgggtggtccaggttagataaacttatgaatgtttcagtggattctggctagccatttttcatctttgattttatctgaacagatacttgaactcgctatcaactttcagtagacctactaaggagcgatctccgtccaattatcagccaatgaatttatgcactgtaccatgaacagagatagtcaagaaattagactatttcaagttcagcgagagggactatatggcactggaggcgtctttcttagagattgcgatctcaacatatatttggatgcctaaatgtttagttagaaatttacaccatttctaataattctacagtgattgaaaatacaatctacctcaaaactaataacatcgttagagggaggaagagcagcttgtgtattggtggagagaggatccttggttgaaagtgatgtttctccatatctttataaggttaaggaagagcagttggggttcctgtgaaacgtggattgtatgaggtctataattttttttatgctctatcattacttgaatgaatcatgtatcactggcaagcaacttcagctcatactttgtaggaattctaattcacattgcattctatttaattgtttgttttatgttccgttcacacgaccatgatttttgtttgcacaaatcagtatatatatcctcgttgaattaaaagtctagctttgtgtcataagcatattgtatatttccccttttggctattgcaaatagcaagtatggtttgttgtttaaatgttagtctattctgtttcaagaagaaaaaagaatgtgccatcgctggggatgggtacgatgatcaagatcgtcgaacgacgaagggcaccaaggtgttcgttggcgggctgccaatgtcggccacggaaagcatgctcctctctcatctccacaccatgcagtagctgctgcccatagcatgtaatgcaatggaataagttatcaaggcaactaacatcgaacatagttcttgggctccttggcagcgtcgaggcacggtatctgcccacgctgttgtcggggcctcccgcgggtacccatgctcgacctacttcattgaagatgtggtatggacaaatatacatgccactttctagatgaagtgaagagaccaaatgtggatgttaatcaatctctagatgaaggaatgaaaggaaggagctaagttattgcactagatgtacggggtctagaaaaggtgtcactttgatgccatttattagtgttgttgtacaaaaaaaaaggttgaattgatgaattcatgggctaccttataatataaaactatattgaattcatgtgatcttgtgattttatgtaagactatcctataaataaaaactatgatttcactgtcttctctatgttgtagttagcagtgcaggcatagaacctatgaaacatggatacttggttacaaagttcaactttcagtcaagttttgttcaacaagggtctaatagagacttccatgaaactgatcgatttgtcgttggtgtcatatggcaagattgaatgaagggctgtcattatttgatgcaatactgattgttccaatgtttcaaattacttggaccttcttctctatttgtataggatttgtttactttcaagaatatcaagtatttgatacactcaggataattatgtttgtgttaggcatgacatttgtctttgttgggatctccttgctagcacccgatgacagtaaagctgatacgaaagatggttcaagcaccgccgaggactccataattgacatagacagaaatggaaagatgctgatggaggagacagacatagatgatagcatctcctttgttacttctgtaaaagtaaatgcaaaacgtgtactttcaaaggcaaagtccgcatgctccatgtcccttggccttggggagagcaccataagcgcttcatcgatgcttgccatgcctatggtctcgtcaagaacaaccggcttcagaggaatcgaaaacgaccgtccaaattgctgcctgtatggcgcctcttctgttgcgtccacttctggctggtgaatgtgagatggatgaagtatttgatatggatggtgacgattctgcgcagcttcttgctacagcaaacgccgcaaacagtgctcaaggaattgtcgcaactctcttggaggaatatgagggcatttttcatgatgaacacctcagatgttccttgtcacctgaatctcaaattgaagatagtggtactgaagcatcaactgatgatggtaatttggaagccaagggcaatggatttcatgatgcagaaaatgatgtagatcaagaattggatgatgacaatggtgtggagcgtatacttagtgggaaattgagtgagagtagtggatatgctggcagtgacctctatgactacaaggtttggttttgtgtgcttcattcttttgatttttctgatgcttggtgtttggtggttttattaatactactgtgagtctttaatgtgagtttggtactgg

SEQ ID NO: 5580 - DNA, 1045 bp, Zea Mays
atggaccacacctgtcagaaaagatagccggaagccggaaaaaccctcgtctcccgtctcggagcggcggagtacgcacctatcagtcccaagttcccgccacacacctctccattcccctcccgaagtcccgatcctgtcctcaaatcccattgctctatcttctctagcggcgagtcgaggcggggaagacgagctagcggcgaggatgttgtgggtagataagtaccggccgaaaaccctagacaaggtcaccgtgcacgaccaggttgctcagaacctcaggaagtttgtgtcggagcaggattgcccgcacctgttgttctatgggccgtcggggtccgggaagaaaaccctaatcctcgcgctcatcaagcagatgttcggcgctggcgcggagaaggttaagctggagaacaagacatggaaaatcgatactggaacaaggacatttgagatagaattggcgatgttgtcaagtgctcaccatgtggagatgacccccagtgatgctggctttcaggacaggtatgttgttcaggaggtcatcaaagagatggcgaagaacaggccaattgatgccaaaggcaagagagcatttaaagtccttgtgttaaatgaggtcgacaagctctcacgagaagcccagcattccctccgcaggactatggaaaagtatagctcatcatgtagactgatcctatgctgtaacagctcctcaaaagtgacagaagctgtaagatcccgttgcttaaatgtgcgagtaaatgcacccagcgaagatcagattgtccaagttctagagttcattgggaagaaagaaaatctgcatcttccagctggatttgctgctcgtatcgccgcacaatcaaaccgtaatcttaggcgggcaattctgttttttgagacttgcaaagtgcaacaatatccatttacatcaaatcaagtggcgcctcctcttgactgggagcaatatgtgtctgaaatagcaactgatatacttacagaacaaagccctaaaaggttttcacatgcctatgtttgc

SEQ ID NO: 5581 - DNA, 2539 bp, Zea Mays
atggaccacacctgtcagaaaagatagccggaagccggaaaaaccctcgtctcccgtctcggagcggcggagtacgcacctatcagtcccaagttcccgccacacacctctccattcccctcccgaagtcccgatcctgtcctcaaatcccattgctctatcttctctagcggcgagtcgaggcggggaagacgagctagcggcgaggatgttgtgggtagataagtaccggccgaaaaccctagacaaggtcaccgtgcacgaccaggttgctcagaacctcaggaagtttgtgtcggagcaggattgcccgcacctgttgttctatgggccgtcggggtccgggaagaaaaccctaatcctcgcgctcatcaagcagatgttcggcgctggcgcggagaaggttaagctggagaacaagacatggaaaatcgatactggaacaaggacatttgagatagaattggcgatgttgtcaagtgctcaccatgtggagatgacccccagtgatgctggctttcaggacaggtatgttgttcaggaggtcatcaaagagatggcgaagaacaggccaattgatgccaaaggcaagagagcatttaaagtccttgtgttaaatgaggtcgacaagctctcacgagaagcccagcattccctccgcaggactatggaaaagtatagctcatcatgtagactgatcctatgctgtaacagctcctcaaaagtgacagaagctgtaagatcccgttgcttaaatgtgcgagtaaatgcacccagcgaagatcagattgtccaagttctagagttcattgggaagaaagaaaatctgcatcttccagctggatttgctgctcgtatcgccgcacaatcaaaccgtaatcttaggcgggcaattctgttttttgagacttgcaaagtgcaacaatatccatttacatcaaatcaagtggcgcctcctcttgactgggagcaatatgtgtctgaaatagcaactgatatacttacagaacaaagccctaaaaggctatttgctgtacgccagaaattctatgaattactcgtcaattgtatcccacccgaaagtattttgaagaagttgttggcagaattactgaggaagttagatgcggatctgaaacatgagatctgtcactgggccgcacattatgaacacaagatgcgcctcggatcaaaggctatttttcatctagaagctttcgtggccaagttcatgagcgtttacaaggagttcctggtggcgacatttggttgagcaaaacctcaaggcattgggttgccacccgcgaagcgaagagaggatggcagcggctatcgcactgtatcaggcagtgtcttgcctgtgtagttttgtactgaagttgtgaacgattagcttcattgtgtctgtttaaaccaccgtcaactcgggtcgcccttctgtgagttcatcgcgtccgcctgcacgtggtcgttgatgacgacacgatcagaagttgtgaacgactagtagtttttgcttggttaagaaaaaacatcctgaaaagtaaaaaagtaacagtctgtgaacggaaccgtaacaagaaaaacgaaacaagcagatgccaatcatgctattgcaatttgcaagagtcgtcccagattaaaattcaaatagctgtatccattttacactaccacagtttgattacaaaggttagtgcttgcaggatcgcgtctcagacccttggcctcaccctgcgaccgctggtgtcgccgccgtcagagagctgcgcccatacgctctggcttttcacgccgctgctacattgttcctcacatccggcaactgtccgcagtatctctgactgcagggatgggcagttgtctttgagatagtcgaacccctcggtccggatcacagctgcagatacataagggcatctggaatgttatacagttcaaacttatttgggcaccaccaagcaacaaacgagcgatagatcaaggtacaaaatataccgaaaaaagctaaaatatggtacacagtacaatttactgaaggtaaggtaggagtgtacggtatgataatgttccaaccgtaagcaataaatgtctgaaatttacaaagttatcaccactcgtagtccagtaaccattaagtttataaccatgaatattactattttggcacaataacctttatcaagtttcacagctatgataagaataagaaagcagtcatgtcttgcaatttactatgcaatgacacactgcagacatttcaccagcatgcaagcccttgccataatgccatgccaaccctaggtaaatcattcatcaaactgggaatagcctaatgtctaagcaagtagtcttcttggcaacttagccattgagaaaaccaaaacatactaaattgtttagagtataataagtatgcctaagatgtcaaccaagaggatatctacatatgacatgtgaaggttaaacatattttcatgttgtaagtcttattacccgaaaggttttcagcagcaaattttaggcaaacagatttaag

SEQ ID NO: 5582 - DNA, 2522 bp, Zea Mays
atggaccacacctgtcagaaaagatagccggaagccggaaaaaccctcgtctcccgtctcggagcggcggagtacgcacctatcagtcccaagttcccgccacacacctctccattcccctcccgaagtcccgatcctgtcctcaaatcccattgctctatcttctctagcggcgagtcgaggcggggaagacgagctagcggcgaggatgttgtgggtagataagtaccggccgaaaaccctagacaaggtcaccgtgcacgaccaggttgctcagaacctcaggaagtttgtgtcggagcaggattgcccgcacctgttgttctatgggccgtcggggtccgggaagaaaaccctaatcctcgcgctcatcaagcagatgttcggcgctggcgcggagaaggttaagctggagaacaagacatggaaaatcgatactggaacaaggacatttgagatagaattggcgatgttgtcaagtgctcaccatgtggagatgacccccagtgatgctggctttcaggacaggtatgttgttcaggaggtcatcaaagagatggcgaagaacaggccaattgatgccaaaggcaagagagcatttaaaggtcgacaagctctcacgagaagcccagcattccctccgcaggactatggaaaagtatagctcatcatgtagactgatcctatgctgtaacagctcctcaaaagtgacagaagctgtaagatcccgttgcttaaatgtgcgagtaaatgcacccagcgaagatcagattgtccaagttctagagttcattgggaagaaagaaaatctgcatcttccagctggatttgctgctcgtatcgccgcacaatcaaaccgtaatcttaggcgggcaattctgttttttgagacttgcaaagtgcaacaatatccatttacatcaaatcaagtggcgcctcctcttgactgggagcaatatgtgtctgaaatagcaactgatatacttacagaacaaagccctaaaaggctatttgctgtacgccagaaattctatgaattactcgtcaattgtatcccacccgaaagtattttgaagaagttgttggcagaattactgaggaagttagatgcggatctgaaacatgagatctgtcactgggccgcacattatgaacacaagatgcgcctcggatcaaaggctatttttcatctagaagctttcgtggccaagttcatgagcgtttacaaggagttcctggtggcgacatttggttgagcaaaacctcaaggcattgggttgccacccgcgaagcgaagagaggatggcagcggctatcgcactgtatcaggcagtgtcttgcctgtgtagttttgtactgaagttgtgaacgattagcttcattgtgtctgtttaaaccaccgtcaactcgggtcgcccttctgtgagttcatcgcgtccgcctgcacgtggtcgttgatgacgacacgatcagaagttgtgaacgactagtagtttttgcttggttaagaaaaaacatcctgaaaagtaaaaaagtaacagtctgtgaacggaaccgtaacaagaaaaacgaaacaagcagatgccaatcatgctattgcaatttgcaagagtcgtcccagattaaaattcaaatagctgtatccattttacactaccacagtttgattacaaaggttagtgcttgcaggatcgcgtctcagacccttggcctcaccctgcgaccgctggtgtcgccgccgtcagagagctgcgcccatacgctctggcttttcacgccgctgctacattgttcctcacatccggcaactgtccgcagtatctctgactgcagggatgggcagttgtctttgagatagtcgaacccctcggtccggatcacagctgcagatacataagggcatctggaatgttatacagttcaaacttatttgggcaccaccaagcaacaaacgagcgatagatcaaggtacaaaatataccgaaaaaagctaaaatatggtacacagtacaatttactgaaggtaaggtaggagtgtacggtatgataatgttccaaccgtaagcaataaatgtctgaaatttacaaagttatcaccactcgtagtccagtaaccattaagtttataaccatgaatattactattttggcacaataacctttatcaagtttcacagctatgataagaataagaaagcagtcatgtcttgcaatttactatgcaatgacacactgcagacatttcaccagcatgcaagcccttgccataatgccatgccaaccctaggtaaatcattcatcaaactgggaatagcctaatgtctaagcaagtagtcttcttggcaacttagccattgagaaaaccaaaacatactaaattgtttagagtataataagtatgcctaagatgtcaaccaagaggatatctacatatgacatgtgaaggttaaacatattttcatgttgtaagtcttattacccgaaaggttttcagcagcaaattttaggcaaacagatttaag

SEQ ID NO: 5583 - DNA, 961 bp, Zea Mays
atcagcccgcctatttctgtgatgttaggccggatgacacgccgtgggatggaggcacgttcaagctgactctgcaatgtacagaagattaccccaacaaacctccaactgttcggtttgtttcgaggatgtttcatccaaacatctatgcggatggaagcatctgtttggacatcctacaaaaccagtggagccctatatatgatgttgcggcaatattgacctctattcagtccctgctgtgtgacccaaacccaaattctcctgctaactctgaagcagctagaatgttcagcgagaacaagcgtgagtacaaccgcaaagttcgtgaggttgtggagcagagctggacagccgactgaaactttatccgctccgccaggcggtgtaaataaagcatctgtctttcctacttggccggtctgttttaccgttagaaatcctcagctatcgttgtgttcttgtggttcagtcccttgttgtagtgatgcctgcgggttttcctaatgtagtgctgaacggtttcataaactcggatattggtgcatatgtaacagatatagctaagtcaagttgttgcttggtttgcataagcttcgtgtcgtgtcgtgtgcttctttctcgctgcacgaacggcctttcacgaggcacctctgacagatctccatgaccgtcctcagcgactcgtccgagcaccctttgctcaccgcggggtctgcgaagctcctcctcctcacccggtcctcgtcggcaatcgcccatgcaagctgcagtcgcatcgcatccaaggaggcccattcagttgaccgacccagtgcagtgccactagctaagttctacattgtcagagagtgagtgagagagagagatggtaccaattctttcagtatctccacttcatacatggacgtgatggtcttcccggacacaacctcaagcaggatcaccccgaagtcgaaga

SEQ ID NO: 5584 - DNA, 970 bp, Zea Mays
acccatccgatttagtttggctcgatctgtaattgttcaatagctggcgtctgcattttttgggcacgttcaagctgactctgcaatgtacagaagattaccccaacaaacctccaactgttcggtttgtttcgaggatgtttcatccaaacatctatgcggatggaagcatctgtttggacatcctacaaaaccagtggagccctatatatgatgttgcggcaatattgacctctattcagtccctgctgtgtgacccaaacccaaattctcctgctaactctgaagcagctagaatgttcagcgagaacaagcgtgagtacaaccgcaaagttcgtgaggttgtggagcagagctggacagccgactgaaactttatccgctccgccaggcggtgtaaataaagcatctgtctttcctacttggccggtctgttttaccgttagaaatcctcagctatcgttgtgttcttgtggttcagtcccttgttgtagtgatgcctgcgggttttcctaatgtagtgctgaacggtttcataaactcggatattggtgcatatgtaacagatatagctaagtcaagttgttgcttggtttgcataagcttcgtgtcgtgtcgtgtgcttctttctcgctgcacgaacggcctttcacgaggcacctctgacagatctccatgaccgtcctcagcgactcgtccgagcaccctttgctcaccgcggggtctgcgaagctcctcctcctcacccggtcctcgtcggcaatcgcccatgcaagctgcagtcgcatcgcatccaaggaggcccattcagttgaccgacccagtgcagtgccactagctaagttctacattgtcagagagtgagtgagagagagagatggtaccaattctttcagtatctccacttcatacatggacgtgatggtcttcccggacacaacctcaagcaggatcaccccgaagtcgaaga

SEQ ID NO: 5585 - DNA, 2273 bp, Zea Mays
atcgtttctgctgggcctatatgggctggcccatctcctgctgtctgctgccgaagtcgccaactaacatagatcgcaccatttcccgttcacctccccttccgttacatcccaccatttgctgttcaccttccctcccgtttgcctcctctcgctgtctcgtagcttctttcctccggcgacggctgggcgagcggccgccagtcggtcccttcgtcggcgacgagcatccacctgcgccggcgctccatcttccgctccctcccttactcgcgctcggcacacaggcgacggcggcggcgctcaggatcgggctatcaccgacggggtccggcttctccgcccgcctctcgccactcgtcctcgcctccggtcctccgcacaccggccggtgatcctgcctctgtaggttttttgtactatactttttagtggttctggccttcttgacacaatggtgaagctgacaatgatagctcgtgtcactgatggccttccactggcagaagggttggatgatgggcgagatctgaaggattctgatttctataagcagcaagctaaacttcttttcaagaacttgtcaaaagggcatcatgaagcttcacggatgtcaattgagacagggccctactatttccactacattattgagggcagagtatgttatctgactatgtgtgaccgctcttatccgaagaaacttgcattccagtacctagaagatctgaaaaatgaatttgagagggtcaatggcaaccaaattgaaactgctgcaaggccatatgcttttatcaagtttgatacattcatccagaagactaggaaactgtatttggatacaagaactcaaagaaacctcgcaaaactgaatgatgaactctatgaggtgcatcaaattatgactcgcaatgttcaagaagttcttggtgttggtgaaaagctagaccaggtcagtgaaatgtcaagcaggttgacttctgatacaagaatatacgcagataaggctaaggacctcaaccggcaggcgttgattcggaagtatgctcctgtcgccattgtcattggggtagtattgatgctgttttggctcaagaacaagatatggtgattgtacagtacgaaggatactgggccctgttacaacaccggagaagaacagatggagataaaaaccaggtctattctggaacaagaagatgctttggtgacttgtatcccgtatctgcccattcaagcgattacttaagctgcccttttgctcctccctataagctagtatcaaagtgaattcgttggagtgcagacctgataagagcatctccggaagtctttcaaaatttcactctaaattctcattttgagagtcatttgcttaataattgttattatgtttttttcactctccaacagcctttaatatcctgtttgcactagggagccattctctttctatattggactaccgatgaatttggaggagatggatatattcggatagctgtttttaaaaaaagctgttgggggaatcttagcaattaggaagggtatagtctctagagaaactcatattttgtgcatccgttgaactcaatgtaatataatataagagctctagagttctacatcggggttgtggaactcaatgtaatacaagagctgtggagttgactttacatcggggttgtaatttttagggtggaactcaatataaagattcagggtggtctgatgagttgacgaaactcgagcatgctttttatagctgcctaatatgtattgatttaaggtcagagagagtcgtgtatactacagctacgagcagaaccctccgtggcaactggcacccaagtcctgtcctgtccagcaaaaaggttgggtgcgccgtgcgcgtctccacggggtcggagtcggaggtggatgggcagtgggcaaagcctctcgcgctggcgaccgtgcagatacaggctcagtgctcaactgtctcacaggcaaggatggcaatcgggccttattattcgcggataccttattatatccataaccatacccacggataccaaattccaccatacccgcatccaatggataattatccgcggttatttacccatacccatacccatacctattgctatccctactcacaggctcacagccgcgcacaggaccgtgtcggtgtcacggtggagagacgtctcggcgagtcggtggtgccacaatcgcggacacctggcgacgttgctgacagtcttttactacaccctttctaa

SEQ ID NO: 5586 - DNA, 2134 bp, Zea Mays
ctcctgctgtctgctgccgaagtcgccaactaacatagatcgcaccatttcccgttcacctccccttccgttacatcccaccatttgctgttcaccttccctcccgtttgcctcctctcgctgtctcgtagcttctttcctccggcgacggctgggcgagcggccgccagtcggtcccttcgtcggcgacgagcatccacctgcgccggcgctccatcttccgctccctcccttactcgcgctcggcacacaggcgacggcggcggcgctcaggatcgggctatcaccgacggggtccggcttctccgcccgcctctcgccactcgtcctcgcctccggtcctccgcacaccggccggtgatcctgcaagggttggatgatgggcgagatctgaaggattctgatttctataagcagcaagctaaacttcttttcaagaacttgtcaaaagggcatcatgaagcttcacggatgtcaattgagacagggccctactatttccactacattattgagggcagagtatgttatctgactatgtgtgaccgctcttatccgaagaaacttgcattccagtacctagaagatctgaaaaatgaatttgagagggtcaatggcaaccaaattgaaactgctgcaaggccatatgcttttatcaagtttgatacattcatccagaagactaggaaactgtatttggatacaagaactcaaagaaacctcgcaaaactgaatgatgaactctatgaggtgcatcaaattatgactcgcaatgttcaagaagttcttggtgttggtgaaaagctagaccaggtcagtgaaatgtcaagcaggttgacttctgatacaagaatatacgcagataaggctaaggacctcaaccggcaggcgttgattcggaagtatgctcctgtcgccattgtcattggggtagtattgatgctgttttggctcaagaacaagatatggtgattgtacagtacgaaggatactgggccctgttacaacaccggagaagaacagatggagataaaaaccaggtctattctggaacaagaagatgctttggtgacttgtatcccgtatctgcccattcaagcgattacttaagctgcccttttgctcctccctataagctagtatcaaagtgaattcgttggagtgcagacctgataagagcatctccggaagtctttcaaaatttcactctaaattctcattttgagagtcatttgcttaataattgttattatgtttttttcactctccaacagcctttaatatcctgtttgcactagggagccattctctttctatattggactaccgatgaatttggaggagatggatatattcggatagctgtttttaaaaaaagctgttgggggaatcttagcaattaggaagggtatagtctctagagaaactcatattttgtgcatccgttgaactcaatgtaatataatataagagctctagagttctacatcggggttgtggaactcaatgtaatacaagagctgtggagttgactttacatcggggttgtaatttttagggtggaactcaatataaagattcagggtggtctgatgagttgacgaaactcgagcatgctttttatagctgcctaatatgtattgatttaaggtcagagagagtcgtgtatactacagctacgagcagaaccctccgtggcaactggcacccaagtcctgtcctgtccagcaaaaaggttgggtgcgccgtgcgcgtctccacggggtcggagtcggaggtggatgggcagtgggcaaagcctctcgcgctggcgaccgtgcagatacaggctcagtgctcaactgtctcacaggcaaggatggcaatcgggccttattattcgcggataccttattatatccataaccatacccacggataccaaattccaccatacccgcatccaatggataattatccgcggttatttacccatacccatacccatacctattgctatccctactcacaggctcacagccgcgcacaggaccgtgtcggtgtcacggtggagagacgtctcggcgagtcggtggtgccacaatcgcggacacctggcgacgttgctgacagtcttttactacaccctttctaa

SEQ ID NO: 5587 - DNA, 1538 bp, Zea Mays
gagcaagttgagcccaaccctagcagcaccccgcgctgaacccatcaccgtcaggccatcaccatgcgaggcatcggcgccgccgccgccgccaggcggcacactccattcctctcctcccgcgctctcgccttctcctcctcttctagaagcgggggcggtgatggcggtttcgggcacgggcgcggacgcggcctgccgaccgccgggcagccgcgcgctcccgggaggcccatttccaacgacgatgacgcggatccccactgcccccaccgccaccccctgaggacgcttcaaagcagccgaccttcaccaagggcttcgacaacgctcctcagcgctcctatccggagccgccgagcctcgatgcttcctcctccgcgccgccgctgccccgcccgctcccgatctccggcgccggccgcggggtcccctggacgcagcagccttcgccggataagcctccggaagagaacaggttcatccggcgccgcgaggcggtgaaacagtctgccgccgagccgccgaaacaggctcccggggcgcagcaaccgaagttgtcgccacaagaagctgtgagacgggcggttgaactcctgggcggcgggggccgcagcggcgaagatggcggagggcgtggtggtgggggtcgcctctcccgtggccgtggccgtggcacaggccgcggcaggcgtcccgggcgtggcgaccgctctgatgatgtggaagacgtctggcaagcgagctacttgggggacaaagctgatggcgataggctagagcagcagctcggcgaggacaagatgaagattctggagcaggcgttcatggaggcagcagataatgcgttgccacatccaatggaagatgcttacctcgaggcttgtcacacaaacaacatgatcgagtttgagccggagtaccatgtgaattttggtaatcctgatattgatgagaaaccaccaatgtcgttggaggagatgcttcagaaggtgaagccatttgtagttgcatatgagggcatccagaaccaggaagaatgggaggaagctgtgaaagatgtaatggctagagccccccatatgaaagagctcatagatatgtacagtggacctgatgttgtgactgcaaaacaacaagaagaggagttgcaaagagttgcaaacactcttccagaaagcatcccttcttcagtaaagcggtttactgacaaaactctactctctcttaagaacaatcctggctggggttttgacaagaaatgccaattcatggacaagtacgctcgcatagtttcagagcaatacaagtagaaaggcatcttataccctgttgtagtaaccatattatttgtcctccaaggagacaagtacgctttgttttgagagaaggtgagatgcccatatctaatccgtgcaatgtttttttatttatttcactgagatgctagtttgataaataaaattggtgacaaacatgtttctttttttcatcatatgaagcaccaattccttgctcgggcttactgaaaaaaaaca

SEQ ID NO: 5588 - DNA, 2211 bp, Zea Mays
tgtaccgctagtcttcttaacccctggagcgagacggaggcctacggaagagagagagggagggagggaggagagggtattcagaatttcaggagcaaagtgcacagcggtgctgccttgccagacagctacggcgctaggctgtgctgctgccgaggcggggcattcgttcctccccagtacgaggagaggaggaagatttggttggttggaggggagggggagcagaactgaccggtcgtcgaagcggagtagtgtggacagaatccgaggagggaaaaacgacttggatgcggcacgcctcacagaacttcagaattatagaatctttgcctccacatggaatgtcggcggtaaatccccaccaaggggattgaatcttgatgactggctccattcttcacttccagctgatatctatgtgttaggatttcaagaaattgttcctttgaatgctggaaatgttcttggcactgaagataatctcccagcgaaaaaatgggtctcccttgttaggaggacactgaataagaatcctggttcatgctgctatggtggctatcgcacgccatctcctgtcccggatccagttgtagaacaagatgctgattttgagggatcatcgagaaggcacgacagtttatcctatttgcatcgtcggtcattcaaccttagccggagtttaagagttgaagggaaccatatgctgtcacacccaagattggatcgtaggttcagtgtctgtgacccagttagcttgggaggcaggccaagtgattttgatgggaacttcccattcatgggatcaccagatgatcattgtatcgaggaggatacaagcaacggagcacatttttcacccttcccatatggctatggtgtctctgcacctatggaagaaaatggttatcatccaaatacaccgtctaggtactgcttggttgccagcaagcagatggtcggtatatttctcaccatttgggtacgcagcgaaataagaaatgatgtgaggaacctgaaagtttcttgtgtgggtagaggactaatgggttatctcggaaataaggggtcgatatccataagcatgtctttacaccacaccaccttttgttttatctgttgtcatttgacctccggtgagaaggagggagatgaactccggaggaactctgacgtcatggaaattctaaggaagactagatttccacaggtccgtggtgctgctgatgtcaagtcaccagaaacaattcttgaacatgatcgtatcatttggcttggggatttgaattaccggatcgctctttcgtactgctcagctaaagctcttgttgaaatgcatagctggaagcaactgttggagaaagatcagctgtcgtacgttcgcggagagtctcgcttctctgaccacagaccagtgtacagtattttcatggccgaggtcgagagcatccggcacagaaggagaaacgcgggctatttcagctctaggatcgaggtggaggagctcttgccaaacccgtacagtcatccggcgtttacagcttccagtcagatggttgagaataatcacactgcacagaaactaacataaaggacagttgcccgattttgcagctaaccatttgcctgtggacagccatgcacgttgaaccaaggaccagccgtccagcccacacatctgtagctctgtacatccttagcgacacagctttcccttttcccttcttcaccttcgggatgttagcaaaattacacagatttccctctctctctctctctgtctctgtctctttttagggatgttagcaaaattacacagatttcccttctcttccattcaccttcgggagatgtattagcttgagatttctgcggtgtatcagcatgaccatgaaggtgtaaaaatcattgcggatcggtaaaaaggtgaaatgatgctttgaattggaccgatgcttggtcatgatctcccgtgctgagggggacatcgatagattgattgatgtgactttcagaggttttgcaagggtgtaatcatgtgcgcaccccttcttttttttttttgttccttagctttgtccctgtggtgtggtgtagtacctgagaagcaaaatgatgcctgcatttgctgcgctcattgctgtggctggcaggcgtgtgtgtgtgtgttacttttacttgttgatgagatatataattatacatatatag

SEQ ID NO: 5589 - DNA, 2394 bp, Zea Mays
tgtaccgctagtcttcttaacccctggagcgagacggaggcctacggaagagagagagggagggagggaggagagggtattcagaatttcaggagcaaagtgcacagcggtgctgccttgccagacagctacggcgctaggctgtgctgctgccgaggcggggcattcgttcctccccagtacgaggagaggaggaagatttggttggttggaggggagggggagcagaactgaccggtcgtcgaagcggagtagtgtggacagaatccgaggagggaaaaacgacttggatgcggcacgcctcacagaacttcagaattatagaatctttgcctccacatggaatgtcggcggtaaatccccaccaaggggattgaatcttgatgactggctccattcttcacttccagctgatatctatgtgttaggatttcaagaaattgttcctttgaatgctggaaatgttcttggcactgaagataatctcccagcgaaaaaatgggtctcccttgttaggaggacactgaataagaatcctggttcatgctgctatggtggctatcgcacgccatctcctgtcccggatccagttgtagaacaagatgctgattttgagggatcatcgagaaggcacgacagtttatcctatttgcatcgtcggtcattcaaccttagccggagtttaagagttgaagggaaccatatgctgtcacacccaagattggatcgtaggttcagtgtctgtgacccagttagcttgggaggcaggccaagtgattttgatgggaacttcccattcatgggatcaccagatgatcattgtatcgaggaggatacaagcaacggagcacatttttcacccttcccatatggctatggtgtctctgcacctatggaagaaaatggttatcatccaaatacaccgtctaggtactgcttggttgccagcaagcagatggtcggtatatttctcaccatttgggtacgcagcgaaataagaaatgatgtgaggaacctgaaagtttcttgtgtgggtagaggactaatgggttatctcggaaataaggggtcgatatccataagcatgtctttacaccacaccaccttttgttttatctgttgtcatttgacctccggtgagaaggagggagatgaactccggaggaactctgacgtcatggaaattctaaggaagactagatttccacaggtccgtggtgctgctgatgtcaagtcaccagaaacaattcttgaacatgatcgtatcatttggcttggggatttgaattaccggatcgctctttcgtactgctcagctaaagctcttgttgaaatgcatagctggaagcaactgttggagaaagatcagctacggatagaacggagatgtgggcgtgttttccagggatggaaagaaggcaggatttattttcctccaacatataagtactcattcaactcagaccgttattcaggggttcggcccaaagaaaagcggagaacgcccgcttggtgcgatcgcattctgtggcatggcaacggtctcatgcagctgtcgtacgttcgcggagagtctcgcttctctgaccacagaccagtgtacagtattttcatggccgaggtcgagagcatccggcacagaaggagaaacgcgggctatttcagctctaggatcgaggtggaggagctcttgccaaacccgtacagtcatccggcgtttacagcttccagtcagatggttgagaataatcacactgcacagaaactaacataaaggacagttgcccgattttgcagctaaccatttgcctgtggacagccatgcacgttgaaccaaggaccagccgtccagcccacacatctgtagctctgtacatccttagcgacacagctttcccttttcccttcttcaccttcgggatgttagcaaaattacacagatttccctctctctctctctctgtctctgtctctttttagggatgttagcaaaattacacagatttcccttctcttccattcaccttcgggagatgtattagcttgagatttctgcggtgtatcagcatgaccatgaaggtgtaaaaatcattgcggatcggtaaaaaggtgaaatgatgctttgaattggaccgatgcttggtcatgatctcccgtgctgagggggacatcgatagattgattgatgtgactttcagaggttttgcaagggtgtaatcatgtgcgcaccccttcttttttttttttgttccttagctttgtccctgtggtgtggtgtagtacctgagaagcaaaatgatgcctgcatttgctgcgctcattgctgtggctggcaggcgtgtgtgtgtgtgttacttttacttgttgatgagatatataattatacatatatag

SEQ ID NO: 5590 - DNA, 2389 bp, Zea Mays
tgtaccgctagtcttcttaacccctggagcgagacggaggcctacggaagagagagagggagggagggaggagagggtattcagaatttcaggagcaaagtgcacagcggtgctgccttgccagacagctacggcgctaggctgtgctgctgccgaggcggggcattcgttcctccccagtacgaggagaggaggaagatttggttggttggaggggagggggagcagaactgaccggtcgtcgaagcggagtagtgtggacagaatccgaggagggaaaaacgacttggatgcggcacgcctcacagaacttcagaattatagaatctttgcctccacatggaatgtcggcggtaaatccccaccaaggggattgaatcttgatgactggctccattcttcacttccagctgatatctatgtgttaggatttcaagaaattgttcctttgaatgctggaaatgttcttggcactgaagataatctcccagcgaaaaaatgggtctcccttgttaggaggacactgaataagaatcctggttcatgctgctatggtggctatcgcacgccatctcctgtcccggatccagttgtagaacaagatgctgattttgagggatcatcgagaaggcacgacagtttatcctatttgcatcgtcggtcattcaaccttagccggagtttaagagttgaagggaaccatatgctgtcacacccaagattggatcgtaggttcagtgtctgtgacccagttagcttgggaggcaggccaagtgattttgatgggaacttcccattcatgggatcaccagatgatcattgtatcgaggaggatacaagcaacggagcacatttttcacccttcccatatggctatggtgtctctgcacctatggaagaaaatggttatcatccaaatacaccgtctaggtactgcttggttgccagcaagcagatggtcggtatatttctcaccatttgggtacgcagcgaaataagaaatgatgtgaggaacctgaaagtttcttgtgtgggtagaggactaatgggttatctcggaaataaggggtcgatatccataagcatgtctttacaccacaccaccttttgttttatctgttgtcatttgacctccggtgagaaggagggagatgaactccggaggaactctgacgtcatggaaattctaaggaagactagatttccacaggtccgtggtgctgctgatgtcaagtcaccagaaacaattcttgaacatgatcgtatcatttggcttggggatttgaattaccggatcgctctttcgtactgctcagctaaagctcttgttgaaatgcatagctggaagcaactgttggagaaagatcagctacggatagaacggagatgtgggcgtgttttccagggatggaaagaaggcaggatttattttcctccaacatataagtactcattcaactcagaccgttattcaggggttcggcccaaagaaaagcggagaacgcccgcttggtgcgatcgcattctgtggcatggcaacggtctcatgcagctgtcgtacgttcgcggagagtctcgcttctctgaccacagaccagtgtacagtattttcatggccgaggtcgagagcatccggcacagaaggagaaacgcgggctatttcagctctaggatcgaggtggaggagctcttgccaaacccgtacagtcatccggcgtttacagcttccagtcagatggttgagaataatcacactgcacagaaactaacataaagttgcccgattttgcagctaaccatttgcctgtggacagccatgcacgttgaaccaaggaccagccgtccagcccacacatctgtagctctgtacatccttagcgacacagctttcccttttcccttcttcaccttcgggatgttagcaaaattacacagatttccctctctctctctctctgtctctgtctctttttagggatgttagcaaaattacacagatttcccttctcttccattcaccttcgggagatgtattagcttgagatttctgcggtgtatcagcatgaccatgaaggtgtaaaaatcattgcggatcggtaaaaaggtgaaatgatgctttgaattggaccgatgcttggtcatgatctcccgtgctgagggggacatcgatagattgattgatgtgactttcagaggttttgcaagggtgtaatcatgtgcgcaccccttcttttttttttttgttccttagctttgtccctgtggtgtggtgtagtacctgagaagcaaaatgatgcctgcatttgctgcgctcattgctgtggctggcaggcgtgtgtgtgtgtgttacttttacttgttgatgagatatataattatacatatatag

SEQ ID NO: 5591 - DNA, 1423 bp, Zea Mays
aagcaaaagaaaaggcaaaagcaacgcgtcggatgggagggaggctcagagatggagcaagaagcgcctgcccgaccggggtccgttcccgcggtcacgctccgtcgtttcgagctcggcgacgtcgacgcgatgctggagtgggcgtcggaccccgaggtgacggcgttcatggcgtgggacgcctgcacgtcccgggacgccctcctggcgttcctgcgcgacgcggtgctgccgcacccgtggttccgcgccgtctgcctcggcggcggcggacactgccgccccgtgggcgcggtgtccgtgacgcccaccgacgacgcctgccgcgccgagctccgcgtcgtgctggcgcgcgcgcaccgggggaagggtgtggccacagcggcggcgaggccgtgctgcggagctaccgcgtggtgaaggggaggctcagggacgtggctgtctacagcttcatctctaccgaccctgtcgttgagtgatcaggattcgaaaatgacccaaagtcgtgcacgaaaaccagatggcattggcattggcattgctgcttgcagacagcatctcagctatgggttacagttacagacttattataactctccttccgctattttatctccaagaagacgcacttcttggaattattaactgagcccgtttttctcggatctccgttgatctcgacaataattaaccaaagaaaaacaagggcccaagaccaagaggatacaacagggaggggcacacggacgacacggagggaggtcatgcttcccatcccctgaggacggtggcgcgcgcgacgcggttgacgccaagcgtgaaggcgcccatgcggaggtcgcagctgtggctccggcacatctgcttcacgtccccgaaggcgcgcgtcatgtacgtccgcagctccgcgtttaccttctcttcgtcccacatgaacccctggatgttctgaacagacgaaagcacctcactgtgacgccaccagagttggccagtatgtcggggaggatgaggacgcctttctttgacaggatctggggatggaacgggatacagaggggatcagaaaacattgcagaaagcagtcggtttgttttgagctacgggcttgcctcgtctgcctctggatctgtggggtgattggcagcctcgatgatgtactttgcctttatgtcgttagcattatccctgtcaaaaacaaaaaaagtgcggacgaatagtttaatcaggcctcgagctgcaggcacaactaagatataataataactgaaaagaatcgacttcgtaggcgtagggtgaaaacgacttcaatgagaagaaatctacttgtttatgactcccccaagcgctgctgggatgaggacgtcgcactcttcagtgagcaacgagtctggagcgatggcgtctccccccttga

SEQ ID NO: 5592 - DNA, 2974 bp, Zea Mays
cctagattgccctgatatgtattggccgtagagctatcaggtttcatacattgcgcaagctgggccgcaatgtatgaaaagccgaacatatggccgaacatatggcgggcctttttctgagggagagacagagacgttggcgcggcgcggcgagactgctgagcccgaggaaacgggaagagaggagaaaagcaaaacgaagctcggaaccacgagacgacggagaggatgggcttcagcgtcctgctctcaccgccgccccttccgctcccgagcgccaccgctgcggccgacttgtacctaatattcggcggccacgatcgccgccgccgccgcccgctggaacacggctgccgctgcggccgccccccggagacggcgctcggcggcagctcaggccgccgcggctcgtacgatgacgacgggacggctccaggctccctcggcctcgacggcagcagcacgtcctcctcggtccgtcggacggggagtgcaaaaccaagatatcaagtaacttcgaaagaagaggacacacaaaatgcagaccgcgaggggtggcaatatagtacagaaggcctttcaaagagcatgtccaagtcaaggtacatcaaagtatttggggttgatttgtcccctgataatgtggctgttgctattgtttacttcgtgcaaggagttttaggcctttcgaggcttgctgtcagcttctacttaaaagataatcttcatcttgagccagcagagactgcagttatatctgggttctcagccttgccatggttggtcaagcccctctacggttttatcagtgattccatccctctctttggatatcgaagaaggtcgtacctatttctatcaggcatccttggagcactttcatggagtttgatggccgctgttgtggatgataaatatagtgcagcactctctattattcttggatctcttgcagttgccatatctgatgttgtggttgattctatggtggttgagagagctcgaggtgaatcacagagtacatctggatctctccagtcgctatgttggggatcctcagccttcggaggagtcgtgagtgcatacttcagtggttctttagtggatacttatggtgtaagatttgtttttggtgttacagcacttctgccactgatgacatctgctgttgcagttcttgtaaatgaagaacgcttacctttggggaaaagttcagtctcactttcagtttcaggttcagaattaattgagagctctaagcaacgtatcatgcagatttgggattcagtaaagcaacccagcatactcctacccaccttgttcatattcctttggcaagcaacaccgcaatcagactctgccatgtttttcttcataacaaataagctcgggtttactccagaatttctaggacgcgttacgcttgtcacatctgttgcatccttactgggaatcggagtgtataatttgtttctgaaggaagttccattgaggaaaatctttcttgtgacaacagtcttaggttctgctctcggaatgacacaggttcttcttgtcactgggctcaaccggaagcttggcataagcgacgaatggttctccattggggattctttgattatcacagtccttggccaggcttcctttatgcctgtcctggtgttggctgcaaagttgtgccctgtgggagcggaagcaactttatttgccactttgatgtccatctctaacgccggaggtgttgccggaggtctggtgggcgcgggtctgacgcagttactgggagtcagcagagacaacttcgaaaaccttgctctgctgatcgcgatttgcaatctcagttccctgctacctctgcctcttctgggtctcctgccagatgaatcccgtaatgcagatggtgcacagaccaaaaatgactgatgcttgtatatctccacgcgtctttacaagacgaaagggcatacacatacactcatcggcacaaagcagcgcagctgatgacgtgaacaaaacatggaagctgatgtataggatgtattatctatgatgtataaaggaggacatatcacagacgcagctaaaaaaaggcgtatgtaacatactggtaattgacgcgcgccttgcgcacgtatataataaaaaaaatgtgtgtgtgaggtgggagtgagactcagatagctaaggtaagtcagcatctgctgttgttcaatggcaatctcagcaggctagcacatcataatatgctggtacacgctgatttggtacgtccgtacgttagtgtttacaattatttccagctctgtttccatacatattctcactctagagatgatcatttgcttctgcatctcaacaaaaaatcaaagaaataacaataagtgttattacaccaatcatccattcaagaaactcttttctataaagaaaacatgattatttccagaacatgtctgttgtctcatgtctggttgcaatatgtacgtacatatggatgctatttagatcagagtgaagcgctattgtgttccgcagccccgaaaaccatagtaagcaacttgcattcaaagcaatggtagtacaggtacaatccattaagcaagcagaatcacacactcaggtttgaaacttcctatttcaaacgtgaaagcttgtagagatatctacggatggatgccatctattggataaagtttcacttccccattttcacattttatagtcatttatcgaacaatcagcaatgttggggaccttcggcgtccgaaggtcctcaaaaacatgatttaatagtgtttctggagtataatgtgcaaacaggtatcttcggactcgaatcggtatcacagagggagaagctcaaagcatacgaaggttgatacagcaccgaagctgtgagcagaaaagcttcggcatggtggcaggaaaggaaaccgacttaaagatgaaaaggctattcggacctcgatggatt

SEQ ID NO: 5593 - DNA, 3118 bp, Zea Mays
ccgcaatgtatgaaaagccgaacatatggccgaacatatggcgggcctttttctgagggagagacagagacgttggcgcggcgcggcgagactgctgagcccgaggaaacgggaagagaggagaaaagcaaaacgaagctcggaaccacgagacgacggagaggatgggcttcagcgtcctgctctcaccgccgccccttccgctcccgagcgccaccgctgcggccgacttgtacctaatattcggcggccacgatcgccgccgccgccgcccgctggaacacggctgccgctgcggccgccccccggagacggcgctcggcggcagctcaggccgccgcggctcgtacgatgacgacgggacggctccaggctccctcggcctcgacggcagcagcacgtcctcctcggtccgtcggacggggagtgcaaaaccaagatatcaagtaacttcgaaagaagaggacacacaaaatgcagaccgcgaggggtggcaatatagtacagaaggcctttcaaagagcatgtccaagtcaaggtacatcaaagtatttggggttgatttgtcccctgataatgtggctgttgctattgtttacttcgtgcaaggagttttaggcctttcgaggcttgctgtcagcttctacttaaaagataatcttcatcttgagccagcagagactgcagttatatctgggttctcagccttgccatggttggtcaagcccctctacggttttatcagtgattccatccctctctttggatatcgaagaaggtcgtacctatttctatcaggcatccttggagcactttcatggagtttgatggccgctgttgtggatgataaatatagtgcagcactctctattattcttggatctcttgcagttgccatatctgatgttgtggttgattctatggtggttgagagagctcgaggtgaatcacagagtacatctggatctctccagtcgctatgttggggatcctcagccttcggaggagtcatttgtttttggtgttacagcacttctgccactgatgacatctgctgttgcagttcttgtaaatgaagaacgcttacctttggggaaaagttcagtctcactttcagtttcaggttcagaattaattgagagctctaagcaacgtatcatgcagatttgggattcagtaaagcaacccagcatactcctacccaccttgttcatattcctttggcaagcaacaccgcaatcagactctgccatgtttttcttcatcgctcgccatccacgcccacgcaggccgcagctgccaccggccactcgctcggagatttgatctgctccaaccagcaaccaccacccctgggggaaaaggcgtcagcggtgcggttgctggcggctggccagcaaccaaaccacaccctaaaatgaacaaataagctcgggtttactccagaatttctaggacgcgttacgcttgtcacatctgttgcatccttactgggaatcggagtgtataatttgtttctgaaggaagttccattgaggaaaatctttcttgtgacaacagtcttaggttctgctctcggaatgacacaggttcttcttgtcactgggctcaaccggaagcttggcataagcgacgaatggttctccattggggattctttgattatcacagtccttggccaggcttcctttatgcctgtcctggtgttggctgcaaagttgtgccctgtgggagcggaagcaactttatttgccactttgatgtccatctctaacgccggaggtgttgccggaggtctggtgggcgcgggtctgacgcagttactgggagtcagcagagacaacttcgaaaaccttgctctgctgatcgcgatttgcaatctcagttccctgctacctctgcctcttctgggtctcctgccagatgaatcccgtaatgcagatggtgcacagaccaaaaatgactgatgcttgtatatctccacgcgtctttacaagacgaaagggcatacacatacactcatcggcacaaagcagcgcagctgatgacgtgaacaaaacatggaagctgatgtataggatgtattatctatgatgtatagtaagtaacgttagattaattatgaaacatatttgtaataaatttaattgaaagtataaatactccttttcataaaacgaggtttacatctttttttcagaaggaggacatatcacagacgcagctaaaaaaaggcgtatgtaacatactggtaattgacgcgcgccttgcgcacgtatataataaaaaaaatgtgtgtgtgaggtgggagtgagactcagatagctaaggtaagtcagcatctgctgttgttcaatggcaatctcagcaggctagcacatcataatatgctggtacacgctgatttggtacgtccgtacgttagtgtttacaattatttccagctctgtttccatacatattctcactctagagatgatcatttgcttctgcatctcaacaaaaaatcaaagaaataacaataagtgttattacaccaatcatccattcaagaaactcttttctataaagaaaacatgattatttccagaacatgtctgttgtctcatgtctggttgcaatatgtacgtacatatggatgctatttagatcagagtgaagcgctattgtgttccgcagccccgaaaaccatagtaagcaacttgcattcaaagcaatggtagtacaggtacaatccattaagcaagcagaatcacacactcaggtttgaaacttcctatttcaaacgtgaaagcttgtagagatatctacggatggatgccatctattggataaagtttcacttccccattttcacattttatagtcatttatcgaacaatcagcaatgttggggaccttcggcgtccgaaggtcctcaaaaacatgatttaatagtgtttctggagtataatgtgcaaacaggtatcttcggactcgaatcggtatcacagagggagaagctcaaagcatacgaaggttgatacagcaccgaagctgtgagcagaaaagcttcggcatggtggcaggaaaggaaaccgacttaaagatgaaaaggctattcggacctcgatggatt

SEQ ID NO: 5594 - DNA, 3065 bp, Zea Mays
ccgcaatgtatgaaaagccgaacatatggccgaacatatggcgggcctttttctgagggagagacagagacgttggcgcggcgcggcgagactgctgagcccgaggaaacgggaagagaggagaaaagcaaaacgaagctcggaaccacgagacgacggagaggatgggcttcagcgtcctgctctcaccgccgccccttccgctcccgagcgccaccgctgcggccgacttgtacctaatattcggcggccacgatcgccgccgccgccgcccgctggaacacggctgccgctgcggccgccccccggagacggcgctcggcggcagctcaggccgccgcggctcgtacgatgacgacgggacggctccaggctccctcggcctcgacggcagcagcacgtcctcctcggtccgtcggacggggagtgcaaaaccaagatatcaagtaacttcgaaagaagaggacacacaaaatgcagaccgcgaggggtggcaatatagtacagaaggcctttcaaagagcatgtccaagtcaaggtacatcaaagtatttggggttgatttgtcccctgataatgtggctgttgctattgtttacttcgtgcaaggagttttaggcctttcgaggcttgctgtcagcttctacttaaaagataatcttcatcttgagccagcagagactgcagttatatctgggttctcagccttgccatggttggtcaagcccctctacggttttatcagtgattccatccctctctttggatatcgaagaaggtcgtacctatttctatcaggcatccttggagcactttcatggagtttgatggccgctgttgtggatgataaatatagtgcagcactctctattattcttggatctcttgcagttgccatatctgatgttgtggttgattctatggtggttgagagagctcgaggtgaatcacagagtacatctggatctctccagtcgctatgttggggatcctcagccttcggaggagtcgtgagtgcatacttcagtggttctttagtggatacttatggtgtaagatttgtttttggtgttacagcacttctgccactgatgacatctgctgttgcagttcttgtaaatgaagaacgcttacctttggggaaaagttcagtctcactttcagtttcaggttcagaattaattgagagctctaagcaacgtatcatgcagatttgggattcagtaaagcaacccagcatactcctacccaccttgttcatattcctttggcaagcaacaccgcaatcagactctgccatgtttttcttcatcgctcgccatccacgcccacgcaggccgcagctgccaccggccactcgctcggagatttgatctgctccaaccagcaaccaccacccctgggggaaaaggcgtcagcggtgcggttgctggcggctggccagcaaccaaaccacaccctaaaatgaacaaataagctcgggtttactccagaatttctaggacgcgttacgcttgtcacatctgttgcatccttactgggaatcggagtgtataatttgtttctgaaggaagttccattgaggaaaatctttcttgtgacaacagtcttaggttctgctctcggaatgacacaggttcttcttgtcactgggctcaaccggaagcttggcataagcgacgaatggttctccattggggattctttgattatcacagtccttggccaggcttcctttatgcctgtcctggtgttggctgcaaagttgtgccctgtgggagcggaagcaactttatttgccactttgatgtccatctctaacgccggaggtgttgccggaggtctggtgggcgcgggtctgacgcagttactgggagtcagcagagacaacttcgaaaaccttgctctgctgatcgcgatttgcaatctcagttccctgctacctctgcctcttctgggtctcctgccagatgaatcccgtaatgcagatggtgcacagaccaaaaatgactgatgcttgtatatctccacgcgtctttacaagacgaaagggcatacacatacactcatcggcacaaagcagcgcagctgatgacgtgaacaaaacatggaagctgatgtataggatgtattatctatgatgtataaaggaggacatatcacagacgcagctaaaaaaaggcgtatgtaacatactggtaattgacgcgcgccttgcgcacgtatataataaaaaaaatgtgtgtgtgaggtgggagtgagactcagatagctaaggtaagtcagcatctgctgttgttcaatggcaatctcagcaggctagcacatcataatatgctggtacacgctgatttggtacgtccgtacgttagtgtttacaattatttccagctctgtttccatacatattctcactctagagatgatcatttgcttctgcatctcaacaaaaaatcaaagaaataacaataagtgttattacaccaatcatccattcaagaaactcttttctataaagaaaacatgattatttccagaacatgtctgttgtctcatgtctggttgcaatatgtacgtacatatggatgctatttagatcagagtgaagcgctattgtgttccgcagccccgaaaaccatagtaagcaacttgcattcaaagcaatggtagtacaggtacaatccattaagcaagcagaatcacacactcaggtttgaaacttcctatttcaaacgtgaaagcttgtagagatatctacggatggatgccatctattggataaagtttcacttccccattttcacattttatagtcatttatcgaacaatcagcaatgttggggaccttcggcgtccgaaggtcctcaaaaacatgatttaatagtgtttctggagtataatgtgcaaacaggtatcttcggactcgaatcggtatcacagagggagaagctcaaagcatacgaaggttgatacagcaccgaagctgtgagcagaaaagcttcggcatggtggcaggaaaggaaaccgacttaaagatgaaaaggctattcggacctcgatggatt

SEQ ID NO: 5595 - DNA, 3092 bp, Zea Mays
gagacgttggcgcggcgcggcgagactgctgagcccgaggaaacgggaagagaggagaaaagcaaaacgaagctcggaaccacgagacgacggagaggatgggcttcagcgtcctgctctcaccgccgccccttccgctcccgagcgccaccgctgcggccgacttgtacctaatattcggcggccacgatcgccgccgccgccgcccgctggaacacggctgccgctgcggccgccccccggagacggcgctcggcggcagctcaggccgccgcggctcgtacgatgacgacgggacggctccaggctccctcggcctcgacggcagcagcacgtcctcctcggtccgtcggacggggagtgcaaaaccaagatatcaagtaacttcgaaagaagaggacacacaaaatgcagaccgcgaggggtggcaatatagtacagaaggcctttcaaagagcatgtccaagtcaaggtacatcaaagtatttggggttgatttgtcccctgataatgtggctgttgctattgtttacttcgtgcaaggagttttaggcctttcgaggcttgctgtcagcttctacttaaaagataatcttcatcttgagccagcagagttatatctgggttctcagccttgccatggttggtcaagcccctctacggttttatcagtgattccatccctctctttggatatcgaagaaggtcgtacctatttctatcaggcatccttggagcactttcatggagtttgatggccgctgttgtggatgataaatatagtgcagcactctctattattcttggatctcttgcagttgccatatctgatgttgtggttgattctatggtggttgagagagctcgaggtgaatcacagagtacatctggatctctccagtcgctatgttggggatcctcagccttcggaggagtcgtgagtgcatacttcagtggttctttagtggatacttatggtgtaagatttgtttttggtgttacagcacttctgccactgatgacatctgctgttgcagttcttgtaaatgaagaacgcttacctttggggaaaagttcagtctcactttcagtttcaggttcagaattaattgagagctctaagcaacgtatcatgcagatttgggattcagtaaagcaacccagcatactcctacccaccttgttcatattcctttggcaagcaacaccgcaatcagactctgccatgtttttcttcatcgctcgccatccacgcccacgcaggccgcagctgccaccggccactcgctcggagatttgatctgctccaaccagcaaccaccacccctgggggaaaaggcgtcagcggtgcggttgctggcggctggccagcaaccaaaccacaccctaaaatgaacaaataagctcgggtttactccagaatttctaggacgcgttacgcttgtcacatctgttgcatccttactgggaatcggagtgtataatttgtttctgaaggaagttccattgaggaaaatctttcttgtgacaacagtcttaggttctgctctcggaatgacacaggttcttcttgtcactgggctcaaccggaagcttggcataagcgacgaatggttctccattggggattctttgattatcacagtccttggccaggcttcctttatgcctgtcctggtgttggctgcaaagttgtgccctgtgggagcggaagcaactttatttgccactttgatgtccatctctaacgccggaggtgttgccggaggtctggtgggcgcgggtctgacgcagttactgggagtcagcagagacaacttcgaaaaccttgctctgctgatcgcgatttgcaatctcagttccctgctacctctgcctcttctgggtctcctgccagatgaatcccgtaatgcagatggtgcacagaccaaaaatgactgatgcttgtatatctccacgcgtctttacaagacgaaagggcatacacatacactcatcggcacaaagcagcgcagctgatgacgtgaacaaaacatggaagctgatgtataggatgtattatctatgatgtatagtaagtaacgttagattaattatgaaacatatttgtaataaatttaattgaaagtataaatactccttttcataaaacgaggtttacatctttttttcagaaggaggacatatcacagacgcagctaaaaaaaggcgtatgtaacatactggtaattgacgcgcgccttgcgcacgtatataataaaaaaaatgtgtgtgtgaggtgggagtgagactcagatagctaaggtaagtcagcatctgctgttgttcaatggcaatctcagcaggctagcacatcataatatgctggtacacgctgatttggtacgtccgtacgttagtgtttacaattatttccagctctgtttccatacatattctcactctagagatgatcatttgcttctgcatctcaacaaaaaatcaaagaaataacaataagtgttattacaccaatcatccattcaagaaactcttttctataaagaaaacatgattatttccagaacatgtctgttgtctcatgtctggttgcaatatgtacgtacatatggatgctatttagatcagagtgaagcgctattgtgttccgcagccccgaaaaccatagtaagcaacttgcattcaaagcaatggtagtacaggtacaatccattaagcaagcagaatcacacactcaggtttgaaacttcctatttcaaacgtgaaagcttgtagagatatctacggatggatgccatctattggataaagtttcacttccccattttcacattttatagtcatttatcgaacaatcagcaatgttggggaccttcggcgtccgaaggtcctcaaaaacatgatttaatagtgtttctggagtataatgtgcaaacaggtatcttcggactcgaatcggtatcacagagggagaagctcaaagcatacgaaggttgatacagcaccgaagctgtgagcagaaaagcttcggcatggtggcaggaaaggaaaccgacttaaagatgaaaaggctattcggacctcgatggatt

SEQ ID NO: 5596 - DNA, 1411 bp, Zea Mays
ggcgcggcgcggcgagactgctgagcccgaggaaacgggaagagaggagaaaagcaaaacgaagctcggaaccacgagacgacggagaggatgggcttcagcgtcctgctctcaccgccgccccttccgctcccgagcgccaccgctgcggccgacttgtacctaatattcggcggccacgatcgccgccgccgccgcccgctggaacacggctgccgctgcggccgccccccggagacggcgctcggcggcagctcaggccgccgcggctcgtacgatgacgacgggacggctccaggctccctcggcctcgacggcagcagcacgtcctcctcggtccgtcggacggggagtgcaaaaccaagatatcaagtaacttcgaaagaagaggacacacaaaatgcagaccgcgaggggtggcaatatagtacagaaggcctttcaaagagcatgtccaagtcaaggtacatcaaagtatttggggttgatttgtcccctgataatgtggctgttgctattgtttacttcgtgcaaggagttttaggcctttcgaggcttgctgtcagcttctacttaaaagataatcttcatcttgagccagcagagactgcagttatatctgggttctcagccttgccatggttggtcaagcccctctacggttttatcaggtttcaccaaaataccgaataacctccctgccatccctttctttctgtatatgatatatgcacttaattgcaatgatgtactgtttttatttccgtatacagtgattccatccctctctttggatatcgaagaaggtcgtacctatttctatcaggcatccttggagcactttcatggagtttgatggccgctgttgtggatgataaatatagtgcagcactctctattattcttggatctcttgcagttgccatatctgatgttgtggttgattctatggtggttgagagagctcgaggtgaatcacagagtacatctggatctctccagtcgctatgttggggatcctcagccttcggaggagtcgtgagtgcatacttcagtggttctttagtggatacttatggtgtaagatttgtttttggtgttacagcacttctgccactgatgacatctgctgttgcagttcttgtaaatgaagaacgcttacctttggggaaaagttcagtctcactttcagtttcaggttcagaattaattgagagctctaagcaacgtatcatgcagatttgggattcagtaaagcaacccagcatactcctacccaccttgttcatattcctttggcaagcaacaccgcaatcagactctgccatgtttttcttcataaatggtttcttcctatgttaaaattctcgaatctagtgctggatttgcatctagccaggggcacacccac

SEQ ID NO: 5597 - DNA, 2918 bp, Zea Mays
ggcgcggcgcggcgagactgctgagcccgaggaaacgggaagagaggagaaaagcaaaacgaagctcggaaccacgagacgacggagaggatgggcttcagcgtcctgctctcaccgccgccccttccgctcccgagcgccaccgctgcggccgacttgtacctaatattcggcggccacgatcgccgccgccgccgcccgctggaacacggctgccgctgcggccgccccccggagacggcgctcggcggcagctcaggccgccgcggctcgtacgatgacgacgggacggctccaggctccctcggcctcgacggcagcagcacgtcctcctcggtccgtcggacggggagtgcaaaaccaagatatcaagtaacttcgaaagaagaggacacacaaaatgcagaccgcgaggggtggcaatatagtacagaaggcctttcaaagagcatgtccaagtcaaggtacatcaaagtatttggggttgatttgtcccctgataatgtggctgttgctattgtttacttcgtgcaaggagttttaggcctttcgaggcttgctgtcagcttctacttaaaagataatcttcatcttgagccagcagagactgcagttatatctgggttctcagccttgccatggttggtcaagcccctctacggttttatcagtgattccatccctctctttggatatcgaagaaggtcgtacctatttctatcaggcatccttggagcactttcatggagtttgatggccgctgttgtggatgataaatatagtgcagcactctctattattcttggatctcttgcagttgccatatctgatgttgtggttgattctatggtggttgagagagctcgaggtgaatcacagagtacatctggatctctccagtcgctatgttggggatcctcagccttcggaggagtcgtgagtgcatacttcagtggttctttagtggatacttatggtgtaaggttgtgttgctaatagacctggtaacagctgatgaagcttcttggtgtgtttacagttcactgatcatgtgtcccatgaatgcagatttgtttttggtgttacagcacttctgccactgatgacatctgctgttgcagttcttgtaaatgaagaacgcttacctttggggaaaagttcagtctcactttcagtttcaggttcagaattaattgagagctctaagcaacgtatcatgcagatttgggattcagtaaagcaacccagcatactcctacccaccttgttcatattcctttggcaagcaacaccgcaatcagactctgccatgtttttcttcatgaagttccattgaggaaaatctttcttgtgacaacagtcttaggttctgctctcggaatgacacaggttcttcttgtcactgggctcaaccggaagcttggcataagcgacgaatggttctccattggggattctttgattatcacagtccttggccaggcttcctttatgcctgtcctggtgttggctgcaaagttgtgccctgtgggagcggaagcaactttatttgccactttgatgtccatctctaacgccggaggtgttgccggaggtctggtgggcgcgggtctgacgcagttactgggagtcagcagagacaacttcgaaaaccttgctctgctgatcgcgatttgcaatctcagttccctgctacctctgcctcttctgggtctcctgccagatgaatcccgtaatgcagatggtgcacagaccaaaaatgactgatgcttgtatatctccacgcgtctttacaagacgaaagggcatacacatacactcatcggcacaaagcagcgcagctgatgacgtgaacaaaacatggaagctgatgtataggatgtattatctatgatgtatagtaagtaacgttagattaattatgaaacatatttgtaataaatttaattgaaagtataaatactccttttcataaaacgaggtttacatctttttttcagaaggaggacatatcacagacgcagctaaaaaaaggcgtatgtaacatactggtaattgacgcgcgccttgcgcacgtatataataaaaaaaatgtgtgtgtgaggtgggagtgagactcagatagctaaggtaagtcagcatctgctgttgttcaatggcaatctcagcaggctagcacatcataatatgctggtacacgctgatttggtacgtccgtacgttagtgtttacaattatttccagctctgtttccatacatattctcactctagagatgatcatttgcttctgcatctcaacaaaaaatcaaagaaataacaataagtgttattacaccaatcatccattcaagaaactcttttctataaagaaaacatgattatttccagaacatgtctgttgtctcatgtctggttgcaatatgtacgtacatatggatgctatttagatcagagtgaagcgctattgtgttccgcagccccgaaaaccatagtaagcaacttgcattcaaagcaatggtagtacaggtacaatccattaagcaagcagaatcacacactcaggtttgaaacttcctatttcaaacgtgaaagcttgtagagatatctacggatggatgccatctattggataaagtttcacttccccattttcacattttatagtcatttatcgaacaatcagcaatgttggggaccttcggcgtccgaaggtcctcaaaaacatgatttaatagtgtttctggagtataatgtgcaaacaggtatcttcggactcgaatcggtatcacagagggagaagctcaaagcatacgaaggttgatacagcaccgaagctgtgagcagaaaagcttcggcatggtggcaggaaaggaaaccgacttaaagatgaaaaggctattcggacctcgatggatt

SEQ ID NO: 5598 - DNA, 2829 bp, Zea Mays
ggcgcggcgcggcgagactgctgagcccgaggaaacgggaagagaggagaaaagcaaaacgaagctcggaaccacgagacgacggagaggatgggcttcagcgtcctgctctcaccgccgccccttccgctcccgagcgccaccgctgcggccgacttgtacctaatattcggcggccacgatcgccgccgccgccgcccgctggaacacggctgccgctgcggccgccccccggagacggcgctcggcggcagctcaggccgccgcggctcgtacgatgacgacgggacggctccaggctccctcggcctcgacggcagcagcacgtcctcctcggtccgtcggacggggagtgcaaaaccaagatatcaagtaacttcgaaagaagaggacacacaaaatgcagaccgcgaggggtggcaatatagtacagaaggcctttcaaagagcatgtccaagtcaaggtacatcaaagtatttggggttgatttgtcccctgataatgtggctgttgctattgtttacttcgtgcaaggagttttaggcctttcgaggcttgctgtcagcttctacttaaaagataatcttcatcttgagccagcagagttatatctgggttctcagccttgccatggttggtcaagcccctctacggttttatcagtgattccatccctctctttggatatcgaagaaggtcgtacctatttctatcaggcatccttggagcactttcatggagtttgatggccgctgttgtggatgataaatatagtgcagcactctctattattcttggatctcttgcagttgccatatctgatgttgtggttgattctatggtggttgagagagctcgaggtgaatcacagagtacatctggatctctccagtcgctatgttggggatcctcagccttcggaggagtcgtgagtgcatacttcagtggttctttagtggatacttatggtgtaagatttgtttttggtgttacagcacttctgccactgatgacatctgctgttgcagttcttgtaaatgaagaacgcttacctttggggaaaagttcagtctcactttcagtttcaggttcagaattaattgagagctctaagcaacgtatcatgcagatttgggattcagtaaagcaacccagcatactcctacccaccttgttcatattcctttggcaagcaacaccgcaatcagactctgccatgtttttcttcataacaaataagctcgggtttactccagaatttctaggacgcgttacgcttgtcacatctgttgcatccttactgggaatcggagtgtataatttgtttctgaaggaagttccattgaggaaaatctttcttgtgacaacagtcttaggttctgctctcggaatgacacaggttcttcttgtcactgggctcaaccggaagcttggcataagcgacgaatggttctccattggggattctttgattatcacagtccttggccaggcttcctttatgcctgtcctggtgttggctgcaaagttgtgccctgtgggagcggaagcaactttatttgccactttgatgtccatctctaacgccggaggtgttgccggaggtctggtgggcgcgggtctgacgcagttactgggagtcagcagagacaacttcgaaaaccttgctctgctgatcgcgatttgcaatctcagttccctgctacctctgcctcttctgggtctcctgccagatgaatcccgtaatgcagatggtgcacagaccaaaaatgactgatgcttgtatatctccacgcgtctttacaagacgaaagggcatacacatacactcatcggcacaaagcagcgcagctgatgacgtgaacaaaacatggaagctgatgtataggatgtattatctatgatgtataaaggaggacatatcacagacgcagctaaaaaaaggcgtatgtaacatactggtaattgacgcgcgccttgcgcacgtatataataaaaaaaatgtgtgtgtgaggtgggagtgagactcagatagctaaggtaagtcagcatctgctgttgttcaatggcaatctcagcaggctagcacatcataatatgctggtacacgctgatttggtacgtccgtacgttagtgtttacaattatttccagctctgtttccatacatattctcactctagagatgatcatttgcttctgcatctcaacaaaaaatcaaagaaataacaataagtgttattacaccaatcatccattcaagaaactcttttctataaagaaaacatgattatttccagaacatgtctgttgtctcatgtctggttgcaatatgtacgtacatatggatgctatttagatcagagtgaagcgctattgtgttccgcagccccgaaaaccatagtaagcaacttgcattcaaagcaatggtagtacaggtacaatccattaagcaagcagaatcacacactcaggtttgaaacttcctatttcaaacgtgaaagcttgtagagatatctacggatggatgccatctattggataaagtttcacttccccattttcacattttatagtcatttatcgaacaatcagcaatgttggggaccttcggcgtccgaaggtcctcaaaaacatgatttaatagtgtttctggagtataatgtgcaaacaggtatcttcggactcgaatcggtatcacagagggagaagctcaaagcatacgaaggttgatacagcaccgaagctgtgagcagaaaagcttcggcatggtggcaggaaaggaaaccgacttaaagatgaaaaggctattcggacctcgatggatt

SEQ ID NO: 5599 - DNA, 2833 bp, Zea Mays
agcggatacgaaatttttggagtgggcgttttcattgggctccgagagagggagaaacgtgcggtagtctgagaaatcaagcaccactggctgaattttccacagcttctggaaacttgatagtttgtctagggaagcttcgagacctctggttttcgtttgtgcagttgcaggaatttcttatggtcatccagaaaacattcaggagaccccttttttctaagcctggactaccaagggagtgcaaaaccaagatatcaagtaacttcgaaagaagaggacacacaaaatgcagaccgcgaggggtggcaatatagtacagaaggcctttcaaagagcatgtccaagtcaaggtacatcaaagtatttggggttgatttgtcccctgataatgtggctgttgctattgtttacttcgtgcaaggagttttaggcctttcgaggcttgctgtcagcttctacttaaaagataatcttcatcttgagccagcagagactgcagttatatctgggttctcagccttgccatggttggtcaagcccctctacggttttatcagtgattccatccctctctttggatatcgaagaaggtcgtacctatttctatcaggcatccttggagcactttcatggagtttgatggccgctgttgtggatgataaatatagtgcagcactctctattattcttggatctcttgcagttgccatatctgatgttgtggttgattctatggtggttgagagagctcgaggtgaatcacagagtacatctggatctctccagtcgctatgttggggatcctcagccttcggaggagtcatttgtttttggtgttacagcacttctgccactgatgacatctgctgttgcagttcttgtaaatgaagaacgcttacctttggggaaaagttcagtctcactttcagtttcaggttcagaattaattgagagctctaagcaacgtatcatgcagatttgggattcagtaaagcaacccagcatactcctacccaccttgttcatattcctttggcaagcaacaccgcaatcagactctgccatgtttttcttcatcgctcgccatccacgcccacgcaggccgcagctgccaccggccactcgctcggagatttgatctgctccaaccagcaaccaccacccctgggggaaaaggcgtcagcggtgcggttgctggcggctggccagcaaccaaaccacaccctaaaatgaacaaataagctcgggtttactccagaatttctaggacgcgttacgcttgtcacatctgttgcatccttactgggaatcggagtgtataatttgtttctgaaggaagttccattgaggaaaatctttcttgtgacaacagtcttaggttctgctctcggaatgacacaggttcttcttgtcactgggctcaaccggaagcttggcataagcgacgaatggttctccattggggattctttgattatcacagtccttggccaggcttcctttatgcctgtcctggtgttggctgcaaagttgtgccctgtgggagcggaagcaactttatttgccactttgatgtccatctctaacgccggaggtgttgccggaggtctggtgggcgcgggtctgacgcagttactgggagtcagcagagacaacttcgaaaaccttgctctgctgatcgcgatttgcaatctcagttccctgctacctctgcctcttctgggtctcctgccagatgaatcccgtaatgcagatggtgcacagaccaaaaatgactgatgcttgtatatctccacgcgtctttacaagacgaaagggcatacacatacactcatcggcacaaagcagcgcagctgatgacgtgaacaaaacatggaagctgatgtataggatgtattatctatgatgtataaaggaggacatatcacagacgcagctaaaaaaaggcgtatgtaacatactggtaattgacgcgcgccttgcgcacgtatataataaaaaaaatgtgtgtgtgaggtgggagtgagactcagatagctaaggtaagtcagcatctgctgttgttcaatggcaatctcagcaggctagcacatcataatatgctggtacacgctgatttggtacgtccgtacgttagtgtttacaattatttccagctctgtttccatacatattctcactctagagatgatcatttgcttctgcatctcaacaaaaaatcaaagaaataacaataagtgttattacaccaatcatccattcaagaaactcttttctataaagaaaacatgattatttccagaacatgtctgttgtctcatgtctggttgcaatatgtacgtacatatggatgctatttagatcagagtgaagcgctattgtgttccgcagccccgaaaaccatagtaagcaacttgcattcaaagcaatggtagtacaggtacaatccattaagcaagcagaatcacacactcaggtttgaaacttcctatttcaaacgtgaaagcttgtagagatatctacggatggatgccatctattggataaagtttcacttccccattttcacattttatagtcatttatcgaacaatcagcaatgttggggaccttcggcgtccgaaggtcctcaaaaacatgatttaatagtgtttctggagtataatgtgcaaacaggtatcttcggactcgaatcggtatcacagagggagaagctcaaagcatacgaaggttgatacagcaccgaagctgtgagcagaaaagcttcggcatggtggcaggaaaggaaaccgacttaaagatgaaaaggctattcggacctcgatggatt

SEQ ID NO: 5600 - DNA, 1458 bp, Zea Mays
tactccactctggcataaccgaacctcacgtccgcccaaacccccgaacctgcgagactcctcgcgtccacctttcggtctcctcttctctgcgaatcccgtaatcccatctctctcgcctccactgccgcctctccgtctccagcttaccaccgccgccgctggatgtctacgcagtagatccatagaccctgatctcctcgagggcgccggaagaagaggaggatgcctttgaggacgcgctcaccgacgagcagctgcgagagaaagctagaatccaagcaaatgatgcaaaagcagaaggaaacaagctttttggtgctggacaatatgaggaagcattatcacagtatgaaatatcattgcaaattgctgctgagctggaatctgctgaggatatacgtgctgcatgccattctaatcgtgctgtatgcttcttgaaattgggaaaacatgatgagacgattaaagaatgctcaaaagcacttgagctcaatccaacatacctgaaagccctgcttcggagggcagaagcgcatgaaaagcttgaacattatgatgaagctattgccgatatgaaaaaggttgttgaagtggatccttcaaatcaacaagccacgaggtctcttttccgacttgagcccctggcagctgagaagagggaaaagatgaaggaagaaatgattgcaaagctgaaagatctggggaactctgtgctgggccgcttcgggatgagtgttgacaatttcaaagctgtcaaagacccaaacactggctcttacagcattcaattccaaaagtaacacgacgtgaagaaagacatggatgaatatggctgggcggcatatttcagttgtaattgttcaaggaacttgtgcgtcacatacctggacaatatccaaacagatatctgcaaatcgatctgaaggtgggacatggaagaggaattggagtattgcgtcgcgtttgcatttgtcgcacgttagactgttagagatgctttctcgagtgcgaacttgcatgatcattttgaactctgatattttcctcaatgcatggtcgttttttctttgttgtaacgatgccttccaaagactgcatttccgtgcggttcaaacatcccagtcgatggcgacacgtgcctgtagtgtcttggccctgatcgttgggaaagggctagcctgacctggcgtctagtcgtttttagggcgtttggctgactcggatatgtcggctgggtttcgtggatagactattagtttatggttctaggtgataagtaatggtgatagattattagtcatttggttacaattttagttattatcttatggctatagtcttatgtatttagtcattccgttacaattttagttattctggtacaattttagttatttctttacagtttcggttacttttaccgtttcggttattatattacattcttagtcattc

SEQ ID NO: 5601 - DNA, 2773 bp, Zea Mays
ggacgtcctttctttcgcttcccgtctggtccccttccgagttccgacttcgactcccaccgctgccggcggcgctggctaggtgaggctagcggcggctctctgcttcagccggagcgctactcggtgctgcccctcctcctcgcctcctggcctcgcaggaggacagagattctaaaattcagtacaaactgacgacctacacattcggagcttggcatggcgctgtcagtgtccatatagctgcctcaatggcgctgaaggttgcgtatcgcatacgctttgcgagatggcacctgctatcaggcagactcatgtactgttcgtgcccagattcgccctccgcgcgggcttctgccgagagagcaagttcttccgagtttgattctgcgatccggtcactcaaggacagtctccggccagagagtctagcccggattctcgattccacgtccgattcgagcttggcacttaggatcttcagatgggcttcgcatcagaggtataacatccagacggttgatacctacagctgtatgatctccaggcttactgttgtggaaaatcgtgatgagatggacagcctcctcagtgagatggtcaggctgagggttcctgcgctggagcaggcccttaataaattagttgagtccctgagcagtaagaaccgatgtgatgaagctttgctggtaatacagcatgctagatctgcgaagcttaagttgtcagtctcagcttgcaacggagtgctgcatggtatggtcaggcaaggaaggggtttgcggttgttcatgcttgcgtacacggagattatcaaggcgggagtcctccctgatgtggaggcattgaattttctgatccaggctttgtgtgagtctggtcgtttagatctggcactgattcagtttgacaggatgaacaagaagaggtgtactcctaatagtcatacgtttgagatactgatcacagcactttgtttccacagcagagcagatgaagcggtcaagctctttgataagatgctgcaacttagatgctcccctgatagcagcttccatgctcaagtgatgcccctgttttgcaagttcagtaaagttaaggaggtgattacgttgcatcgaataatgaaagaaggcaacattcagttgagtctgcagttgtacagtgccttggttagatgtttatgtgagaatgaactactggatgacgctaccatagtgttcaaagagatggtagcatcaggtcatgctccaatggcaattacatatgtggacatgataaattgctactgtacaaaatccaagttccacaacgctatgatctttctagaggaaaatggtgtcactgaattagaaccatataatgtgctcctgacatggttgtgtagaaatgacaggctgcaggattcagtaaactatcttgagaaattgcacagcagaggttttgttgattgtgagtcatggaacattgttataactcagttctgcaatgaaggaaacatcagaagagcatttgagctcattggtagaatggttgtttcttcatttgcaccagagcttgtagaggttttgtgtcactcaaagaggatcaaagaagctatcgaagtttttaaatatcactataatagaggttgcagtctgacaaacaagtcacttgatatgctaattcaagggagttgcttgtctggaaagattcaagaagcagtcaaattgcgcacgttggctgtttctgtttgcacaggcactttttgtacattctccacttatgacataattatccaagcactgttccatttgaaggaggggaaacatgtattggctctctttgcacaaatgttgatggaaggttgtccattggatgggtatgcatacaatattctgttgcgctctttcctcaccaaggaaacaattattgaggctgctatcttgttcaacagaatggttaaccattccttttttcctgaccaagagacgtttgaattattagtcaatgatatggccttgttttcttttcttaatatggttgcacaaagtttactgaaagtggtagatgcaagtggaacagtgagccctagaatgtataacattattatttacggacttattaaagaaggcttcaagagtgaggcatgcaagtttctagaccaaatgctggaaaaggggtgggtgcctgattcaaggacacatcgtgtcttggtcggcagctctgatctggtggaggctagagaacttgttgaagcctaccagacagtggatggtgataatgtggccaacatattgttggaaggactagattgaggtctgtgacatgttttggtttactgttgtagggaaaggatataccagtgctgacagtgtttccaggtaaagttttcatgaaatactgtcagtaatgaatactggtagcagaatctagaaaagtagaaaaacctgtagcagaaaagataagggagttgtacatacttgaaagaccttcagcaaagatgaaaacggcaaattgctctggataacgtcctgtacttttcagacattatcgtgccatttctaaggaaaaaaaacacaatctttgccatcagtaatagtctgtgtgatgacttgatgaattaaattgactttggtttcttgcctgaatttctgctattatatttgtggctattctgaacccaatatggaactaaaccaacaccacaaaacaaaacccaccagctaggcctctactaacagattggggtgtttaaaacttaaaacagtaatacatagtgacaagttacttt

SEQ ID NO: 5602 - DNA, 5657 bp, Zea Mays
atcttcgttctgagctctctctctctagtctctcccgtccctacccaccaaatctcgcagtcgcagcaggtccaggtgctcccgaggaatccattcccaatttgcgttcccactcccaccaccgcttcttcccgtatcccttgtcctccctaatttcctctcacaaaaagcgggtgcggcgtcctgccactcacctcggtctcggggggcgccgtgcggcgggcgcccgtgctgctggtttcgctccaggggagaaggggcagagggagtagagcaggttaggtccgtttgcgttttcttttgcgggtttgtaggtcaaaagctcggcgagcactttccgctccacctcctcacgctcggaatcaaatcgatgccccccctgatttggttcctggtatcggtgcatgagcttgctccaagagatctcccttttggttcggcgtcaggggttctgtgaggtcacgcggcttcttcctcttggcgctcctcacatgtccgggcgcttcgatctctgcccactgcgcgagtgattctgctgctgcagcagctgttaggtgcgcgcggtccgttatggggtgaaccgaagcgttcctcgcagggctgtgggtttattacgccgcctgtttgcttccccgctccatgtccttgtgcccatgcttctttgcttttgtcacgcctgaaccgtgtcttcttgtagtatctgaggcttggcagttggcaagtacaaactagcaacttgcttaggtataaagtataaaccagtgtctggtgcagagcccaaaggggtcacgaatcgttgatgcatagatctgcttctggctgagataaggctctaagttcgctctgttgatggggctaccatgagccacgggaacgggatgttgaattctgtcaaggtggagaggtggccagcagcagtcgctgcaaatggccagcctaggccgatggatgtgctccacgacggcagctcgccgccgttccttaccaagacgtatgacatggttgatgacccaaccacgaacgccgttgtgtcatggagtgccgccaacaatagctttgtagtttgggatcctcatatctttgggacggtgctgctgccaaggtacttcaagcacaacaacttctccagctttgttcggcagctcaatacttatgttgccgttcttccgtgtttgtttctgcggctgtggaaccatgcacggagggatgatgcggccgtgtgaaagggcttcagaaaggtggatcctgacagatgggaatttgctaatgaggagtttctgagaggtcagaggcacctcctcaaaaacattaggcgtcggaaacctccacactcatctccaaatcaacaatctcttggctcttacctcgaggtaggacactttggatatgaagaagagattgatcagctgaagagggataaacagctcttgatggctgaggtagtgaagctgaggcaggagcaccaaaatactagatcagatctacaggccatggaagagaaattacaagataccgagcagaagcagcagcagatgatggcattcatggcacgcgtcatgcagaaccctgatttcatgcgtcagctgatctcccagcgggagatgaggaaggagctcgaggatgccatctcgaagaagagaaggcgccgcattgaccagggacatgaagctggtagcatgggcactggttctagcctggagcaagggccacagggagtgtttgaaccgcaggagccggtggaatcactcgccaacggtgtgccatctgatctggagagttcgtctgttgaggcgaagggattggaggttcgacagggtgtttcttcaggtggttctgagcatctgaatggcaggccaagcggagagttaaatgatgatttctgggaggaccttctgcacgaggggggacttggtgcagatgcaggcaatgctgttggtcaggatgatatgaacatggacatggacccagatgttagcctgcctcaactgaaacaacatggacccagacattagccgctcttgtgctatcacaatggctgtgactctgtgagtatctttacagttatgctcgttatacccctgtggtgtacctgtttcgatcgtcttcgaccaaatgtcacgtcgactgcagtctccagttgttaatacagtctgttcagcacgctgatttaagtatttgggtcaagatgttcatataatcctgtggtatccagagatattatagtttgttttcgtaactgtttgcgcagagaccatgctatgttgcctgcaggctatcagtgtatttgttctaacagatcgcaacgctggtacaacgcagtgacctgccagactgggccactatgagattgtagggaaagaccagatagcttgtgtatgtaaaagctgatccatagtagcctatcatgtgcaacgctattgccctttgggatttggcatttcactgtatataacatatcatcgccgtattgccgcatccatcgttgtcttggtttacccatttaagtttgttgtcttcccttttagcttacacatgtaccggctcggtcagtgcccgaggatctatttgcgtgcaaaagtgttcttttttcaatttctgaaatctagaggcttctgtcttcttattctgtttgatgctacttttccctcgagggaattgtctcatgctagcagtcccttcgaccgaccctacgttcatcatgcaaacttgaatggtttttattcatcaaactttgaagtggtactactgtggtggtgtttggttcatgcctcgttcttagaatctcattattagccaaacagattctggatgttatattggatttgccagaatctcacaatatcaacaaaagttgataatataatttgtattggattttgtgtagtgtgcaacttttcaaaatctatggagaaccaaaaccacctatgcaagaagacataacttacatgtctacattggggccatttccgaaatgggcctcgacagagaatagaatagcctaatcaattcagttggttatttcttatctagaagcaaaagagaaattgctaatgctatttttacccgttttgtctttatcctttccgcgtccgacgagtgcgcggcggccggtgatgactggtcgcgacaggtgtgccgcgggccccgcggtgccgtgccgtgtggatcagtcccgatccttctcccgccttcggccttccccgcgcgcgcgcgcacgcaccagcaccaccgcgatataaagcccgccaccaatccgctcgtggtcgtcgtcatcatcccgattcccgacacgcttgtgttgtcgcgattggcaagctcggcggctcgtggcagcgggaacttacgaggcgaaggagagcgagggcgaccgcgcggatcgcatcgcagctctgggcggaggtggggccttgcgcggagatgctagcggtgttcgatcgggcggtggcgccgagcccggaggggctgcggcagccgggcgccgcggggggcggctgcgcggcgggcctcgcggaccggttcagagaggcgcggcccgacgcggtcaccgtcaaccttggcgggtccggcgccctggcgtactcctcgagcaaccagaaccccctcctccccaggttgtttggcgcggtggacggcgtattctgcatgttccagggaacaattgcgaacgttgctgtgctgaagcagcagtatgggttgagcaaaggcgctaatgaggtcagcatcatcatcgaggcttacaggaccttgagggacaggggcccttatcctgcagatcaggttgtgagggacataagtgggaaatttgcatttgtcctgtatgattgctccactaagtcggtcttcatggctgctgtaagtgaactactcctatgttgtaccaaattgtttttttttggctattctcattattaacatcttatgagcagacattttgtcaataaattagtcagtgactcagtggtgttgtccttttaaaaaggattgtgcatagtggtgttctggttgctctatgtggatgagaactcaaatcatcttgggatgcacatagaatcggcatcatatatagtagacaactaaaggttttgcttaaggtcgaagtggcaatgccattttttcagcagactattggatcatagtggtgctagtgcagaactggcagcataaaatcgaatcaaattcccgctaattgggattatgacacctatctagtgagtagtgatgtcacttttttttcaagtaaaaaaaaatgagaccttcacttctagactagtctagagaccccagcctattctgttcgtgtgatcagcatcatctatgtgacatttatcaatgttttgagtttccaccttcaacaagaacagcaacatcactatctacctgcatttcactaaattggctggttcttgacgatgcttctgcctaacattttcatgtcatcgtcctacatttacaaagaacagatgcagctgttcagttattcccgaagacatatatctgatcacaggctactgctacgacgtacaatggtaccactggtattgaccggcaactgataggtagctcagctcgtgttcgtaacctcataacaggacaccgatggaaatgttccgttctactggggcgtggacaccgacgggcgtcttgtggtctctgacgacgccgaactcgtgaagagtgcctgtgggaaatcctgtgccccgttccccaaaggcttcttcttcacgacgtccggagggctgaggagctacgagcaccccatgcacgaggtgaagccggtgccgagggtggacagcaagggcgaggtgtgcggcacgacgtacacggtcgacgcaagcgccaggaaggagaccaccatcccaagggtcggcagcgccgccgactggtcttcgcagtactaaaattcgttatctttctctgtgtgtgttgaacgggttcgagcgcaggtagcagggcgtcgcacgggcgtggcccgtgtttgttcgcatggaaaccctagctgtctggtgtttatctgaatgaatagactgttctctatgaatcaacacggatttctctctaagttcacatgatttccgttgctgctttgctgcacgcctgtactgtaacaagaattactgcctttgttatcaggaaataagttcacatgatttcctgtctgcagatgcgctgccagtcgagcatccttgaggaaggatagggataaggcagtaccggctagtagaagaagcaatgaagcatgacacgggcgttactgtgcgcaaatagtgccggaactcgaatcacgcaaccgtgtgccactgccacaggcgttcgctgtgcctgcacattcccccttgatcggcttgggggcctggtagttggcaccaataatctgccgtgtatatatgggctgtctgggctgggctgggctgccactgccgtggacgggatctgttgcgacagggaaagaggccgaccagcagcccattccttttgtatgtatctcaccgtctcttcccggcaggcataggggacgcacgatggcgtcacccacttctcttgctgttgctcccatcccatccgccgacaacgtggcgtcggatcctgagacggacgttccagatctgcgcataacatatgagccccagcccccaggagaggacttccggcgcggctag

SEQ ID NO: 5603 - DNA, 4185 bp, Zea Mays
ttgtgcagaagtaatcaaagcaagggcttcagaaaggtggatcctgacagatgggaatttgctaatgaggagtttctgagaggtcagaggcacctcctcaaaaacattaggcgtcggaaacctccacactcatctccaaatcaacaatctcttggctcttacctcgaggtaggacactttggatatgaagaagagattgatcagctgaagagggataaacagctcttgatggctgaggtagtgaagctgaggcaggagcaccaaaatactagatcagatctacaggccatggaagagaaattacaagataccgagcagaagcagcagcagatgatggcattcatggcacgcgtcatgcagaaccctgatttcatgcgtcagctgatctcccagcgggagatgaggaaggagctcgaggatgccatctcgaagaagagaaggcgccgcattgaccagggacatgaagctggtagcatgggcactggttctagcctggagcaagggccacagggagtgtttgaaccgcaggagccggtggaatcactcgccaacggtgtgccatctgatctggagagttcgtctgttgaggcgaagggattggaggttcgacagggtgtttcttcaggtggttctgagcatctgaatggcaggccaagcggagagttaaatgatgatttctgggaggaccttctgcacgaggggggacttggtgcagatgcaggcaatgctgttggtcaggatgatatgaacatggacatggacccagatgttagcctgcctcaactgaaacaacatggacccagacattagccgctcttgtgctatcacaatggctgtgactctgtgagtatctttacagttatgctcgttatacccctgtggtgtacctgtttcgatcgtcttcgaccaaatgtcacgtcgactgcagtctccagttgttaatacagtctgttcagcacgctgatttaagtatttgggtcaagatgttcatataatcctgtggtatccagagatattatagtttgttttcgtaactgtttgcgcagagaccatgctatgttgcctgcaggctatcagtgtatttgttctaacagatcgcaacgctggtacaacgcagtgacctgccagactgggccactatgagattgtagggaaagaccagatagcttgtgtatgtaaaagctgatccatagtagcctatcatgtgcaacgctattgccctttgggatttggcatttcactgtatataacatatcatcgccgtattgccgcatccatcgttgtcttggtttacccatttaagtttgttgtcttcccttttagcttacacatgtaccggctcggtcagtgcccgaggatctatttgcgtgcaaaagtgttcttttttcaatttctgaaatctagaggcttctgtcttcttattctgtttgatgctacttttccctcgagggaattgtctcatgctagcagtcccttcgaccgaccctacgttcatcatgcaaacttgaatggtttttattcatcaaactttgaagtggtactactgtggtggtgtttggttcatgcctcgttcttagaatctcattattagccaaacagattctggatgttatattggatttgccagaatctcacaatatcaacaaaagttgataatataatttgtattggattttgtgtagtgtgcaacttttcaaaatctatggagaaccaaaaccacctatgcaagaagacataacttacatgtctacattggggccatttccgaaatgggcctcgacagagaatagaatagcctaatcaattcagttggttatttcttatctagaagcaaaagagaaattgctaatgctatttttacccgttttgtctttatcctttccgcgtccgacgagtgcgcggcggccggtgatgactggtcgcgacaggtgtgccgcgggccccgcggtgccgtgccgtgtggatcagtcccgatccttctcccgccttcggccttccccgcgcgcgcgcgcacgcaccagcaccaccgcgatataaagcccgccaccaatccgctcgtggtcgtcgtcatcatcccgattcccgacacgcttgtgttgtcgcgattggcaagctcggcggctcgtggcagcgggaacttacgaggcgaaggagagcgagggcgaccgcgcggatcgcatcgcagctctgggcggaggtggggccttgcgcggagatgctagcggtgttcgatcgggcggtggcgccgagcccggaggggctgcggcagccgggcgccgcggggggcggctgcgcggcgggcctcgcggaccggttcagagaggcgcggcccgacgcggtcaccgtcaaccttggcgggtccggcgccctggcgtactcctcgagcaaccagaaccccctcctccccaggttgtttggcgcggtggacggcgtattctgcatgttccagggaacaattgcgaacgttgctgtgctgaagcagcagtatgggttgagcaaaggcgctaatgaggtcagcatcatcatcgaggcttacaggaccttgagggacaggggcccttatcctgcagatcaggttgtgagggacataagtgggaaatttgcatttgtcctgtatgattgctccactaagtcggtcttcatggctgctgtaagtgaactactcctatgttgtaccaaattgtttttttttggctattctcattattaacatcttatgagcagacattttgtcaataaattagtcagtgactcagtggtgttgtccttttaaaaaggattgtgcatagtggtgttctggttgctctatgtggatgagaactcaaatcatcttgggatgcacatagaatcggcatcatatatagtagacaactaaaggttttgcttaaggtcgaagtggcaatgccattttttcagcagactattggatcatagtggtgctagtgcagaactggcagcataaaatcgaatcaaattcccgctaattgggattatgacacctatctagtgagtagtgatgtcacttttttttcaagtaaaaaaaaatgagaccttcacttctagactagtctagagaccccagcctattctgttcgtgtgatcagcatcatctatgtgacatttatcaatgttttgagtttccaccttcaacaagaacagcaacatcactatctacctgcatttcactaaattggctggttcttgacgatgcttctgcctaacattttcatgtcatcgtcctacatttacaaagaacagatgcagctgttcagttattcccgaagacatatatctgatcacaggctactgctacgacgtacaatggtaccactggtattgaccggcaactgataggtagctcagctcgtgttcgtaacctcataacaggacaccgatggaaatgttccgttctactggggcgtggacaccgacgggcgtcttgtggtctctgacgacgccgaactcgtgaagagtgcctgtgggaaatcctgtgccccgttccccaaaggcttcttcttcacgacgtccggagggctgaggagctacgagcaccccatgcacgaggtgaagccggtgccgagggtggacagcaagggcgaggtgtgcggcacgacgtacacggtcgacgcaagcgccaggaaggagaccaccatcccaagggtcggcagcgccgccgactggtcttcgcaatgcgctgccagtcgagcatccttgaggaaggatagggataaggcagtaccggctagtagaagaagcaatgaagcatgacacgggcgttactgtgcgcaaatagtgccggaactcgaatcacgcaaccgtgtgccactgccacaggcgttcgctgtgcctgcacattcccccttgatcggcttgggggcctggtagttggcaccaataatctgccgtgtatatatgggctgtctgggctgggctgggctgccactgccgtggacgggatctgttgcgacagggaaagaggccgaccagcagcccattccttttgtatgtatctcaccgtctcttcccggcaggcataggggacgcacgatggcgtcacccacttctcttgctgttgctcccatcccatccgccgacaacgtggcgtcggatcctgagacggacgttccagatctgcgcataacatatgagccccagcccccaggagaggacttccggcgcggctag

SEQ ID NO: 5604 - DNA, 2339 bp, Zea Mays
tgaagaagaatattggcaaatatgttttataactgaaacatgttgtgagctgcaattggtgaaagataaataatttatatttttcatacgacccctcttcattttggtaatttatccaatctgaaatgatttcagcagttaattcttcctcaatgaaaaatggcgattgatatttctggtgactggattagcggattatttggtttggcagggcttcagaaaggtggatcctgacagatgggaatttgctaatgaggagtttctgagaggtcagaggcacctcctcaaaaacattaggcgtcggaaacctccacactcatctccaaatcaacaatctcttggctcttacctcgaggtaggacactttggatatgaagaagagattgatcagctgaagagggataaacagctcttgatggctgaggtagtgaagctgaggcaggagcaccaaaatactagatcagatctacaggccatggaagagaaattacaagataccgagcagaagcagcagcagatgatggcattcatggcacgcgtcatgcagaaccctgatttcatgcgtcagctgatctcccagcgggagatgaggaaggagctcgaggatgccatctcgaagaagagaaggcgccgcattgaccagggacatgaagctggtagcatgggcactggttctagcctggagcaagggccacagggagtgtttgaaccgcaggagccggtggaatcactcgccaacggtgtgccatctgatctggagagttcgtctgttgaggcgaagggattggaggttcgacagggtgtttcttcaggtggttctgagcatctgaatggcaggccaagcggagagttaaatgatgatttctgggaggaccttctgcacgaggggggacttggtgcagatgcaggcaatgctgttggtcaggatgatatgaacatggacatggacccagatgttagcctgcctcaactgaaacaacatggacccagacattagccgctcttgtgctatcacaatggctgtgactctgttgtttggcgcggtggacggcgtattctgcatgttccagggaacaattgcgaacgttgctgtgctgaagcagcagtatgggttgagcaaaggcgctaatgaggtcagcatcatcatcgaggcttacaggaccttgagggacaggggcccttatcctgcagatcaggttgtgagggacataagtgggaaatttgcatttgtcctgtatgattgctccactaagtcggtcttcatggctgctgacaccgatggaaatgttccgttctactggggcgtggacaccgacgggcgtcttgtggtctctgacgacgccgaactcgtgaagagtgcctgtgggaaatcctgtgccccgttccccaaaggcttcttcttcacgacgtccggagggctgaggagctacgagcaccccatgcacgaggtgaagccggtgccgagggtggacagcaagggcgaggtgtgcggcacgacgtacacggtcgacgcaagcgccaggaaggagaccaccatcccaagggtcggcagcgccgccgactggtcttcgcagtactaaaattcgttatctttctctgtgtgtgttgaacgggttcgagcgcaggtagcagggcgtcgcacgggcgtggcccgtgtttgttcgcatggaaaccctagctgtctggtgtttatctgaatgaatagactgttctctatgaatcaacacggatttctctctaagttcacatgatttccgttgctgctttgctgcacgcctgtactgtaacaagaattactgcctttgttatcaggaaataagttcacatgatttcctgtctgcagatgcgctgccagtcgagcatccttgaggaaggatagggataaggcagtaccggctagtagaagaagcaatgaagcatgacacgggcgttactgtgcgcaaatagtgccggaactcgaatcacgcaaccgtgtgccactgccacaggcgttcgctgtgcctgcacattcccccttgatcggcttgggggcctggtagttggcaccaataatctgccgtgtatatatgggctgtctgggctgggctgggctgccactgccgtggacgggatctgttgcgacagggaaagaggccgaccagcagcccattccttttgtatgtatctcaccgtctcttcccggcaggcataggggacgcacgatggcgtcacccacttctcttgctgttgctcccatcccatccgccgacaacgtggcgtcggatcctgagacggacgttccagatctgcgcataacatatgagccccagcccccaggagaggacttccggcgcggctag

SEQ ID NO: 5605 - DNA, 2228 bp, Zea Mays
ggggcagcaacaggccaacggcgtgaagttgtgaactggtgatgcttttgttggcttttcgtccatgcgtaccaactaccacggcatggcagtatgagtagatccgagaatctgacaatccaagcgtcctgcactcctgctccacctcgattcctccacagcacactcccaaaaccagagccacgccggccggcacaccgtcgcctcctttgactagcctcgccgccgcagcgacagccatggccaccgctgcccgctccctccacctccctggtccgacgcctcctaaatcctctaccccctcctcccaccgcctccctgtcccttgccacctccgcccccaacgccgccgcctggccgcctcgtcctccgacctcacctccttccccgaaccgccccccgccaccgaggcggagctgcgggagaacgggttccggagcacgcgccgcaccaagctcgtctgcaccgtgggccccgccacctgcggcgccgccgagctcgaggcgctcgccgtcggcggcatgaacgtcgcgcgggtcaacatgtgccacggcgaccgcgagtggcaccgcgaagtcatccgcgctgtccggaggctcaacgacgagaaagggttcgcggtcgccgtgatgatggacaccgagggcagcgagatccacatgggcgaccttggcggagcgccctccgcgaaggccgaggatggagaagtttggacatttagcgttagatcttctgacacgtcgctcccagatcgaatcattcatgtgaactatgatggctttgctgaagatgtcaaagctggtgatgaactatttgcggacggtggaatggccaggtttgaggtgattgaaaagttagggccagatgtgaagtgccgctgcactgatcctggtctgttgctgccacgggctaatcttactatatggcgcgatggcagtgtagtgcgagagaggaacgctatgcttcctacaatttcgtcgaaggattggattgacatagattttggaattgctgaaggtgttgatttcatcgccgtgtcatttgtcaagtctgctgaagtaattaatcatttgaagagttacattgctgcgaggagccgtggaaggggtcattgcaaagattgagagcatcgatgctttgaagaacctggaggagattatccgtgcatcagatggagtaatggtagccagaggggacttgggggcacaaatccccctggaacaggtcccttccatacagcaaagaatagttagaatgtgcagacagctcaacaagccagtcattgttgcttctcagcttctggaatcaatgatcgagtatcctacacctactagggctgaggttgctgatgtttctgaggcagtccgccagcgtgcagatgctctcatgctttctggtgagtcggccatggggaggtacccagagaaggctctcagcgtccttaggagtgttagcctgaggatcgaaaggtggtggagagaggagaagcgccaagaggcactggagcttcaaggtgtctcgtcttccttttctgacaagatatcagaggaaatatgcaattcagcagctaaaatggccaacaacttaggagtcgacgccgttttcgtttacacgaaggatggctacatgggctccctgctctcacgatgccgccccgactgcccgatcttcgccttcacgtcttcgacgtctgtcaggagacggctgaacctccagtggggcctcatcccgttccggctgagcgagtccgacgacatggagagcaacctcaaccgcaccttctccctgctgaaggccaggggcatggtgcagtctggagacctggtgatcgcgctctccgacatgctgcagtccatccaagtggtgaatgtgccctaggaatacgatccccatgtccagctggttccttgacctggaatgtagcatacaattaggaggggcttctttttttgtttgtttgtttgtcatttgagtgtatcccagttcgtagcatgtttctgcctcatgttgaggctctctggatgtcgatattgatttgcgtcagtgtggtttaggttcggactcgaatgctcgatttgaaaattcgaacagaactcggtttgcatcagtgtcatgattaactcaaaccattgttctgtactatatcagaacgtgttactacttatcttagtgtcattcctcagtttcacttggttttttttaaaaaaaatattgggaaaaatgtgccc

SEQ ID NO: 5606 - DNA, 2190 bp, Zea Mays
ggggcagcaacaggccaacggcgtgaagttgtgaactggtgatgcttttgttggcttttcgtccatgcgtaccaactaccacggcatggcagtatgagtagatccgagaatctgacaatccaagcgtcctgcactcctgctccacctcgattcctccacagcacactcccaaaaccagagccacgccggccggcacaccgtcgcctcctttgactagcctcgccgccgcagcgacagccatggccaccgctgcccgctccctccacctccctggtccgacgcctcctaaatcctctaccccctcctcccaccgcctccctgtcccttgccacctccgcccccaacgccgccgcctggccgcctcgtcctccgacctcacctccttccccgaaccgccccccgccaccgaggcggagctgcgggagaacgggttccggagcacgcgccgcaccaagctcgtctgcaccgtgggccccgccacctgcggcgccgccgagctcgaggcgctcgccgtcggcggcatgaacgtcgcgcgggtcaacatgtgccacggcgaccgcgagtggcaccgcgaagtcatccgcgctgtccggaggctcaacgacgagaaagggttcgcggtcgccgtgatgatggacaccgagggcagcgagatccacatgggcgaccttggcggagcgccctccgcgaaggccgaggatggagaagtttggacatttagcgttagatcttctgacacgtcgctcccagatcgaatcattcatgtgaactatgatggctttgctgaaggtttgaggtgattgaaaagttagggccagatgtgaagtgccgctgcactgatcctggtctgttgctgccacgggctaatcttactatatggcgcgatggcagtgtagtgcgagagaggaacgctatgcttcctacaatttcgtcgaaggattggattgacatagattttggaattgctgaaggtgttgatttcatcgccgtgtcatttgtcaagtctgctgaagtaattaatcatttgaagagttacattgctgcgaggagccgtggaagtgatataggggtcattgcaaagattgagagcatcgatgctttgaagaacctggaggagattatccgtgcatcagatggagtaatggtagccagaggggacttgggggcacaaatccccctggaacaggtcccttccatacagcaaagaatagttagaatgtgcagacagctcaacaagccagtcattgttgcttctcagcttctggaatcaatgatcgagtatcctacacctactagggctgaggttgctgatgtttctgaggcagtccgccagcgtgcagatgctctcatgctttctggtgagtcggccatggggaggtacccagagaaggctctcagcgtccttaggagtgttagcctgaggatcgaaaggtggtggagagaggagaagcgccaagaggcactggagcttcaaggtgtctcgtcttccttttctgacaagatatcagaggaaatatgcaattcagcagctaaaatggccaacaacttaggagtcgacgccgttttcgtttacacgaaggatggctacatgggctccctgctctcacgatgccgccccgactgcccgatcttcgccttcacgtcttcgacgtctgtcaggagacggctgaacctccagtggggcctcatcccgttccggctgagcgagtccgacgacatggagagcaacctcaaccgcaccttctccctgctgaaggccaggggcatggtgcagtctggagacctggtgatcgcgctctccgacatgctgcagtccatccaagtggtgaatgtgccctaggaatacgatccccatgtccagctggttccttgacctggaatgtagcatacaattaggaggggcttctttttttgtttgtttgtttgtcatttgagtgtatcccagttcgtagcatgtttctgcctcatgttgaggctctctggatgtcgatattgatttgcgtcagtgtggtttaggttcggactcgaatgctcgatttgaaaattcgaacagaactcggtttgcatcagtgtcatgattaactcaaaccattgttctgtactatatcagaacgtgttactacttatcttagtgtcattcctcagtttcacttggttttttttaaaaaaaatattgggaaaaatgtgccc

SEQ ID NO: 5607 - DNA, 1669 bp, Zea Mays
cctcagcttcatctcgttccttcgccatcctagattcattccatgcttaaacactgaatgatgtgcggctgacacactgattcgtcgttcgtccgcatctggcgagatctcgcgtggactacctcacgaaggatggagaagtttggacatttagcgttagatcttctgacacgtcgctcccagatcgaatcattcatgtgaactatgatggctttgctgaagatgtcaaagctggtgatgaactatttgcggacggtggaatggccaggtttgaggtgattgaaaagttagggccagatgtgaagtgccgctgcactgatcctggtctgttgctgccacgggctaatcttactatatggcgcgatggcagtgtagtgcgagagaggaacgctatgcttcctacaatttcgtcgaaggattggattgacatagattttggaattgctgaaggtgttgatttcatcgccgtgtcatttgtcaagtctgctgaagtaattaatcatttgaagagttacattgctgcgaggagccgtggaagtgatataggggtcattgcaaagattgagagcatcgatgctttgaagaacctggaggagattatccgtgcatcagatggagtaatggtagccagaggggacttgggggcacaaatccccctggaacaggtcccttccatacagcaaagaatagttagaatgtgcagacagctcaacaagccagtcattgttgcttctcagcttctggaatcaatgatcgagtatcctacacctactagggctgaggttgctgatgtttctgaggcagtccgccagcgtgcagatgctctcatgctttctggtgagtcggccatggggaggtacccagagaaggctctcagcgtccttaggagtgttagcctgaggatcgaaaggtggtggagagaggagaagcgccaagaggcactggagcttcaaggtgtctcgtcttccttttctgacaagatatcagaggaaatatgcaattcagcagctaaaatggccaacaacttaggagtcgacgccgttttcgtttacacgaaggatggctacatgggctccctgctctcacgatgccgccccgactgcccgatcttcgccttcacgtcttcgacgtctgtcaggagacggctgaacctccagtggggcctcatcccgttccggctgagcgagtccgacgacatggagagcaacctcaaccgcaccttctccctgctgaaggccaggggcatggtgcagtctggagacctggtgatcgcgctctccgacatgctgcagtccatccaagtggtgaatgtgccctaggaatacgatccccatgtccagctggttccttgacctggaatgtagcatacaattaggaggggcttctttttttgtttgtttgtttgtcatttgagtgtatcccagttcgtagcatgtttctgcctcatgttgaggctctctggatgtcgatattgatttgcgtcagtgtggtttaggttcggactcgaatgctcgatttgaaaattcgaacagaactcggtttgcatcagtgtcatgattaactcaaaccattgttctgtactatatcagaacgtgttactacttatcttagtgtcattcctcagtttcacttggttttttttaaaaaaaatattgggaaaaatgtgccc

SEQ ID NO: 5608 - DNA, 1660 bp, Zea Mays
ctcagcttcatctcgttccttcgccatcctagattcattccatgcttaaacactgaatgatgtgcggctgacacactgattcgtcgttcgtccgcatctggcgagatctcgcgtggactacctcacgaaggatggagaagtttggacatttagcgttagatcttctgacacgtcgctcccagatcgaatcattcatgtgaactatgatggctttgctgaagatgtcaaagctggtgatgaactatttgcggacggtggaatggccaggtttgaggtgattgaaaagttagggccagatgtgaagtgccgctgcactgatcctggtctgttgctgccacgggctaatcttactatatggcgcgatggcagtgtagtgcgagagaggaacgctatgcttcctacaatttcgtcgaaggattggattgacatagattttggaattgctgaaggtgttgatttcatcgccgtgtcatttgtcaagtctgctgaagtaattaatcatttgaagagttacattgctgcgaggagccgtggaaggggtcattgcaaagattgagagcatcgatgctttgaagaacctggaggagattatccgtgcatcagatggagtaatggtagccagaggggacttgggggcacaaatccccctggaacaggtcccttccatacagcaaagaatagttagaatgtgcagacagctcaacaagccagtcattgttgcttctcagcttctggaatcaatgatcgagtatcctacacctactagggctgaggttgctgatgtttctgaggcagtccgccagcgtgcagatgctctcatgctttctggtgagtcggccatggggaggtacccagagaaggctctcagcgtccttaggagtgttagcctgaggatcgaaaggtggtggagagaggagaagcgccaagaggcactggagcttcaaggtgtctcgtcttccttttctgacaagatatcagaggaaatatgcaattcagcagctaaaatggccaacaacttaggagtcgacgccgttttcgtttacacgaaggatggctacatgggctccctgctctcacgatgccgccccgactgcccgatcttcgccttcacgtcttcgacgtctgtcaggagacggctgaacctccagtggggcctcatcccgttccggctgagcgagtccgacgacatggagagcaacctcaaccgcaccttctccctgctgaaggccaggggcatggtgcagtctggagacctggtgatcgcgctctccgacatgctgcagtccatccaagtggtgaatgtgccctaggaatacgatccccatgtccagctggttccttgacctggaatgtagcatacaattaggaggggcttctttttttgtttgtttgtttgtcatttgagtgtatcccagttcgtagcatgtttctgcctcatgttgaggctctctggatgtcgatattgatttgcgtcagtgtggtttaggttcggactcgaatgctcgatttgaaaattcgaacagaactcggtttgcatcagtgtcatgattaactcaaaccattgttctgtactatatcagaacgtgttactacttatcttagtgtcattcctcagtttcacttggttttttttaaaaaaaatattgggaaaaatgtgccc

SEQ ID NO: 5609 - DNA, 2606 bp, Zea Mays
ccgtgctcccccgaatttttttcctctccccttccgagttccgacctcgtcgccccgcggctccagctcttcccgttcattccctcgcgccgaagcaactccggaatccgcctgcgcgccaaaaccctagccccagatcccgcgccgcgccgcgccgcccggtgcccagtcggcggcgcccgcgccggccattgccgctcgccgcattgggggcgcttacggcgtctcctccgctcccgaagcagagatctgggccgaggagacctggttgttcgtgggcggtgcaggggatggggcgcgggcggtgggcctcggggatccgcgcggcggcgctggtcctgctcgcggtcgcggctgccgccggagccgccgcgggggatcctgatcccgacgagctcgagcgcgcgtttccaatagtggagccagaccacgggcacacaaaacttcgtctctcagaacaaggtctagaagcaattcgaaggattgaaactcctattgctgttgttggtgtcattggtccatatcgatctggaaaatcttttctcctcaaccagcttctctccttatcttgtgataaaggttttggagttggtcatatgcgagatactaaaactaaaggtatttggatttggggtactcctgttgagatggatgttgatggttccaaagtttctgtcatttatctagacactgaaggatttgaaagtgttgggaaatcaaatgtgtatgatgataggatatttgctttggcaactgtcctaagttcggtgcttatctacaaccttcctgagacggtacgtgaagctgatatatctaggctttcatttgccattgaaattgctgaagaattctatggaaggtttgttcatgggcaagatgttgcttttgagccagcaaagcttctctggcttatccagagggatttcctccaaggaaaatctgttcaacaaatggtcaatgaagcccttcaacgggtgcctaatgataatggtgacaaatatattgatgaggtgtagtttgtgtatgaaattgaaatctagtaatatacacttttgaaccaaaagttgttagttctaagctctgttacaaattctttctgtatttttaggtcaatcaaatacgagattcgttggcagttatggggaacaacagcactgcttttagcttgcctcagccgcatcttcaaagaacaaaattatgtgatatggaggacaaagaacttgaacccttatatgtaaaacggcgggagcaattaaagcagcttgtttcgtctattgtaaaaccaaaaattgtgcagggcagaactctaaatgggaaggactttgtgtctttcttgcagcagattcttgaggctttgaataaaggcgaaattccatcaacagggtctctagttgaaatttttaacaaagccattcttgatcgctgtctgaaggcgtacagggagaaaatggatggcttaggcttaccagtaccggtagacaaactgcagaaacttcatgagatggcaaatggtgatgctagaattctctttgataagcagcactttggcaaacatcatgctgctcagtcagctctcaagcttgaagatgatattaaaaaggctttactcactgcaaccaaagtttcgtaaaggaatgcgttggacctgcaaaagaaagctatgaacgtagaatgtcaaagatgcttgccaagtctcgtgctcttttcatcaaggagtacaataacaagcttttcaattggttggtgaccttctctttggtcatggtggtcatcgggcgctttgtcatcaagttcttcctacttgaaatcgccgcttgggtgatgttcatcttcctagagacgtacacgagaatgttctggtcagcggaatcgctgtactataatccagcttggcacatcattgtttcttcctgggaaaccatcgtgtacagcccaattcttgatctggacagatgggccgtcccaattgtcataatgctattatttggggttctttactggagatgcttcggtggtagaaggaagcggggaaggggttcgctcctcccattgtacaagaattcttataactcgagtcgtcgctcgagatcagactagttatacacgcaatgttgaagttattttcttttaaagaatggtacaaaatatctgcctgtagaagaggctaaactgccgaatgtggatcatctgcaagtgcttttggatgggcatgttttgaattttgatggtgccctgccaatgtatctccaattctttttggtggatgaagagaggcggtgaagctgctagtatgggggcggggcacctgcacaaagcctctgttgtaattcgtaccggggtactttttgtgtagctaggttatccttacatgtcacggtcccaattgattgattattgtttacgtccactgcaattttttttggcaagaattttgttttttaacgtcatagatagaaggtagctgttagagcgtgtaccgtgtcaatcatatgttaaaagttataatctggtggtggaatttggaaacgttccttgtttatactgttgttatacagtttatatccacatatatgctatacttctggctaggagctgtgttgtgttta

SEQ ID NO: 5610 - DNA, 2780 bp, Zea Mays
ccgtgctcccccgaatttttttcctctccccttccgagttccgacctcgtcgccccgcggctccagctcttcccgttcattccctcgcgccgaagcaactccggaatccgcctgcgcgccaaaaccctagccccagatcccgcgccgcgccgcgccgcccggtgcccagtcggcggcgcccgcgccggccattgccgctcgccgcattgggggcgcttacggcgtctcctccgctcccgaagcagagatctgggccgaggagacctggttgttcgtgggcggtgcaggggatggggcgcgggcggtgggcctcggggatccgcgcggcggcgctggtcctgctcgcggtcgcggctgccgccggagccgccgcgggggatcctgatcccgacgagctcgagcgcgcgtttccaatagtggagccagaccacgggcacacaaaacttcgtctctcagaacaaggtctagaagcaattcgaaggattgaaactcctattgctgttgttggtgtcattggtccatatcgatctggaaaatcttttctcctcaaccagcttctctccttatcttgtgataaaggttttggagttggtcatatgcgagatactaaaactaaaggtatttggatttggggtactcctgttgagatggatgttgatggttccaaagtttctgtcatttatctagacactgaaggatttgaaagtgttgggaaatcaaatgtgtatgatgataggatatttgctttggcaactgtcctaagttcggtgcttatctacaaccttcctgagacggtgcccccccctcccaccttctctcccctcaatggctgtcgcttggttaatttcattgtgggccattgcaggtacgtgaagctgatatatctaggctttcatttgccattgaaattgctgaagaattctatggaagagtgaaggtaacactgcatttgcgtgacttataagcctgcaataggaacatggatagttttttaatggaaatgcttgtttcttcaggggcaagatgttgcttttgagccagcaaagcttctctggcttatccagagggatttcctccaaggaaaatctgttcaacaaatggtcaatgaagcccttcaacgggtgcctaatgataatggtgacaaatatattgatgaggtcaatcaaatacgagattcgttggcagttatggggaacaacagcactgcttttagcttgcctcagccgcatcttcaaagaacaaaattatgtgatatggaggacaaagaacttgaacccttatatgtaaaacggcgggagcaattaaagcagcttgtttcgtctattgtaaaaccaaaaattgtgcagggcagaactctaaatgggaaggactttgtgtctttcttgcagcagattcttgaggctttgaataaaggcgaaattccatcaacagggtctctagttgaaatttttaacaaagccattcttgatcgctgtctgaaggcgtacagggagaaaatggatggcttaggcttaccagtaccggtagacaaactgcagaaacttcatgagatggcaaatggtgatgctagaattctctttgataagcagcactttggcaaacatcatgctgctcagtcagctctcaagcttgaagatgatattaaaaagaaacttacttctagctaatgaatatcaatcgtcaaagctgtgtgaagctcgcttttctgagtgtgaagataagatggatcaccttcaagtcttgaaacttccttcgatggcaaaattcaatgcaggctttactcactgcaaccaaagtttcgtaaaggaatgcgttggacctgcaaaagaaagctatgaacgtagaatgtcaaagatgcttgccaagtctcgtgctcttttcatcaaggagtacaataacaagcttttcaattggttggtgaccttctctttggtcatggtggtcatcgggcgctttgtcatcaagttcttcctacttgaaatcgccgcttgggtgatgttcatcttcctagagacgtacacgagaatgttctggtcagcggaatcgctgtactataatccagcttggcacatcattgtttcttcctgggaaaccatcgtgtacagcccaattcttgatctggacagatgggccgtcccaattgtcataatgctattatttggggttctttactggagatgcttcggtggtagaaggaagcggggaaggggttcgctcctcccattgtacaagaattcttataactcgagtcgtcgctcgagatcagactagttatacacgcaatgttgaagttattttcttttaaagaatggtacaaaatatctgcctgtagaagaggctaaactgccgaatgtggatcatctgcaagtgcttttggatgggcatgttttgaattttgatggtgccctgccaatgtatctccaattctttttggtggatgaagagaggcggtgaagctgctagtatgggggcggggcacctgcacaaagcctctgttgtaattcgtaccggggtactttttgtgtagctaggttatccttacatgtcacggtcccaattgattgattattgtttacgtccactgcaattttttttggcaagaattttgttttttaacgtcatagatagaaggtagctgttagagcgtgtaccgtgtcaatcatatgttaaaagttataatctggtggtggaatttggaaacgttccttgtttatactgttgttatacagtttatatccacatatatgctatacttctggctaggagctgtgttgtgttta

SEQ ID NO: 5611 - DNA, 2629 bp, Zea Mays
ccgtgctcccccgaatttttttcctctccccttccgagttccgacctcgtcgccccgcggctccagctcttcccgttcattccctcgcgccgaagcaactccggaatccgcctgcgcgccaaaaccctagccccagatcccgcgccgcgccgcgccgcccggtgcccagtcggcggcgcccgcgccggccattgccgctcgccgcattgggggcgcttacggcgtctcctccgctcccgaagcagagatctgggccgaggagacctggttgttcgtgggcggtgcaggggatggggcgcgggcggtgggcctcggggatccgcgcggcggcgctggtcctgctcgcggtcgcggctgccgccggagccgccgcgggggatcctgatcccgacgagctcgagcgcgcgtttccaatagtggagccagaccacgggcacacaaaacttcgtctctcagaacaaggtctagaagcaattcgaaggattgaaactcctattgctgttgttggtgtcattggtccatatcgatctggaaaatcttttctcctcaaccagcttctctccttatcttgtgataaaggttttggagttggtcatatgcgagatactaaaactaaaggtatttggatttggggtactcctgttgagatggatgttgatggttccaaagtttctgtcatttatctagacactgaaggatttgaaagtgttgggaaatcaaatgtgtatgatgataggatatttgctttggcaactgtcctaagttcggtgcttatctacaaccttcctgagacggtgcccccccctcccaccttctctcccctcaatggctgtcgcttggttaatttcattgtgggccattgcaggggcaagatgttgcttttgagccagcaaagcttctctggcttatccagagggatttcctccaaggaaaatctgttcaacaaatggtcaatgaagcccttcaacgggtgcctaatgataatggtgacaaatatattgatgaggtcaatcaaatacgagattcgttggcagttatggggaacaacagcactgcttttagcttgcctcagccgcatcttcaaagaacaaaattatgtgatatggaggacaaagaacttgaacccttatatgtaaaacggcgggagcaattaaagcagcttgtttcgtctattgtaaaaccaaaaattgtgcagggcagaactctaaatgggaaggactttgtgtctttcttgcagcagattcttgaggctttgaataaaggcgaaattccatcaacagggtctctagttgaaatttttaacaaagccattcttgatcgctgtctgaaggcgtacagggagaaaatggatggcttaggcttaccagtaccggtagacaaactgcagaaacttcatgagatggcaaatggtgatgctagaattctctttgataagcagcactttggcaaacatcatgctgctcagtcagctctcaagcttgaagatgatattaaaaagaaacttacttctagctaatgaatatcaatcgtcaaagctgtgtgaagctcgcttttctgagtgtgaagataagatggatcaccttcaagtcttgaaacttccttcgatggcaaaattcaatgcaggctttactcactgcaaccaaagtttcgtaaaggaatgcgttggacctgcaaaagaaagctatgaacgtagaatgtcaaagatgcttgccaagtctcgtgctcttttcatcaaggagtacaataacaagcttttcaattggttggtgaccttctctttggtcatggtggtcatcgggcgctttgtcatcaagttcttcctacttgaaatcgccgcttgggtgatgttcatcttcctagagacgtacacgagaatgttctggtcagcggaatcgctgtactataatccagcttggcacatcattgtttcttcctgggaaaccatcgtgtacagcccaattcttgatctggacagatgggccgtcccaattgtcataatgctattatttggggttctttactggagatgcttcggtggtagaaggaagcggggaaggggttcgctcctcccattgtacaagaattcttataactcgagtcgtcgctcgagatcagactagttatacacgcaatgttgaagttattttcttttaaagaatggtacaaaatatctgcctgtagaagaggctaaactgccgaatgtggatcatctgcaagtgcttttggatgggcatgttttgaattttgatggtgccctgccaatgtatctccaattctttttggtggatgaagagaggcggtgaagctgctagtatgggggcggggcacctgcacaaagcctctgttgtaattcgtaccggggtactttttgtgtagctaggttatccttacatgtcacggtcccaattgattgattattgtttacgtccactgcaattttttttggcaagaattttgttttttaacgtcatagatagaaggtagctgttagagcgtgtaccgtgtcaatcatatgttaaaagttataatctggtggtggaatttggaaacgttccttgtttatactgttgttatacagtttatatccacatatatgctatacttctggctaggagctgtgttgtgttta

SEQ ID NO: 5612 - DNA, 3463 bp, Zea Mays
ccgtgctcccccgaatttttttcctctccccttccgagttccgacctcgtcgccccgcggctccagctcttcccgttcattccctcgcgccgaagcaactccggaatccgcctgcgcgccaaaaccctagccccagatcccgcgccgcgccgcgccgcccggtgcccagtcggcggcgcccgcgccggccattgccgctcgccgcattgggggcgcttacggcgtctcctccgctcccgaagcagagatctgggccgaggagacctggttgttcgtgggcggtgcaggggatggggcgcgggcggtgggcctcggggatccgcgcggcggcgctggtcctgctcgcggtcgcggctgccgccggagccgccgcgggggatcctgatcccgacgagctcgagcgcgcgtttccaatagtggagccagaccacgggcacacaaaacttcgtctctcagaacaaggtctagaagcaattcgaaggattgaaactcctattgctgttgttggtgtcattggtccatatcgatctggaaaatcttttctcctcaaccagcttctctccttatcttgtgataaaggttttggagttggtcatatgcgagatactaaaactaaaggtatttggatttggggtactcctgttgagatggatgttgatggttccaaagtttctgtcatttatctagacactgaaggatttgaaagtgttgggaaatcaaatgtgtatgatgataggatatttgctttggcaactgtcctaagttcggtgcttatctacaaccttcctgagacggtacgtgaagctgatatatctaggctttcatttgccattgaaattgctgaagaattctatggaaggtttgaggggcaagatgttgcttttgagccagcaaagcttctctggcttatccagagggatttcctccaaggaaaatctgttcaacaaatggtcaatgaagcccttcaacgggtgcctaatgataatggtgacaaatatattgatgaggtcaatcaaatacgagattcgttggcagttatggggaacaacagcactgcttttagcttgcctcagccgcatcttcaaagaacaaaattatgtgatatggaggacaaagaacttgaacccttatatgtaaaacggcgggagcaattaaagcagcttgtttcgtctattgtaaaaccaaaaattgtgcagggcagaactctaaatgggaaggactttgtgtctttcttgcagcagattcttgaggctttgaataaaggcgaaattccatcaacagggtctctagttgaaatttttaacaaagccattcttgatcgctgtctgaaggcgtacagggagaaaatggatggcttaggcttaccagtaccggtagacaaactgcagaaacttcatgagatggcaaatggtgatgctagaattctctttgataagcagcactttggcaaacatcatgctgctcagtcagctctcaagcttgaagatgatattaaaaagaaacttacttctagctaatgaatatcaatcgtcaaagctgtgtgaagctcgcttttctgagtgtgaagataagatggatcaccttcaagtcttgaaacttccttcgatggcaaaattcaatgcaggctttactcactgcaaccaaagtttcgtaaaggaatgcgttggacctgcaaaagaaagctatgaacgtagaatgtcaaaggtttgcctgttaattctgaatacagttgtcatgtcagttaccaaaggtttgcctgttattatgcatttgcagcctagtttccaacgacaaaccagcctacttttattcttatttttggttgctgtcatcttaaatttcgtttcatttcatctgtctacaactccacatgatgaaattcagttacttctatattggtagcaaattttcccctgtagattgatagatttgttttggtacctgatgacactatgttgtgaactgcgatgcactcgcaagatagtcatggtactcagccctcccgtaggaggccctaagagtaaaccagatctattcttcttgcctatccctactaactccctgtccctccttatgtagagaggtaaccctaacttaatagctaagcaacataacaaaccctatctgacagcactgttcacgcgccaatggcctagtttcacacagctacagtaaccgcaatgttcacgtgctaagcaacataatactacagtaaccacgcgtgaacagtgccgcggctaacataaccctaatgggcttaaggcccataacacactaagatatatttttacctgtaattttcaaaataaacatataagctagtaaaagatgcgcaagcagtaacataataagaaccacgtttagactttagtgtggaaggagggaacccgtgctgtagttatcctgtgcattgatatcttctatggtattgcgatttctactcaagtatgtgctctgtttggttgcttttactctttaaaacttgttgtgatttgcatggagccatggactaagctccagtttgatgctgtgtttagatgcttgccaagtctcgtgctcttttcatcaaggagtacaataacaagcttttcaattggttggtgaccttctctttggtcatggtggtcatcgggcgctttgtcatcaagttcttcctacttgaaatcgccgcttgggtgatgttcatcttcctagagacgtacacgagaatgttctggtcagcggaatcgctgtactataatccagcttggcacatcattgtttcttcctgggaaaccatcgtgtacagcccaattcttgatctggacagatgggccgtcccaattgtcataatgctattatttggggttctttactggagatgcttcggtggtagaaggaagcggggaaggggttcgctcctcccattgtacaagaattcttataactcgagtcgtcgctcgagatcagactagttatacacgcaatgttgaagttattttcttttaaagaatggtacaaaatatctgcctgtagaagaggctaaactgccgaatgtggatcatctgcaagtgcttttggatgggcatgttttgaattttgatggtgccctgccaatgtatctccaattctttttggtggatgaagagaggcggtgaagctgctagtatgggggcggggcacctgcacaaagcctctgttgtaattcgtaccggggtactttttgtgtagctaggttatccttacatgtcacggtcccaattgattgattattgtttacgtccactgcaattttttttggcaagaattttgttttttaacgtcatagatagaaggtagctgttagagcgtgtaccgtgtcaatcatatgttaaaagttataatctggtggtggaatttggaaacgttccttgtttatactgttgttatacagtttatatccacatatatgctatacttctggctaggagctgtgttgtgttta

SEQ ID NO: 5613 - DNA, 3474 bp, Zea Mays
ccgtgctcccccgaatttttttcctctccccttccgagttccgacctcgtcgccccgcggctccagctcttcccgttcattccctcgcgccgaagcaactccggaatccgcctgcgcgccaaaaccctagccccagatcccgcgccgcgccgcgccgcccggtgcccagtcggcggcgcccgcgccggccattgccgctcgccgcattgggggcgcttacggcgtctcctccgctcccgaagcagagatctgggccgaggagacctggttgttcgtgggcggtgcaggggatggggcgcgggcggtgggcctcggggatccgcgcggcggcgctggtcctgctcgcggtcgcggctgccgccggagccgccgcgggggatcctgatcccgacgagctcgagcgcgcgtttccaatagtggagccagaccacgggcacacaaaacttcgtctctcagaacaaggtctagaagcaattcgaaggattgaaactcctattgctgttgttggtgtcattggtccatatcgatctggaaaatcttttctcctcaaccagcttctctccttatcttgtgataaaggttttggagttggtcatatgcgagatactaaaactaaaggtatttggatttggggtactcctgttgagatggatgttgatggttccaaagtttctgtcatttatctagacactgaaggatttgaaagtgttgggaaatcaaatgtgtatgatgataggatatttgctttggcaactgtcctaagttcggtgcttatctacaaccttcctgagacggtacgtgaagctgatatatctaggctttcatttgccattgaaattgctgaagaattctatggaaggtttgttcatgggcaagatgttgcttttgagccagcaaagcttctctggcttatccagagggatttcctccaaggaaaatctgttcaacaaatggtcaatgaagcccttcaacgggtgcctaatgataatggtgacaaatatattgatgaggtcaatcaaatacgagattcgttggcagttatggggaacaacagcactgcttttagcttgcctcagccgcatcttcaaagaacaaaattatgtgatatggaggacaaagaacttgaacccttatatgtaaaacggcgggagcaattaaagcagcttgtttcgtctattgtaaaaccaaaaattgtgcagggcagaactctaaatgggaaggactttgtgtctttcttgcagcagattcttgaggctttgaataaaggcgaaattccatcaacagggtctctagttgaaatttttaacaaagccattcttgatcgctgtctgaaggcgtacagggagaaaatggatggcttaggcttaccagtaccggtagacaaactgcagaaacttcatgagatggcaaatggtgatgctagaattctctttgataagcagcactttggcaaacatcatgctgctcagtcagctctcaagcttgaagatgatattaaaaaggtgtacagaaacttacttctagctaatgaatatcaatcgtcaaagctgtgtgaagctcgcttttctgagtgtgaagataagatggatcaccttcaagtcttgaaacttccttcgatggcaaaattcaatgcaggctttactcactgcaaccaaagtttcgtaaaggaatgcgttggacctgcaaaagaaagctatgaacgtagaatgtcaaaggtttgcctgttaattctgaatacagttgtcatgtcagttaccaaaggtttgcctgttattatgcatttgcagcctagtttccaacgacaaaccagcctacttttattcttatttttggttgctgtcatcttaaatttcgtttcatttcatctgtctacaactccacatgatgaaattcagttacttctatattggtagcaaattttcccctgtagattgatagatttgttttggtacctgatgacactatgttgtgaactgcgatgcactcgcaagatagtcatggtactcagccctcccgtaggaggccctaagagtaaaccagatctattcttcttgcctatccctactaactccctgtccctccttatgtagagaggtaaccctaacttaatagctaagcaacataacaaaccctatctgacagcactgttcacgcgccaatggcctagtttcacacagctacagtaaccgcaatgttcacgtgctaagcaacataatactacagtaaccacgcgtgaacagtgccgcggctaacataaccctaatgggcttaaggcccataacacactaagatatatttttacctgtaattttcaaaataaacatataagctagtaaaagatgcgcaagcagtaacataataagaaccacgtttagactttagtgtggaaggagggaacccgtgctgtagttatcctgtgcattgatatcttctatggtattgcgatttctactcaagtatgtgctctgtttggttgcttttactctttaaaacttgttgtgatttgcatggagccatggactaagctccagtttgatgctgtgtttagatgcttgccaagtctcgtgctcttttcatcaaggagtacaataacaagcttttcaattggttggtgaccttctctttggtcatggtggtcatcgggcgctttgtcatcaagttcttcctacttgaaatcgccgcttgggtgatgttcatcttcctagagacgtacacgagaatgttctggtcagcggaatcgctgtactataatccagcttggcacatcattgtttcttcctgggaaaccatcgtgtacagcccaattcttgatctggacagatgggccgtcccaattgtcataatgctattatttggggttctttactggagatgcttcggtggtagaaggaagcggggaaggggttcgctcctcccattgtacaagaattcttataactcgagtcgtcgctcgagatcagactagttatacacgcaatgttgaagttattttcttttaaagaatggtacaaaatatctgcctgtagaagaggctaaactgccgaatgtggatcatctgcaagtgcttttggatgggcatgttttgaattttgatggtgccctgccaatgtatctccaattctttttggtggatgaagagaggcggtgaagctgctagtatgggggcggggcacctgcacaaagcctctgttgtaattcgtaccggggtactttttgtgtagctaggttatccttacatgtcacggtcccaattgattgattattgtttacgtccactgcaattttttttggcaagaattttgttttttaacgtcatagatagaaggtagctgttagagcgtgtaccgtgtcaatcatatgttaaaagttataatctggtggtggaatttggaaacgttccttgtttatactgttgttatacagtttatatccacatatatgctatacttctggctaggagctgtgttgtgttta

SEQ ID NO: 5614 - DNA, 3556 bp, Zea Mays
ccgtgctcccccgaatttttttcctctccccttccgagttccgacctcgtcgccccgcggctccagctcttcccgttcattccctcgcgccgaagcaactccggaatccgcctgcgcgccaaaaccctagccccagatcccgcgccgcgccgcgccgcccggtgcccagtcggcggcgcccgcgccggccattgccgctcgccgcattgggggcgcttacggcgtctcctccgctcccgaagcagagatctgggccgaggagacctggttgttcgtgggcggtgcaggggatggggcgcgggcggtgggcctcggggatccgcgcggcggcgctggtcctgctcgcggtcgcggctgccgccggagccgccgcgggggatcctgatcccgacgagctcgagcgcgcgtttccaatagtggagccagaccacgggcacacaaaacttcgtctctcagaacaaggtctagaagcaattcgaaggattgaaactcctattgctgttgttggtgtcattggtccatatcgatctggaaaatcttttctcctcaaccagcttctctccttatcttgtgataaaggttttggagttggtcatatgcgagatactaaaactaaaggtatttggatttggggtactcctgttgagatggatgttgatggttccaaagtttctgtcatttatctagacactgaaggatttgaaagtgttgggaaatcaaatgtgtatgatgataggatatttgctttggcaactgtcctaagttcggtgcttatctacaaccttcctgagacggtgcccccccctcccaccttctctcccctcaatggctgtcgcttggttaatttcattgtgggccattgcaggtacgtgaagctgatatatctaggctttcatttgccattgaaattgctgaagaattctatggaaggtttgaggggcaagatgttgcttttgagccagcaaagcttctctggcttatccagagggatttcctccaaggaaaatctgttcaacaaatggtcaatgaagcccttcaacgggtgcctaatgataatggtgacaaatatattgatgaggtcaatcaaatacgagattcgttggcagttatggggaacaacagcactgcttttagcttgcctcagccgcatcttcaaagaacaaaattatgtgatatggaggacaaagaacttgaacccttatatgtaaaacggcgggagcaattaaagcagcttgtttcgtctattgtaaaaccaaaaattgtgcagggcagaactctaaatgggaaggactttgtgtctttcttgcagcagattcttgaggctttgaataaaggcgaaattccatcaacagggtctctagttgaaatttttaacaaagccattcttgatcgctgtctgaaggcgtacagggagaaaatggatggcttaggcttaccagtaccggtagacaaactgcagaaacttcatgagatggcaaatggtgatgctagaattctctttgataagcagcactttggcaaacatcatgctgctcagtcagctctcaagcttgaagatgatattaaaaaggatgtactttgtaggtgtacagaaacttacttctagctaatgaatatcaatcgtcaaagctgtgtgaagctcgcttttctgagtgtgaagataagatggatcaccttcaagtcttgaaacttccttcgatggcaaaattcaatgcaggctttactcactgcaaccaaagtttcgtaaaggaatgcgttggacctgcaaaagaaagctatgaacgtagaatgtcaaaggtttgcctgttaattctgaatacagttgtcatgtcagttaccaaaggtttgcctgttattatgcatttgcagcctagtttccaacgacaaaccagcctacttttattcttatttttggttgctgtcatcttaaatttcgtttcatttcatctgtctacaactccacatgatgaaattcagttacttctatattggtagcaaattttcccctgtagattgatagatttgttttggtacctgatgacactatgttgtgaactgcgatgcactcgcaagatagtcatggtactcagccctcccgtaggaggccctaagagtaaaccagatctattcttcttgcctatccctactaactccctgtccctccttatgtagagaggtaaccctaacttaatagctaagcaacataacaaaccctatctgacagcactgttcacgcgccaatggcctagtttcacacagctacagtaaccgcaatgttcacgtgctaagcaacataatactacagtaaccacgcgtgaacagtgccgcggctaacataaccctaatgggcttaaggcccataacacactaagatatatttttacctgtaattttcaaaataaacatataagctagtaaaagatgcgcaagcagtaacataataagaaccacgtttagactttagtgtggaaggagggaacccgtgctgtagttatcctgtgcattgatatcttctatggtattgcgatttctactcaagtatgtgctctgtttggttgcttttactctttaaaacttgttgtgatttgcatggagccatggactaagctccagtttgatgctgtgtttagatgcttgccaagtctcgtgctcttttcatcaaggagtacaataacaagcttttcaattggttggtgaccttctctttggtcatggtggtcatcgggcgctttgtcatcaagttcttcctacttgaaatcgccgcttgggtgatgttcatcttcctagagacgtacacgagaatgttctggtcagcggaatcgctgtactataatccagcttggcacatcattgtttcttcctgggaaaccatcgtgtacagcccaattcttgatctggacagatgggccgtcccaattgtcataatgctattatttggggttctttactggagatgcttcggtggtagaaggaagcggggaaggggttcgctcctcccattgtacaagaattcttataactcgagtcgtcgctcgagatcagactagttatacacgcaatgttgaagttattttcttttaaagaatggtacaaaatatctgcctgtagaagaggctaaactgccgaatgtggatcatctgcaagtgcttttggatgggcatgttttgaattttgatggtgccctgccaatgtatctccaattctttttggtggatgaagagaggcggtgaagctgctagtatgggggcggggcacctgcacaaagcctctgttgtaattcgtaccggggtactttttgtgtagctaggttatccttacatgtcacggtcccaattgattgattattgtttacgtccactgcaattttttttggcaagaattttgttttttaacgtcatagatagaaggtagctgttagagcgtgtaccgtgtcaatcatatgttaaaagttataatctggtggtggaatttggaaacgttccttgtttatactgttgttatacagtttatatccacatatatgctatacttctggctaggagctgtgttgtgttta

SEQ ID NO: 5615 - DNA, 3471 bp, Zea Mays
ccgtgctcccccgaatttttttcctctccccttccgagttccgacctcgtcgccccgcggctccagctcttcccgttcattccctcgcgccgaagcaactccggaatccgcctgcgcgccaaaaccctagccccagatcccgcgccgcgccgcgccgcccggtgcccagtcggcggcgcccgcgccggccattgccgctcgccgcattgggggcgcttacggcgtctcctccgctcccgaagcagagatctgggccgaggagacctggttgttcgtgggcggtgcaggggatggggcgcgggcggtgggcctcggggatccgcgcggcggcgctggtcctgctcgcggtcgcggctgccgccggagccgccgcgggggatcctgatcccgacgagctcgagcgcgcgtttccaatagtggagccagaccacgggcacacaaaacttcgtctctcagaacaaggtctagaagcaattcgaaggattgaaactcctattgctgttgttggtgtcattggtccatatcgatctggaaaatcttttctcctcaaccagcttctctccttatcttgtgataaaggttttggagttggtcatatgcgagatactaaaactaaaggtatttggatttggggtactcctgttgagatggatgttgatggttccaaagtttctgtcatttatctagacactgaaggatttgaaagtgttgggaaatcaaatgtgtatgatgataggatatttgctttggcaactgtcctaagttcggtgcttatctacaaccttcctgagacggtacgtgaagctgatatatctaggctttcatttgccattgaaattgctgaagaattctatggaaggtttgaggggcaagatgttgcttttgagccagcaaagcttctctggcttatccagagggatttcctccaaggaaaatctgttcaacaaatggtcaatgaagcccttcaacgggtgcctaatgataatggtgacaaatatattgatgaggtcaatcaaatacgagattcgttggcagttatggggaacaacagcactgcttttagcttgcctcagccgcatcttcaaagaacaaaattatgtgatatggaggacaaagaacttgaacccttatatgtaaaacggcgggagcaattaaagcagcttgtttcgtctattgtaaaaccaaaaattgtgcagggcagaactctaaatgggaaggactttgtgtctttcttgcagcagattcttgaggctttgaataaaggcgaaattccatcaacagggtctctagttgaaatttttaacaaagccattcttgatcgctgtctgaaggcgtacagggagaaaatggatggcttaggcttaccagtaccggtagacaaactgcagaaacttcatgagatggcaaatggtgatgctagaattctctttgataagcagcactttggcaaacatcatgctgctcagtcagctctcaagcttgaagatgatattaaaaaggtgtacagaaacttacttctagctaatgaatatcaatcgtcaaagctgtgtgaagctcgcttttctgagtgtgaagataagatggatcaccttcaagtcttgaaacttccttcgatggcaaaattcaatgcaggctttactcactgcaaccaaagtttcgtaaaggaatgcgttggacctgcaaaagaaagctatgaacgtagaatgtcaaaggtttgcctgttaattctgaatacagttgtcatgtcagttaccaaaggtttgcctgttattatgcatttgcagcctagtttccaacgacaaaccagcctacttttattcttatttttggttgctgtcatcttaaatttcgtttcatttcatctgtctacaactccacatgatgaaattcagttacttctatattggtagcaaattttcccctgtagattgatagatttgttttggtacctgatgacactatgttgtgaactgcgatgcactcgcaagatagtcatggtactcagccctcccgtaggaggccctaagagtaaaccagatctattcttcttgcctatccctactaactccctgtccctccttatgtagagaggtaaccctaacttaatagctaagcaacataacaaaccctatctgacagcactgttcacgcgccaatggcctagtttcacacagctacagtaaccgcaatgttcacgtgctaagcaacataatactacagtaaccacgcgtgaacagtgccgcggctaacataaccctaatgggcttaaggcccataacacactaagatatatttttacctgtaattttcaaaataaacatataagctagtaaaagatgcgcaagcagtaacataataagaaccacgtttagactttagtgtggaaggagggaacccgtgctgtagttatcctgtgcattgatatcttctatggtattgcgatttctactcaagtatgtgctctgtttggttgcttttactctttaaaacttgttgtgatttgcatggagccatggactaagctccagtttgatgctgtgtttagatgcttgccaagtctcgtgctcttttcatcaaggagtacaataacaagcttttcaattggttggtgaccttctctttggtcatggtggtcatcgggcgctttgtcatcaagttcttcctacttgaaatcgccgcttgggtgatgttcatcttcctagagacgtacacgagaatgttctggtcagcggaatcgctgtactataatccagcttggcacatcattgtttcttcctgggaaaccatcgtgtacagcccaattcttgatctggacagatgggccgtcccaattgtcataatgctattatttggggttctttactggagatgcttcggtggtagaaggaagcggggaaggggttcgctcctcccattgtacaagaattcttataactcgagtcgtcgctcgagatcagactagttatacacgcaatgttgaagttattttcttttaaagaatggtacaaaatatctgcctgtagaagaggctaaactgccgaatgtggatcatctgcaagtgcttttggatgggcatgttttgaattttgatggtgccctgccaatgtatctccaattctttttggtggatgaagagaggcggtgaagctgctagtatgggggcggggcacctgcacaaagcctctgttgtaattcgtaccggggtactttttgtgtagctaggttatccttacatgtcacggtcccaattgattgattattgtttacgtccactgcaattttttttggcaagaattttgttttttaacgtcatagatagaaggtagctgttagagcgtgtaccgtgtcaatcatatgttaaaagttataatctggtggtggaatttggaaacgttccttgtttatactgttgttatacagtttatatccacatatatgctatacttctggctaggagctgtgttgtgttta

SEQ ID NO: 5616 - DNA, 2652 bp, Zea Mays
ccgtgctcccccgaatttttttcctctccccttccgagttccgacctcgtcgccccgcggctccagctcttcccgttcattccctcgcgccgaagcaactccggaatccgcctgcgcgccaaaaccctagccccagatcccgcgccgcgccgcgccgcccggtgcccagtcggcggcgcccgcgccggccattgccgctcgccgcattgggggcgcttacggcgtctcctccgctcccgaagcagagatctgggccgaggagacctggttgttcgtgggcggtgcaggggatggggcgcgggcggtgggcctcggggatccgcgcggcggcgctggtcctgctcgcggtcgcggctgccgccggagccgccgcgggggatcctgatcccgacgagctcgagcgcgcgtttccaatagtggagccagaccacgggcacacaaaacttcgtctctcagaacaaggtctagaagcaattcgaaggattgaaactcctattgctgttgttggtgtcattggtccatatcgatctggaaaatcttttctcctcaaccagcttctctccttatcttgtgataaaggttttggagttggtcatatgcgagatactaaaactaaaggtatttggatttggggtactcctgttgagatggatgttgatggttccaaagtttctgtcatttatctagacactgaaggatttgaaagtgttgggaaatcaaatgtgtatgatgataggatatttgctttggcaactgtcctaagttcggtgcttatctacaaccttcctgagacggtacgtgaagctgatatatctaggctttcatttgccattgaaattgctgaagaattctatggaaggtttgaggggcaagatgttgcttttgagccagcaaagcttctctggcttatccagagggatttcctccaaggaaaatctgttcaacaaatggtcaatgaagcccttcaacgggtgcctaatgataatggtgacaaatatattgatgaggtcaatcaaatacgagattcgttggcagttatggggaacaacagcactgcttttagcttgcctcagccgcatcttcaaagaacaaaattatgtgatatggaggacaaagaacttgaacccttatatgtaaaacggcgggagcaattaaagcagcttgtttcgtctattgtaaaaccaaaaattgtgcagggcagaactctaaatgggaaggactttgtgtctttcttgcagcagattcttgaggctttgaataaaggcgaaattccatcaacagggtctctagttgaaatttttaacaaagccattcttgatcgctgtctgaaggcgtacagggagaaaatggatggcttaggcttaccagtaccggtagacaaactgcagaaacttcatgagatggcaaatggtgatgctagaattctctttgataagcagcactttggcaaacatcatgctgctcagtcagctctcaagcttgaagatgatattaaaaaggatgtactttgtaggtgtacagaaacttacttctagctaatgaatatcaatcgtcaaagctgtgtgaagctcgcttttctgagtgtgaagataagatggatcaccttcaagtcttgaaacttccttcgatggcaaaattcaatgcaggctttactcactgcaaccaaagtttcgtaaaggaatgcgttggacctgcaaaagaaagctatgaacgtagaatgtcaaagatgcttgccaagtctcgtgctcttttcatcaaggagtacaataacaagcttttcaattggttggtgaccttctctttggtcatggtggtcatcgggcgctttgtcatcaagttcttcctacttgaaatcgccgcttgggtgatgttcatcttcctagagacgtacacgagaatgttctggtcagcggaatcgctgtactataatccagcttggcacatcattgtttcttcctgggaaaccatcgtgtacagcccaattcttgatctggacagatgggccgtcccaattgtcataatgctattatttggggttctttactggagatgcttcggtggtagaaggaagcggggaaggggttcgctcctcccattgtacaagaattcttataactcgagtcgtcgctcgagatcagactagttatacacgcaatgttgaagttattttcttttaaagaatggtacaaaatatctgcctgtagaagaggctaaactgccgaatgtggatcatctgcaagtgcttttggatgggcatgttttgaattttgatggtgccctgccaatgtatctccaattctttttggtggatgaagagaggcggtgaagctgctagtatgggggcggggcacctgcacaaagcctctgttgtaattcgtaccggggtactttttgtgtagctaggttatccttacatgtcacggtcccaattgattgattattgtttacgtccactgcaattttttttggcaagaattttgttttttaacgtcatagatagaaggtagctgttagagcgtgtaccgtgtcaatcatatgttaaaagttataatctggtggtggaatttggaaacgttccttgtttatactgttgttatacagtttatatccacatatatgctatacttctggctaggagctgtgttgtgttta

SEQ ID NO: 5617 - DNA, 2329 bp, Zea Mays
tgcaatgtttcaaaaatcaccacaaaaaccatgtacagttaaatatagccgcaacaattcagtttgaaattcatctgagatgtcaggaaacaaaatggacaagtttccaatagtggagccagaccacgggcacacaaaacttcgtctctcagaacaaggtctagaagcaattcgaaggattgaaactcctattgctgttgttggtgtcattggtccatatcgatctggaaaatcttttctcctcaaccagcttctctccttatcttgtgataaaggttttggagttggtcatatgcgagatactaaaactaaaggtatttggatttggggtactcctgttgagatggatgttgatggttccaaagtttctgtcatttatctagacactgaaggatttgaaagtgttgggaaatcaaatgtgtatgatgataggatatttgctttggcaactgtcctaagttcggtgcttatctacaaccttcctgagacggtacgtgaagctgatatatctaggctttcatttgccattgaaattgctgaagaattctatggaaggtttgttcatgggcaagatgttgcttttgagccagcaaagcttctctggcttatccagagggatttcctccaaggaaaatctgttcaacaaatggtcaatgaagcccttcaacgggtgcctaatgataatggtgacaaatatattgatgaggtcaatcaaatacgagattcgttggcagttatggggaacaacagcactgcttttagcttgcctcagccgcatcttcaaagaacaaaattatgtgatatggaggacaaagaacttgaacccttatatgtaaaacggcgggagcaattaaagcagcttgtttcgtctattgtaaaaccaaaaattgtgcagggcagaactctaaatgggaaggactttgtgtctttcttgcagcagattcttgaggctttgaataaaggcgaaattccatcaacagggtctctagttgaaatttttaacaaagccattcttgatcgctgtctgaaggcgtacagggagaaaatggatggcttaggcttaccagtaccggtagacaaactgcagaaacttcatgagatggcaaatggtgatgctagaattctctttgataagcagcactttggcaaacatcatgctgctcagtcagctctcaagcttgaagatgatattaaaaagaaacttacttctagctaatgaatatcaatcgtcaaagctgtgtgaagctcgcttttctgagtgtgaagataagatggatcaccttcaagtcttgaaacttccttcgatggcaaaattcaatgcaggctttactcactgcaaccaaagtttcgtaaaggaatgcgttggacctgcaaaagaaagctatgaacgtagaatgtcaaagatgcttgccaagtctcgtgctcttttcatcaaggagtacaataacaagcttttcaattggttggtgaccttctctttggtcatggtggtcatcgggcgctttgtcatcaagttcttcctacttgaaatcgccgcttgggtgatgttcatcttcctagagacgtacacgagaatgttctggtcagcggaatcgctgtactataatccagcttggcacatcattgtttcttcctgggaaaccatcgtgtacagcccaattcttgatctggacagatgggccgtcccaattgtcataatgctattatttggggttctttactggagatgcttcggtggtagaaggaagcggggaaggggttcgctcctcccattgtacaagaattcttataactcgagtcgtcgctcgagatcagactagttatacacgcaatgttgaagttattttcttttaaagaatggtacaaaatatctgcctgtagaagaggctaaactgccgaatgtggatcatctgcaagtgcttttggatgggcatgttttgaattttgatggtgccctgccaatgtatctccaattctttttggtggatgaagagaggcggtgaagctgctagtatgggggcggggcacctgcacaaagcctctgttgtaattcgtaccggggtactttttgtgtagctaggttatccttacatgtcacggtcccaattgattgattattgtttacgtccactgcaattttttttggcaagaattttgttttttaacgtcatagatagaaggtagctgttagagcgtgtaccgtgtcaatcatatgttaaaagttataatctggtggtggaatttggaaacgttccttgtttatactgttgttatacagtttatatccacatatatgctatacttctggctaggagctgtgttgtgttta

SEQ ID NO: 5618 - DNA, 2754 bp, Zea Mays
attccaaattataagatgttttgacctttctagattcctaccttttactatgcacaacttagatatacactatgtctagatatatattaaaagcaatgtatttagaaaagccaaagcgtctcatattttgttatggagggagtgccttcctctattgaatgaatactggcactgaatatataagacctcactgcacactgatatatgtggtattcagccatcgagtgagactgcttgcttctgtcctgtcatgaaatctggcttctagaaaaaaagacgcagttgtctcttactatttttatgaacttttgatttgaaatatctgatatccatgtttgttattcatgcttctcaaggtgtttccaatagtggagccagaccacgggcacacaaaacttcgtctctcagaacaaggtctagaagcaattcgaaggattgaaactcctattgctgttgttggtgtcattggtccatatcgatctggaaaatcttttctcctcaaccagcttctctccttatcttgtgataaaggttttggagttggtcatatgcgagatactaaaactaaaggtatttggatttggggtactcctgttgagatggatgttgatggttccaaagtttctgtcatttatctagacactgaaggatttgaaagtgttgggaaatcaaatgtgtatgatgataggatatttgctttggcaactgtcctaagttcggtgcttatctacaaccttcctgagacggtgcccccccctcccaccttctctcccctcaatggctgtcgcttggttaatttcattgtgggccattgcaggtacgtgaagctgatatatctaggctttcatttgccattgaaattgctgaagaattctatggaaggtttgttcatttttcgtgcctttctgtttggttataatcattttgatctggaaaactaacatttattctttttttgttatatgctgcatgtttgtgagcagagtgaaggggcaagatgttgcttttgagccagcaaagcttctctggcttatccagagggatttcctccaaggaaaatctgttcaacaaatggtcaatgaagcccttcaacgggtgcctaatgataatggtgacaaatatattgatgaggtcaatcaaatacgagattcgttggcagttatggggaacaacagcactgcttttagcttgcctcagccgcatcttcaaagaacaaaattatgtgatatggaggacaaagaacttgaacccttatatgtaaaacggcgggagcaattaaagcagcttgtttcgtctattgtaaaaccaaaaattgtgcagggcagaactctaaatgggaaggactttgtgtctttcttgcagcagattcttgaggctttgaataaaggcgaaattccatcaacagggtctctagttgaaatttttaacaaagccattcttgatcgctgtctgaaggcgtacagggagaaaatggatggcttaggcttaccagtaccggtagacaaactgcagaaacttcatgagatggcaaatggtgatgctagaattctctttgataagcagcactttggcaaacatcatgctgctcagtcagctctcaagcttgaagatgatattaaaaagaaacttacttctagctaatgaatatcaatcgtcaaagctgtgtgaagctcgcttttctgagtgtgaagataagatggatcaccttcaagtcttgaaacttccttcgatggcaaaattcaatgcaggctttactcactgcaaccaaagtttcgtaaaggaatgcgttggacctgcaaaagaaagctatgaacgtagaatgtcaaagatgcttgccaagtctcgtgctcttttcatcaaggagtacaataacaagcttttcaattggttggtgaccttctctttggtcatggtggtcatcgggcgctttgtcatcaagttcttcctacttgaaatcgccgcttgggtgatgttcatcttcctagagacgtacacgagaatgttctggtcagcggaatcgctgtactataatccagcttggcacatcattgtttcttcctgggaaaccatcgtgtacagcccaattcttgatctggacagatgggccgtcccaattgtcataatgctattatttggggttctttactggagatgcttcggtggtagaaggaagcggggaaggggttcgctcctcccattgtacaagaattcttataactcgagtcgtcgctcgagatcagactagttatacacgcaatgttgaagttattttcttttaaagaatggtacaaaatatctgcctgtagaagaggctaaactgccgaatgtggatcatctgcaagtgcttttggatgggcatgttttgaattttgatggtgccctgccaatgtatctccaattctttttggtggatgaagagaggcggtgaagctgctagtatgggggcggggcacctgcacaaagcctctgttgtaattcgtaccggggtactttttgtgtagctaggttatccttacatgtcacggtcccaattgattgattattgtttacgtccactgcaattttttttggcaagaattttgttttttaacgtcatagatagaaggtagctgttagagcgtgtaccgtgtcaatcatatgttaaaagttataatctggtggtggaatttggaaacgttccttgtttatactgttgttatacagtttatatccacatatatgctatacttctggctaggagctgtgttgtgttta

SEQ ID NO: 5619 - DNA, 1774 bp, Zea Mays
aggggcaagatgttgcttttgagccagcaaagcttctctggcttatccagagggatttcctccaaggaaaatctgttcaacaaatggtcaatgaagcccttcaacgggtgcctaatgataatggtgacaaatatattgatgaggtcaatcaaatacgagattcgttggcagttatggggaacaacagcactgcttttagcttgcctcagccgcatcttcaaagaacaaaattatgtgatatggaggacaaagaacttgaacccttatatgtaaaacggcgggagcaattaaagcagcttgtttcgtctattgtaaaaccaaaaattgtgcagggcagaactctaaatgggaaggactttgtgtctttcttgcagcagattcttgaggctttgaataaaggcgaaattccatcaacagggtctctagttgaaatttttaacaaagccattcttgatcgctgtctgaaggcgtacagggagaaaatggatggcttaggcttaccagtaccggtagacaaactgcagaaacttcatgagatggcaaatggtgatgctagaattctctttgataagcagcactttggcaaacatcatgctgctcagtcagctctcaagcttgaagatgatattaaaaaggtgtacagaaacttacttctagctaatgaatatcaatcgtcaaagctgtgtgaagctcgcttttctgagtgtgaagataagatggatcaccttcaagtcttgaaacttccttcgatggcaaaattcaatgcaggctttactcactgcaaccaaagtttcgtaaaggaatgcgttggacctgcaaaagaaagctatgaacgtagaatgtcaaagatgcttgccaagtctcgtgctcttttcatcaaggagtacaataacaagcttttcaattggttggtgaccttctctttggtcatggtggtcatcgggcgctttgtcatcaagttcttcctacttgaaatcgccgcttgggtgatgttcatcttcctagagacgtacacgagaatgttctggtcagcggaatcgctgtactataatccagcttggcacatcattgtttcttcctgggaaaccatcgtgtacagcccaattcttgatctggacagatgggccgtcccaattgtcataatgctattatttggggttctttactggagatgcttcggtggtagaaggaagcggggaaggggttcgctcctcccattgtacaagaattcttataactcgagtcgtcgctcgagatcagactagttatacacgcaatgttgaagttattttcttttaaagaatggtacaaaatatctgcctgtagaagaggctaaactgccgaatgtggatcatctgcaagtgcttttggatgggcatgttttgaattttgatggtgccctgccaatgtatctccaattctttttggtggatgaagagaggcggtgaagctgctagtatgggggcggggcacctgcacaaagcctctgttgtaattcgtaccggggtactttttgtgtagctaggttatccttacatgtcacggtcccaattgattgattattgtttacgtccactgcaattttttttggcaagaattttgttttttaacgtcatagatagaaggtagctgttagagcgtgtaccgtgtcaatcatatgttaaaagttataatctggtggtggaatttggaaacgttccttgtttatactgttgttatacagtttatatccacatatatgctatacttctggctaggagctgtgttgtgttta

SEQ ID NO: 5620 - DNA, 4476 bp, Zea Mays
cctaagcgagcaccccttgacaagttcaggggctgctcatgcatttaactcaatatacaatgttggccataaagtcatgatgcacacacatttcacaaacaggtaaaaaagatcaccttctctgtaatctgtgttgaacagggtttccatttccagtagtctcagcatctccttccatgtcatcatcgtctgactgctcacgtgaggaagagctagtggtttgcttaacagggatatcggcattttgtactacatgtggacttgatcccccgcctggagcaccaactagcttgttttgaactagacttccagtacctgatacgtgcccaatatccaatccagaccatacttcagtcattcaaccagatgtcatacatataagttagaaggctagcatttacagtgtgtgcatgtttacccaaataaaatagcaacatgtcagtgaaatcacgattaagctacttggtccaattgtgaagctaagtgcacgtgcataccttgcatagtaatggacgacacaccataaagatacaaccataaaggcttcataatcacaaggtgttttgttttgaaaactcaacaacagaacatcaagttccccatggtttactaaatcgattagaccggggatgggagatgggacgtaggaaaaaaaggcggtcgggcgcgcccttgtcgtcttcctccttcgccgtagtggaccggagttctcttgggccgatttcccacgctccgcacgctcctcgtgctatccctctctcgcgtttcataggcaggcgggtctccgggtgagaaggtctctggcgcggcccagaaggattcctgtccctcgtcgcgcgatacagtgacttctacaggtaccgcgttagggtttccttctgacttcgtcggatcgtattcctttccgcatctcgcctcttcgctctctcggctctggtctctcccgtcgtcggttcgctccagtttccacggtggctggttcgagtccccgatccgtcctccgctggtggaagaggagtggccgcctctgcctcgcttggcgtccgtgttgaagatggatccaaaaggtcgaaaccctaattgggatcggtggggaccgaaagaggtgcctcaaggatctcaatcttggaacaagaatcgaaatctcagttggagattgaagccaaatcttggcaaatctgacatcaaggaagacattgtgacttttctggcgatggggccaatcaggtattctcaaaacccctcccctgctttgaaaaaagagattgataatgttcgtcgccctttctgtcaaaaatgcggggtggagggtcatcatgctagagattgtttcaagtctctgtggtgcgatatttgtcgcaaagaaactcatgtgaatgctcgttgtgtccttcccaaacaaaacaagccatgcatgcctattgttggtatggcggctgacgggttaaggttttattcttcccattttgcgaaatccttatctagaaaaccgaaaaggagcttcatcggtttggggaaagttgttgaggggttgatttctgcagaagatcttgagaaggattttggttttcatttcccgtggggcaaaacttggaaagcaaccaagtgtcacgccgggttcttgatgcagtttccttctcaggagaagttagatgagatgattaattttcctggacttaaaatgaaaatgtccggggcaaaaatttcagtctcttattggagctcacaggctaaacctaaatccaagcttcattttgtgtggattgtggcggaaaatgtccctgaggaactccaaaattaccaagctatttgtgagttggggtcaacaattgggtctgttgaagaggtggatatcttatctttagacactaaagatattgtgagattcaaagtgcatgtcaaaagtgttgctatgattccaccaattatagaggtaggtgttaaacccttcctctatgacatatactttaaaattgatgatatcactaatgagggatggaatgatgaatctataaatcttggtgatagtcgcctagagggggggtgaatagggcgaaactgaaatttacaaatataaacacaactacaagccggggttagcgttagtaataataaatgagtccgcaagagaggacgcaaaacaaatcgcaagcaaataaagagagtgacacgtggatttgttttaccgaggttcggttcttgcaaacctactccccgttgaggaggccacaaaggccgggtctctttcaacccttccctctctcaaacggtccctcggaccgagtgagctttccttcttctcaatcaaccgggaacaaaacctccccgcaagggccaccacacaatcggtgcctcttgcctcggttacaattgagtgttgatcacaagagcaaaagagaaagaaagaatgcgatccaagcgcaagagctcaaaaaacacggcaaatctctctcgctagtcactaaaggcttgagtggaattggagaggatttgatctctttgtatgtgtctagaattgaatgcctagctcttgtaagtggttgagaagtgggaaaacttggatggcaatgaatgtggagtggtttgggtatttatagccccaaccaccaaatgtggccgttgctgggagctctctgttcgatggcgcaccggacagtccggtgcacaccggacagtccggtgccccctgccacgtcatcgttgccgttggattctgaccgttggagctctgacatgtgggcctgccgaggtgtccggtgcacaccggacatgcactgtttgatgtccggtgcaccggtatgggcgcgcctgccgactgcgcgcgcagagcgcgcattaaatgcgctagcaggtgaccgttgtcgcggaagtagccgttgctccgtggttcaccggacagtccggtgcacaccggacagtccggtgaattatagcggagcggctgccgcgcgaacccgaggctggcgagttccggaggccgcggttccttggagcaccggacatgtccggtgcacaccggacagtccggtgaattatagcgcgccggcttccgagaattcccgaaggcgaagagtttgggtctaagtcccctggtgcaccggacaggtactgttcactgtccggtggcacaccggacagtccggtgcgccagaccaggggtgccctcggttccccctttgctcctttattgaatccaaaacttggtctttttattggctgagtgtgaaccttttgcacctgtataacttatacactagagcaaactagtcagtccaatatttgtgttggacaattcaaccaccaaaattatttaggaactaggtgtaagcctaattccctttcaatctccccctttttggtgattgatgccaacacaaaccaaagcaaatatagaagtgcataattgaactagtttacatgacgtaagtgcaaaggttacttggaattgagccaatataactacttacaagatatgcaaggaatgtttctttcttatgtaacattttggaccacgtttgcaccacatgttttgtttttgcaaattctttttgtaaatccatttcaaagatcttttgcaaatagtcaaaggtacatgaataagagtttgcaaagcattttcaagatttgaaattgtctccccctattttaaatgctttttctttgactaaacaaaactccccctaaaagagatccacctcttagtgttcaagagggttttgatataccatttttgaaatactactttctcccccttttgaacacaataggataccaaatgatgaagacttttggaaagcactaagttttttgaatttggtggtggtggtgcggtccttttgctttgggctcatttctccccctttttggcatgaatcgccaaaaacggaatcattagagccctcgaagtgcaatcttccctttggtcataaataagtgagttaagattataccaaagacgaagtccttttgcgtttgagcttttactctctcccccaaggatgaagtccttttccttgatgctcatttctcccccaaggacgagagagttgctcggagtgatggcgaagcatgagttacggagtggaagcctttgtcttcgctgaagactccaatttcctttcaatatacctatgacttggtttgaaatcgacttgaaaacacattagtcatagcatataaaggagatatgatcaaaggtattcaaaagagctatgtgtgcaagctttagcaaaagaaatttctagaatcaagaatattgagctcatgcctaagtctggtaaaagattgttcatcaagtggcttggtaaagatatcggctaattgatctttagtattaatgtaagaaatctcgatatcccccttttgttggtgatccctaagaaaatgataccgaatggctatgtgcttagtgcggctatgctcgacgggattgtcggccattttgattgcactctcattatcacatagcaaagggac

SEQ ID NO: 5621 - DNA, 553 bp, Zea Mays
ggatgataaggcgccttgagaagcagcaacgttcaaatggtgatggtttcagcaataatttgtcaaaattgtgagaaaatcttgaatatgtcagattcttcccaaagaatgaaaaatatgtctcgcttttcactggagggaatagctcagatattattcaagagaggaataaatggtgtaaacatatcaaggagaatctcatggctactgcagcaaactaaaaagatttagaagagctaacaagcgatgatgataccttggatgtgagtgatgatgactttatgtctggaagttcaagcaatgaagaggctgatgatgagtggactgacaaaagtgctaaggaaccagcttccagtgcttcaggtagggcagcatctggcatgtcaagcgatgaaaagaaccaggcatggtgaatattcccaaagcgcgtgaatcgtggtgcgtggaacgaacctgagattcccagcaaagtttgactttccagcatggtcaattcggagagaagaaaaaaaaaacacagcatgtgcgatgtgcctgagcaagttgattgatc

SEQ ID NO: 5622 - DNA, 597 bp, Zea Mays
ggcgccttgagaagcagcaacgttcaaatggtgatggtttcagcaataatttgtcaaaattgtgagaaaatcttgaatatgtcagattcttcccaaagaatgaaaaatatgtctcgcttttcactggagggaatagctcagatattattcaagagaggaataaatggtgtaaacatatcaaggagaatctcatggctactgcagcaaactaaaaagatttagaagagctaacaagcgatgatgataccttggatgtgagtgatgatgactttatgtctggaagttcaagcaatgaagaggctgatgatgagtggactgacaaaagtgctaaggaaccagcttccagtgcttcaggtagggcagcatctggcatgtcaagcgatgaaaagaaccagcgttagagagatgctcgagttcttatgccaccaccacgctcattagcaccaaatagagctagacatgcagataaacgtgtgatatccagctcaagcaatacttcaaacagcacaagcggtgaatcatttaaaaatagaagagtaccaaatcgacctggggataataacagtaatctgagttcaaattctgatgcaattaaac

SEQ ID NO: 5623 - DNA, 1456 bp, Zea Mays
atttgaagtcacttcctcaagccacaccaaattgccatcttctccttcagctttcagctttgctaactgtgtaaccaagtcaggcccactgctggtagtacctaacagtgcttggcaattggcataacaaataccagtattgtagtactgtatttatttattcttaattggattgctatctgccaacagtttttcttcatgaatcatgattgtgcctctgtcacaaacccaaccaacatcaatccttgccttcaaggcctcggatggatattttgcaggaagtgcatatcagaggagtttgtaaataaggaagtgtgctgctgccctgtttgtagcattgacttgggctgtgctccactggagaaactcagaattgatcatagcctacagtatgtaaggtcaaaggtatttccttctaaaaaacgaaaggttgaggatccagaagtcacatcgccaattacatcacctataaagacgaaacactcaaccttgcggggcagtagtaatatcacaaaaaaatctggggggtggagacctttagggtgtcactttcgagcagctaaaaagaaaaggtctcttagacctaaatcagacgatataaagacagctggaaaaaggactgatgatccagttgatgtaactcttgccagtcaagcaaagactaggaagcagattacaagacgtggaaatctggagaagagaactggaaccaagaaagtattgattttaaagggaaaacagaaaaatacgaagacaaagaatacgcctaataagaggagattgccagcattatggttctaccttcttgctgcttttgaccagaaaggacatcctcctctgccgcagataccatcaaaatttctgaggatcaaggatgtaaatttgcctgcttccttcatacagaaatacctcgcgcagaaacttaatctttcaagtgaaactgaggtggagatattctgcggtggcagaccagtgagcccagggatcaccctgcacgacctagcagaccactggattggcaaacgatcgaagggccgagtgcggtcatctgtgggcacgcccgccgctgaattcgtgctgaaggtattttacgccaggtcaggagcgccccttccaaaaactgaaagcaaccaagactgatggagagcttcgagcttcccttcgtttcagaaccagcagtgtatcgtttgactcgtaggaccaattgattaatggtatcttagtaacatgtacatagatgttagtgtcacggattagaagctcccatgggcttactgttatatatatccccctagttcagtgcatttttaccgcttatatttttactgacaaagtgtgtagtatctaggctgtgtaattaaaactggatgagatgtcgagatagagtcaaatttcaagttgcactggttcagctggtatgaatcctggctgaaccggttttaaacctgctcaactt

SEQ ID NO: 5624 - DNA, 532 bp, Zea Mays
tttttttctgcagtaactaaggtggagatattctgcggtggcagaccagtgagcccagggatcaccctgcacgacctagcagaccactggattggcaaacgatcgaagggccgagtgcggtcatctgtgggcacgcccgccgctgaattcgtgctgaaggtattttacgccaggtcaggagcgccccttccaaaaactgaaagcaaccaagactgatggagagcttcgagcttcccttcgtttcagaaccagcagtgtatcgtttgactcgtaggaccaattgattaatggtatcttagtaacatgtacatagatgttagtgtcacggattagaagctcccatgggcttactgttatatatatccccctagttcagtgcatttttaccgcttatatttttactgacaaagtgtgtagtatctaggctgtgtaattaaaactggatgagatgtcgagatagagtcaaatttcaagttgcactggttcagctggtatgaatcctggctgaaccggttttaaacctgctcaactt

SEQ ID NO: 5625 - DNA, 1265 bp, Zea Mays
tcgatcgcaaatcgggaggagaagcacactctgagccccagcatcgcgaccccggcggccggctgcgcctgcggggcaggaatccgcggcaccgcgtgggcgcgatctggcggccgttggatgtggatggaacggacgggccaggttcaacgtgggggcgttgatgggagcgatccgaggcgaggccgtgtggaccaatcagcgcgctgcgtgggactctgctcgtcttcgtgccgtcgccactatttaagcaccgcttcgtctactccggcctactcacccagcaccgcagagctctcatcctctctctctctctctttctcgcgctcgctttgcttcctcgtcgaggtccaagttcctgcattgatggcgaccgaggtggctgagactcccgcgccgttggcggaggcggtccccgagacccccgcggaggcaccggcggcgcccgccgccgaggcgaagcctaccaaggccaagaaggcctctgcgcccaagaagcgtgccaacccgacccacccgccgtacgccgagatgatctcggaggctgtcacgtcgctcaaggagcggacggggtccagccagtacgcgatcgccaagttcgtcgaggacaagcacaaggacaagctcccgcccaacttccgcaagctcctgctcggccagctcaagaagctcgtcgccggcggcaagctcaccaaggtgaagaactcctacaagctgcccgcacgcgccccggccgccgccaagccgaagcccaagtccaagaccgctgtgaagaagcccaaggccggtgccaagaagcccaaggccgccaccaagcccaagccgaagcccaaggccaagtcccccgccaagacgtcagccaaggacacgcccgggaagaaagcggcgcccgccaagaagcccgccgctgcggccaagaaggcccctgccaagaaggccgccccagccaagaaggctgcgaccccgtcgcggaaggcgccggcgacgatgacgaaccagtgtgtgttattattattagaagacaacgttgtatttctgtagctgaattgttgagttgcggatatcattgtgctgctaaggttaatgtgacgataaagttaatgtcaagagttaccttccttcgcgtgtatgtactctgattattcaggctgtttttggctgggattaatctggtcttatctgaattccctatctgaaatagagaattgttcggtgtgcattttgtgaccaacctgctcatgcaaacatgttgctttcgttgtacg

SEQ ID NO: 5626 - DNA, 1055 bp, Zea Mays
gaggtccaagttcctgcattgatggcgaccgaggtggctgagactcccgcgccgttggcggaggcggtccccgagacccccgcggaggcaccggcggcgcccgccgccgaggcgaagcctaccaaggccaagaaggcctctgcgcccaagaagcgtgccaacccgacccacccgccgtacgccgagatgatctcggaggctgtcacgtcgctcaaggagcggacggggtccagccagtacgcgatcgccaagttcgtcgaggacaagcacaaggacaagctcccgcccaacttccgcaagctcctgctcggccagctcaagaagctcgtcgccggcggcaagctcaccaaggtgaagaactcctacaagctgcccgcacgcgccccggccgccgccaagccgaagcccaagtccaagaccgctgtgaagaagcccaaggccggtgccaagaagcccaaggccgccaccaagcccaagccgaagcccaaggccaagtcccccgccaaggcgaagcccgccgcaaagcccaaggcggccgccaagccgaaggccaagccagctgccaaggctaagccgaaggctgccgcggccaagccgaagccagctgccaagaaggccggccgccccgccaaggccgccaagacgtcagccaaggacacgcccgggaagaaagcggcgcccgccaagaagcccgccgctgcggccaagaaggcccctgccaagaaggccgccccagccaagaaggctgcgaccccgtcgcggaaggcgccggcgacgatgacgaaccagtgtgtgttattattattagaagacaacgttgtatttctgtagctgaattgttgagttgcggatatcattgtgctgctaaggttaatgtgacgataaagttaatgtcaagagttaccttccttcgcgtgtatgtactctgattattcaggctgtttttggctgggattaatctggtcttatctgaattccctatctgaaatagagaattgttcggtgtgcattttgtgaccaacctgctcatgcaaacatgttgctttcgttgtacg

SEQ ID NO: 5627 - DNA, 2114 bp, Zea Mays
ccaaaattgagagtgacaaaatagcaaatttctccacacggacacagcagcgagagaagagagtccactgtccaccccaccagaaaaacgcattccgcagacgcgcggcgagggagtaggaggggacggcgggtgccgaggcccgcaggcacggggaagctacctgcttgcgtagccgggcgggctcgcgctgtgctgtcgctccatgtcggtcgccggcgagagcggcggggatccggcggcggcacgccgccggtgggatctctccaacaagggccccgacagcactccaatgttgaaagaggctgtggaaatgtctacagatgaagaatcggatggcgttgttatatgccatccgaatggtaacactgatggatgtgacgaagccattagtggcagtcatgatgatgatagcccagaaggccaggaaactagttccatcaaggaccctgatgtagaaggtgacacacaggaagacaagtgtgtaaatcaagattcactgaagttgattgatcaagagacgtctgctccccccaagtccccagcgaagtccgcgactgcgagttctggaccagagaagcctaaacgtgttgtcacccaaccattgtctctttctactcaacgaaggtcatctggagtaaatggtggtgtgaccaatccatcacccaataaggataaatctggtgataaaagtagcatctctccagcaagcatgacaaagaagtgtacgccgttggcacctaggaagactttgcagcctgagcaagcatttcaccctctggaagaggactcttgttctgtgacttcctcgtatcctttttctgtgtgctaagattttgttgagcatctcatccctttttatgctatttcatagctatgcagctaatatttttaactttcggtatataaccttcggatgtttcatacctatacttacataaggatggaatagtaaatattcatgtttgtagatgaccataaaatcacatggtgtttttctcttaattaagcaccagattcttcgatgtttcacagtaaataatgatgaacgctcatactcatgcacttctcttctgtgaacatgaaaaagttttcaaaacgatgcttttctgtatctactgaacttacaatgttttgtggtgctcaatattttttcaagatgatgaccatttcatagttaaatgtttaaattcagaaacacatgaattttacaagtgttctgagttgcatgtggcccttttcctaagctgtgtaaaggactacaacatcatcaagagctggcagaactaagacaactgttcctgttgccccatcatttgtgtgtgctaaccgtgctgacaagaggaaggagttctacacaaaattagaggagaaacataaagctttggaagcagagaaggacgaggctgaggccaggaaaaaggaagagcaagacgttgctataaagcaactaaggaagtcattggtgattagagcgaaacccatgccaagcttctatcaagaaggccccccaccaaaggctgaacttaagaaggtgcctcctactcgtgccaaatcaccaaagtttacaagctcaaggagaaagagctgcaatgacacaccacagacacccgagggaaaaaacaccaacgcaacatctaccacccggccacatcgtcacagcatcggggcttctaaagatgccagcagagtacagtgctcgccgaagagcggcgtggcgaccaaaactagatctgtcaagcctgagctgaaggccctctgaagcgcatgcgtagcattcaagtgctgcgattgtctctgtacaaacagaatcgcctgactcttagccgtttccatttgcatgcattttttttgttttgttttgttctatacccagcatctccaccaaaaagaaggctgtagggccaatgacgttgttcgcgctgctggaccttgtctccattttcgtcttgtactcgttaagaactctgttgctgctgggaccatgtgacattcattccatgtaaattacctggggatcccggtagggagctcgactggtgttttggtcttgtgaagtcctcaatgccttaactaatctgtgagctgaaaaactatcgatttggcattgttac

SEQ ID NO: 5628 - DNA, 1611 bp, Zea Mays
aaaatagcaaatttctccacacggacacagcagcgagagaagagagtccactgtccaccccaccagaaaaacgcattccgcagacgcgcggcgagggagtaggaggggacggcgggtgccgaggcccgcaggcacggggaagctacctgcttgcgtagccgggcgggctcgcgctgtgctgtcgctccatgtcggtcgccggcgagagcggcggggatccggcggcggcacgccgccggtgggatctctccaacaagggccccgacagcacatgaagaatcggatggcgttgttatatgccatccgaatggtaacactgatggatgtgacgaagccattagtggcagtcatgatgatgatagcccagaaggccaggaaactagttccatcaaggaccctgatgtagaaggtgacacacaggaagacaagtgtgtaaatcaagattcactgaagttgattgatcaagagacgtctgctccccccaagtccccagcgaagtccgcgactgcgagttctggaccagagaagcctaaacgtgttgtcacccaaccattgtctctttctactcaacgaaggtcatctggagtaaatggtggtgtgaccaatccatcacccaataaggataaatctggtgataaaagtagcatctctccagcaagcatgacaaagaagtgtacgccgttggcacctaggaagactttgcagcctgagcaagcatttcaccctctggaagaggactcttgttctgtgacttcctcgactacaacatcatcaagagctggcagaactaagacaactgttcctgttgccccatcatttgtgtgtgctaaccgtgctgacaagaggaaggagttctacacaaaattagaggagaaacataaagctttggaagcagagaaggacgaggctgaggccaggaaaaagagcaagacgttgctataaagcaactaaggaagtcattggtgattagagcgaaacccatgccaagcttctatcaagaaggccccccaccaaaggctgaacttaagaaggtgcctcctactcgtgccaaatcaccaaagtttacaagctcaaggagaaagagctgcaatgacacaccacagacacccgagggaaaaaacaccaacgcaacatctaccacccggccacatcgtcacagcatcggggcttctaaagatgccagcagagtacagtgctcgccgaagagcggcgtggcgaccaaaactagatctgtcaagcctgagctgaaggccctctgaagcgcatgcgtagcattcaagtgctgcgattgtctctgtacaaacagaatcgcctgactcttagccgtttccatttgcatgcattttttttgttttgttttgttctatacccagcatctccaccaaaaagaaggctgtagggccaatgacgttgttcgcgctgctggaccttgtctccattttcgtcttgtactcgttaagaactctgttgctgctgggaccatgtgacattcattccatgtaaattacctggggatcccggtagggagctcgactggtgttttggtcttgtgaagtcctcaatgccttaactaatctgtgagctgaaaaactatcgatttggcattgttac

SEQ ID NO: 5629 - DNA, 1615 bp, Zea Mays
aaaatagcaaatttctccacacggacacagcagcgagagaagagagtccactgtccaccccaccagaaaaacgcattccgcagacgcgcggcgagggagtaggaggggacggcgggtgccgaggcccgcaggcacggggaagctacctgcttgcgtagccgggcgggctcgcgctgtgctgtcgctccatgtcggtcgccggcgagagcggcggggatccggcggcggcacgccgccggtgggatctctccaacaagggccccgacagcacatgaagaatcggatggcgttgttatatgccatccgaatggtaacactgatggatgtgacgaagccattagtggcagtcatgatgatgatagcccagaaggccaggaaactagttccatcaaggaccctgatgtagaaggtgacacacaggaagacaagtgtgtaaatcaagattcactgaagttgattgatcaagagacgtctgctccccccaagtccccagcgaagtccgcgactgcgagttctggaccagagaagcctaaacgtgttgtcacccaaccattgtctctttctactcaacgaaggtcatctggagtaaatggtggtgtgaccaatccatcacccaataaggataaatctggtgataaaagtagcatctctccagcaagcatgacaaagaagtgtacgccgttggcacctaggaagactttgcagcctgagcaagcatttcaccctctggaagaggactcttgttctgtgacttcctcgactacaacatcatcaagagctggcagaactaagacaactgttcctgttgccccatcatttgtgtgtgctaaccgtgctgacaagaggaaggagttctacacaaaattagaggagaaacataaagctttggaagcagagaaggacgaggctgaggccaggaaaaaggaagagcaagacgttgctataaagcaactaaggaagtcattggtgattagagcgaaacccatgccaagcttctatcaagaaggccccccaccaaaggctgaacttaagaaggtgcctcctactcgtgccaaatcaccaaagtttacaagctcaaggagaaagagctgcaatgacacaccacagacacccgagggaaaaaacaccaacgcaacatctaccacccggccacatcgtcacagcatcggggcttctaaagatgccagcagagtacagtgctcgccgaagagcggcgtggcgaccaaaactagatctgtcaagcctgagctgaaggccctctgaagcgcatgcgtagcattcaagtgctgcgattgtctctgtacaaacagaatcgcctgactcttagccgtttccatttgcatgcattttttttgttttgttttgttctatacccagcatctccaccaaaaagaaggctgtagggccaatgacgttgttcgcgctgctggaccttgtctccattttcgtcttgtactcgttaagaactctgttgctgctgggaccatgtgacattcattccatgtaaattacctggggatcccggtagggagctcgactggtgttttggtcttgtgaagtcctcaatgccttaactaatctgtgagctgaaaaactatcgatttggcattgttac

SEQ ID NO: 5630 - DNA, 1392 bp, Zea Mays
atcaatgccgaccgtttgggtcgctagacggtcgccacgcccgcggtccagcgttggcatccgtcctgcaagcctgcaacccaaccttgaaccttgcctgttcttcttcgatttattagcccagcgttctccctctctcgtgggcgtggcgacgacttggaggccatcgctgccgccctacgccaggtgcccagatcatctgcggccccttcgccggcgacgatcaccatccatcaggatcaagcgcttgaacttacagcgagatggaaaatgatagaaggcaacttggtcagatcgatccaagaagagcccgctttccttgctgcatagtatggactccaataccattcatcacttggttggtgccctttatcggtcacattggcatctgcagagaagacggtgtaattctggacttctctggtccacattttgtatcagttgacaattttgcattcggagctgttgcgcgctacattcaagtaaactgcgatgagtgctataagcttattgaacctgaaggagatgccacgtgggacggcgcgctgaagaaaggcacgcaggagttccaaaacaggaactacaacctgttcacctgcaactgccactcctttgtcgcaaacaatctgaacaggctgttttattccggccacgacgaatggaatgtggtcagcttggctgctgtgatgttcttacgaggccgctgggtgagcacggcatcggtggtgaagaccttattgccatttgcagttgtgctttccatcggtaccttccttggcggcacgaccttcctgaccggccttcttgctttcgccgctgcgatgactgtctggttccttgtgggcacctactgcatcaaaggtctcatagagttgtgattagagtatgttagactcgttgtagggggttcaagggtggcatatttttaagagttcaagcgtggcacatttttatttgtattgcattcctgtataatggattcttgatgttattcatgcacctatatgttccaaattccgaatgaattgatgcacttgtctgttgattcccttcatttgtgctgtcgaaggatcatgctacagccagatgcccagaactctatgttacatgaccatgttttgaattcagggtttaaatcaagaaaagcctgcgttcagtacagatttctacttgccgatttgccatgggctgtcacctactcacccaagttcagtgacctcgacgaatcaggaccagatttttcatttttcagcggccaacgtggctgcatctcaaatctacacagcactcattttgctggaagatgggaattcgcacgaccaaagcacgcggtatgtcacatattcacatgcagttcagaatgaactatgaaggaattctgcatgaatggag

SEQ ID NO: 5631 - DNA, 1353 bp, Zea Mays
ctcttcccttcctgctgtgagaaacagggcatccaaaccctatcttgctatttgcatccggatcttatctaaatagcgtatatatgcatgtattatatgcctactaacttggattctttcccaaaattatcatttccattactgggtccgcccctggttggatcgctggttttggggcaacgcctcgtccataaataggatcaagcgcttgaacttacagcgagatggaaaatgatagaaggcaacttggtcagatcgatccaagaagagcccgctttccttgctgcatagtatggactccaataccattcatcacttggttggtgccctttatcggtcacattggcatctgcagagaagacggtgtaattctggacttctctggtccacattttgtatcagttgacaattttgcattcggagctgttgcgcgctacattcaagtaaactgcgatgagtgctataagcttattgaacctgaaggagatgccacgtgggacggcgcgctgaagaaaggcacgcaggagttccaaaacaggaactacaacctgttcacctgcaactgccactcctttgtcgcaaacaatctgaacaggctgttttattccggccacgacgaatggaatgtggtcagcttggctgctgtgatgttcttacgaggccgctgggtgagcacggcatcggtggtgaagaccttattgccatttgcagttgtgctttccatcggtaccttccttggcggcacgaccttcctgaccggccttcttgctttcgccgctgcgatgactgtctggttccttgtgggcacctactgcatcaaaggtctcatagagttgtgattagagtatgttagactcgttgtagggggttcaagggtggcatatttttaagagttcaagcgtggcacatttttatttgtattgcattcctgtataatggattcttgatgttattcatgcacctatatgttccaaattccgaatgaattgatgcacttgtctgttgattcccttcatttgtgctgtcgaaggatcatgctacagccagatgcccagaactctatgttacatgaccatgttttgaattcagggtttaaatcaagaaaagcctgcgttcagtacagatttctacttgccgatttgccatgggctgtcacctactcacccaagttcagtgacctcgacgaatcaggaccagatttttcatttttcagcggccaacgtggctgcatctcaaatctacacagcactcattttgctggaagatgggaattcgcacgaccaaagcacgcggtatgtcacatattcacatgcagttcagaatgaactatgaaggaattctgcatgaatggag

SEQ ID NO: 5632 - DNA, 1971 bp, Zea Mays
cgggcgctgcagtagcgcagcgcagccacgccgcggcaacagcaacaccgcaccatggcgcttcttcttcatccccgcctcccgtcccatcctttccgcgcggcagcccaccaccaccacgccatctcggacgcctcttgcttccttaccctccacggccccggaaggaagcgccgcatgctgctcgcggcggtcacgtgccgcgcagccagggtcaaggagcccgctccgagcgcaggcgcctcgcctccgccgccgccacaggcgctgacgaaggaggcgcacaagtacttcgaccacgccgtggtcaccgtccgcgcgggcgacggcgggcacggcgccgtgctcgccatgccgccggcgccctccgcggacgccgccaagccccgcggcaggttcaaccggggcgagaagaagagcaagaaggtgtcgtacaagcgcaactacgacgggtccgtggcgctgccgacgggcgggcacggcggcgacgttgtggtgtacgccgacgaggccgaggagacgctgctgcggttccacgagaaggcgcggtactgcgccaaacggggagggaacgtgggcgccgctggcggcacgctcagctcgcggatgcacagcgggttcgccggggagacgctcaggatacccgtgcctgtaggaactgttgtgaaacgcaagaagggggctgttctggcggatttggctcatcactgtgatgaagtgctcgttgctagaggtggacagggcggaatcagcttgattgatgtgcctgagtacaagaggaggaaagccatggctttatccccaaacatcatgcgagatactagtgacaaagtattaacgcatggtcaacctggtgaggaagtaagcttggagttgatcttaagggtagttgctgatgttggccttgtgggacttccaaatgctggaaagtcaacacttctatcagctataacacttgcaagaccagacattgctgattatccattcactacattaatgcccaatcttggccgacttggtggagatcctgctttaggggcgttacagttttcctcagaagcaacattggcagatttgccaggtctaattgagggcgctcatctaggaaagggccttggccgcaatttcttaagacatttaaggagaactagagtaatcgtccatgttgtcgatgctgctgcagatgaccctgtcaatgattataagattgttagagaagaattaaggatgtataacccccaatacctggagcgaccttatgttgtggtcctcaacaaaattgatcttcctaaggcccaagatagactatctgcactggtcttagagatatcttcaattggatgtgaagaagggcatgagcaaagtggcagcaaagataacctaaatggacgagtaagtgatcatcaggtcttatcagaggctaaagctgaaggtgttgaaaaggagctcggggactatccaagacctgaagctgtcgtggctgctagcgtattgaggcatatcgggatcgacgagatgctgaaggagataagggcagccctgagaaaatgctttgatcacaagttaccagaacattgagcaaattaaatccatggagagttttctgaagcaacggcaccagcggtttctgaagggtgaaaacactaatgctggagcacagcggtttttcaggcgtcgtttgtaacacgggttctccagtgaaatttctgcgaaaattgaatttgttgtcgtccacagctgccgtttgtaggtgacagtacaacgtatgtgaatagattagtttgagttatgtcggcgctgtcattgtatcattcgtctccaatctgcgcagatttgcagtgtagcattcatctcttgtctgcacagatgcacgatgcggcatttgtcttctgtggtttcagtcctgtgtactacaagaaatacactttgatggaactatcgctttgtgacaacaatttcatttcacgaatc

SEQ ID NO: 5633 - DNA, 1906 bp, Zea Mays
atgaggattgaccccacccgcagcagcaataacacaactaaaacgttatctggtggacctgcaggctccgttttgaaagttgaaactcgtggggtgcgccgctccgcagttcgcaagtccaacggcaacgcccattggctctgcagttcaaacaagcttgcaccgccgagactcgaggtcggcacggccggttgcgcttgcgccgggaaggcagctacgtgccaggctgacgcgtgcgcggccggctgattcgcacaatgcacgagccgtcagcttgcgccagcgcatgcagatgcaggcgcgccgcgcgcggccggcccgagcatatccactggatgcgggcgtcgattccgtggcgcactccgccagccttgccccctcctccgtccaacgcctcgcgccgcggcggccggccgcctccctcgtctcgcctgcagtctactccctaaaaagaagcaaatgctaagccaccaagcagagcagagcagagctgcggaaccgcaccaaggtccatcgcccgccagtccaccaccgctgctgtcctatggcggggaccggcggcgagggtgcggtcgggaaggtgacttgcgcggcatggatacggcggcgggacgactacggcgggccgcccggcgtctcccgtcttctcgtggcgttcggccgccggtccacggcctcgtccccgccgctcgtcgacctcctcgagttcgacgccaaggcatccgcactcgcctccgagtccgagcccctggcgagggtcaccgtgggtgaggatgcagcggacacgccgcgcgcgatcgccgtgcatcccggcggccgggagctcgtctgcgcaaccgccaaagggtgcaggctctttaatctagtttataaagacttcggtgttcaccttatttcaagagatgcttcacctctccaatctgttgggcctcaaaaatgtttagcattcagcactgatggtgctaagtttgctgttggtggtgaggatggacatctcagaatatttcattggccaagtcttattacgattttagacgaacctaaagctcacaaatccttccgtgacatggacatcagactcaaagtttttagtttcatcatccactgatggctctgcaagaatatggaacattgatgaggggtctccactaaccaatttgacaagagcttcggatgagaagattgagtattgccgcttttctagggatggagccaaacctttcctgttttgcacacttgtaaaaggtcatgatgttttgactatggcggtggacataagtaattggaagagaatcggttacaaaagattttcagcaaagcccatttccacactcgcaattagcttggatgggaagtatcttgcactaggaaaccgtgatggcgacttttgcgccgtagaagtaaagaagatggaggttgctcactggagcaagaaggttcatcttggcttcccagtttcctccattgagttctgccctagtgaaagggttgtaatctccacctcacatcaatggggagcagagataacaaagctcgacgtccctcctgaatggaaagtgtggcagatctggctggcgctgctgagcctcttcgtgtcgtcggccgtcctcttctacgccttcttcacgcacgcgaggctcaacctgaggccgtagaagaagacagccagtcacctctcaaaatctctgatggcgagtcctcaaggcatgagggctgttgccgactgcgaccacacctcgctgtttgctgcggcgtgctttgtacctgaacccgttcctggttttcacaccttgtgttacagatagacaacagatgagattgctcttgacctctctcaataataattgacggaagaagcacggtgcattctgccctgcttcgctgggcagcgtactattcaacccga

SEQ ID NO: 5634 - DNA, 2120 bp, Zea Mays
atgaggattgaccccacccgcagcagcaataacacaactaaaacgttatctggtggacctgcaggctccgttttgaaagttgaaactcgtggggtgcgccgctccgcagttcgcaagtccaacggcaacgcccattggctctgcagttcaaacaagcttgcaccgccgagactcgaggtcggcacggccggttgcgcttgcgccgggaaggcagctacgtgccaggctgacgcgtgcgcggccggctgattcgcacaatgcacgagccgtcagcttgcgccagcgcatgcagatgcaggcgcgccgcgcgcggccggcccgagcatatccactggatgcgggcgtcgattccgtggcgcactccgccagccttgccccctcctccgtccaacgcctcgcgccgcggcggccggccgcctccctcgtctcgcctgcagtctactccctaaaaagaagcaaatgctaagccaccaagcagagcagagcagagctgcggaaccgcaccaaggtccatcgcccgccagtccaccaccgctgctgtcctatggcggggaccggcggcgagggtgcggtcgggaaggtgacttgcgcggcatggatacggcggcgggacgactacggcgggccgcccggcgtctcccgtcttctcgtggcgttcggccgccggtccacggcctcgtccccgccgctcgtcgacctcctcgagttcgacgccaaggcatccgcactcgcctccgagtccgagcccctggcgagggtcaccgtgggtgaggatgcagcggacacgccgcgcgcgatcgccgtgcatcccggcggccgggagctcgtctgcgcaaccgccaaagggtgcaggctctttaatctagtttataaagacttcggtgttcaccttatttcaagagatgcttcacctctccaatctgttgggcctcaaaaatgtttagcattcagcactgatggtgctaagtttgctgttggtggtgaggtatgagctcatcttttcttgttattccaatttccaattatttaaccttttttactatattaatgatgttatatgagtttcatttttgtttgaagtattgatcatccatatggtggtaattttcgaaataacttttcttcaagagtcatgacatatggtttactaaattttgaatgttacatctacaattcactagcctatttcacaatgacaggatggacatctcagaatatttcattggccaagtcttattacgattttagacgaacctaaagctcacaaatccttccgtgacatggacatcagactcaaagtttttagtttcatcatccactgatggctctgcaagaatatggaacattgatgaggggtctccactaaccaatttgacaagagcttcggatgagaagattgagtattgccgcttttctagggatggagccaaacctttcctgttttgcacacttgtaaaaggtcatgatgttttgactatggcggtggacataagtaattggaagagaatcggttacaaaagattttcagcaaagcccatttccacactcgcaattagcttggatgggaagtatcttgcactaggaaaccgtgatggcgacttttgcgccgtagaagtaaagaagatggaggttgctcactggagcaagaaggttcatcttggcttcccagtttcctccattgagttctgccctagtgaaagggttgtaatctccacctcacatcaatggggagcagagataacaaagctcgacgtccctcctgaatggaaagtgtggcagatctggctggcgctgctgagcctcttcgtgtcgtcggccgtcctcttctacgccttcttcacgcacgcgaggctcaacctgaggccgtagaagaagacagccagtcacctctcaaaatctctgatggcgagtcctcaaggcatgagggctgttgccgactgcgaccacacctcgctgtttgctgcggcgtgctttgtacctgaacccgttcctggttttcacaccttgtgttacagatagacaacagatgagattgctcttgacctctctcaataataattgacggaagaagcacggtgcattctgccctgcttcgctgggcagcgtactattcaacccga

SEQ ID NO: 5635 - DNA, 2555 bp, Zea Mays
atgaggattgaccccacccgcagcagcaataacacaactaaaacgttatctggtggacctgcaggctccgttttgaaagttgaaactcgtggggtgcgccgctccgcagttcgcaagtccaacggcaacgcccattggctctgcagttcaaacaagcttgcaccgccgagactcgaggtcggcacggccggttgcgcttgcgccgggaaggcagctacgtgccaggctgacgcgtgcgcggccggctgattcgcacaatgcacgagccgtcagcttgcgccagcgcatgcagatgcaggcgcgccgcgcgcggccggcccgagcatatccactggatgcgggcgtcgattccgtggcgcactccgccagccttgccccctcctccgtccaacgcctcgcgccgcggcggccggccgcctccctcgtctcgcctgcagtctactccctaaaaagaagcaaatgctaagccaccaagcagagcagagcagagctgcggaaccgcaccaaggtccatcgcccgccagtccaccaccgctgctgtcctatggcggggaccggcggcgagggtgcggtcgggaaggtgacttgcgcggcatggatacggcggcgggacgactacggcgggccgcccggcgtctcccgtcttctcgtggcgttcggccgccggtccacggcctcgtccccgccgctcgtcgacctcctcgagttcgacgccaaggcatccgcactcgcctccgagtccgagcccctggcgagggtcaccgtgggtgaggatgcagcggacacgccgcgcgcgatcgccgtgcatcccggcggccgggagctcgtctgcgcaaccgccaaagggtgcaggctctttaatctagtttataaagacttcggtgttcaccttatttcaagagatgcttcacctctccaatctgttgggcctcaaaaatgtttagcattcagcactgatggtgctaagtttgctgttggtggtgaggtatgagctcatcttttcttgttattccaatttccaattatttaaccttttttactatattaatgatgttatatgagtttcatttttgtttgaagtattgatcatccatatggtggtaattttcgaaataacttttcttcaagagtcatgacatatggtttactaaattttgaatgttacatctacaattcactagcctatttcacaatgacaggatggacatctcagaatatttcattggccaagtcttattacgattttagacgaacctaaagctcacaaatccttccgtgacatggacatcagcttagactcaaagtttttagtttcatcatccactgatggctctgcaagaatatggaacattgatgaggggtctccactaaccaatttgacaagagcttcggatgagaagattgagtattgccgcttttctagggatggagccaaacctttcctgttttgcacacttgtaaaaggtcatgatgttttgactatggcggtggacataagtaattggaagagaatcggttacaaaagattttcagcaaagcccatttccacactcgcaattagcttggatgggaagtatcttgcactaggaaaccgtgatggcgacttttgcgccgtagaagtaaagaagatggaggttgctcactggagcaagaaggttcatcttggcttcccagtttcctccattgagttctgccctagtgaaaggtaatatttctctctgttgcaagaagagacaaaccgacaggttagcattactaagcacttcattacttaagtagatatatggagggcacaagtgtcttgttgtgtagcacagggaatgagggaagggaaccttggaagagataaccagtcctgcattccgacaagaatattcattaggccctctgtcgtcgaaatagaatgaaaagtggataataaataggctacaaactcacgatataggactactttgcatatttattcatgtccaccataaatacgccaaggttttccaatgggacaagccaaaaaaaaatcatccacatgaccatatccatccatctacagctactcaaactcaacatgtctggcttttgcgcgatcctcccgcttgcactggtgatatgatacatgcattactatgatattgtagggttgtaatctccacctcacatcaatggggagcagagataacaaagctcgacgtccctcctgaatggaaagtgtggcagatctggctggcgctgctgagcctcttcgtgtcgtcggccgtcctcttctacgccttcttcacgcacgcgaggctcaacctgaggccgtagaagaagacagccagtcacctctcaaaatctctgatggcgagtcctcaaggcatgagggctgttgccgactgcgaccacacctcgctgtttgctgcggcgtgctttgtacctgaacccgttcctggttttcacaccttgtgttacagatagacaacagatgagattgctcttgacctctctcaataataattgacggaagaagcacggtgcattctgccctgcttcgctgggcagcgtactattcaacccga

SEQ ID NO: 5636 - DNA, 1143 bp, Zea Mays
gaactgtcacctcatgcctgcctgcctgaacttcactaggagtttgaagttgttttccccaatgctgaattacacattcttcaggctctttaatctagtttataaagacttcggtgttcaccttatttcaagagatgcttcacctctccaatctgttgggcctcaaaaatgtttagcattcagcactgatggtgctaagtttgctgttggtggtgaggatggacatctcagaatatttcattggccaagtcttattacgattttagacgaacctaaagctcacaaatccttccgtgacatggacatcagcttagactcaaagtttttagtttcatcatccactgatggctctgcaagaatatggaacattgatgaggggtctccactaaccaatttgacaagagcttcggatgagaagattgagtattgccgcttttctagggatggagccaaacctttcctgttttgcacacttgtaaaaggtcatgatgttttgactatggcggtggacataagtaattggaagagaatcggttacaaaagattttcagcaaagcccatttccacactcgcaattagcttggatgggaagtatcttgcactaggaaaccgtgatggcgacttttgcgccgtagaagtaaagaagatggaggttgctcactggagcaagaaggttcatcttggcttcccagtttcctccattgagttctgccctagtgaaagggttgtaatctccacctcacatcaatggggagcagagataacaaagctcgacgtccctcctgaatggaaagtgtggcagatctggctggcgctgctgagcctcttcgtgtcgtcggccgtcctcttctacgccttcttcacgcacgcgaggctcaacctgaggccgtagaagaagacagccagtcacctctcaaaatctctgatggcgagtcctcaaggcatgagggctgttgccgactgcgaccacacctcgctgtttgctgcggcgtgctttgtacctgaacccgttcctggttttcacaccttgtgttacagatagacaacagatgagattgctcttgacctctctcaataataattgacggaagaagcacggtgcattctgccctgcttcgctgggcagcgtactattcaacccga

SEQ ID NO: 5637 - DNA, 711 bp, Zea Mays
ggacatcagggatggagccaaacctttcctgttttgcacacttgtaaaaggtcatgatgttttgactatggcggtggacataagtaattggaagagaatcggttacaaaagattttcagcaaagcccatttccacactcgcaattagcttggatgggaagtatcttgcactaggaaaccgtgatggcgacttttgcgccgtagaagtaaagaagatggaggttgctcactggagcaagaaggttcatcttggcttcccagtttcctccattgagttctgccctagtgaaagggttgtaatctccacctcacatcaatggggagcagagataacaaagctcgacgtccctcctgaatggaaagtgtggcagatctggctggcgctgctgagcctcttcgtgtcgtcggccgtcctcttctacgccttcttcacgcacgcgaggctcaacctgaggccgtagaagaagacagccagtcacctctcaaaatctctgatggcgagtcctcaaggcatgagggctgttgccgactgcgaccacacctcgctgtttgctgcggcgtgctttgtacctgaacccgttcctggttttcacaccttgtgttacagatagacaacagatgagattgctcttgacctctctcaataataattgacggaagaagcacggtgcattctgccctgcttcgctgggcagcgtactattcaacccga

SEQ ID NO: 5638 - DNA, 2305 bp, Zea Mays
cgacagcgagggccggcagcggtcgtcgtcgtcgcggcggcggcgcagcccgtccccgtccgactcggacgccgcctcctccgattacagcggctccccccgacggagccgtggacgccaccgccataggagccgccgccggagggacactccgtccacctccagcgacgcgagcggcagcgggagcgaggattcgaggtcggactccggacgccgagggaggagcggcggccggaggcgccggaatgtcaccgaggagcagatcattgagtacatggcgaagaaggcgcagaagaaggcagagaaggtggcgaagaagctgaaagcgaattcggtttcaggctactccaacgattcaaacccctttggtgatcccaacctgacagagaagtttgtgtggcgaaagaagatagagcatgatgtatctcagggacagaaggtggacttttctgtcaaatccgagaagaagaaacagctagaaagaatggctgaaatagagaaggttaagaaaagaagggaagaaagagctattgaaaaggcacagcacgaagaggaaatggcgttaatagctagagaaagagcacgtgcagagtttcaagactgggagaagaaggaggaagagtttcattttgaccaaagcaaggtcaggtctgagatcaggttgcgggaggggcgtacaaagcctattgatgttctccttaagaatcttagtttctcagatgaatttgacattgagttaaatgagccttatctggtgttcaagggattaacagtgaaagaaatggaagagctatgtgatgacattaagatgcatcttgatctggacagggaaagccaaacaaatgttaagtactgggaggcactcatggtggtatgtgaatgggagctaggtgaggctcggaaaagagatgccctagatcgggctagggtccgtggtgaggaaccaccacctgaggttcttgcagaagagagaggtttgcatgcaagtattgagggggatgtaaaaagtctcctggatggtaaaacttccacagagcttgaagatatgcaaagtcaaattgagtcccaaatgcgctctggaactgcgaaagttgttgaatactgggaggctattctgaaacggcttcatatttacaaagcaaaggcttgcctgagggagatacatgcttctatcctaaggaagcatttacatcgattggagcatcctggtgctgctgaacaggatgtggattctgagaaagaagttgataataaactggaggatgaaatgcatgaggacgaagatgataaacgatattcacctgagcctatgcctcagcagacagataacgaatttgaagaggcagatggatccttttctccacagctaatgcatggcaatgaagatgaagatgcaattgatcctgaagaggacaaagctgagctggaccgaaaacgtgaagctgtagttttggagcatcaaagaaaagttcaggaagccatgaaaacaaaggcaagagtacctgatgagatggagatgaaggccataaaaacaatgggagctatggaggaaggagatgcagtatttggtgccggtgctgaagtgaaccttgattcacaggtgtactggtggcacgacaagtatcgaccaagaaagcccaagtacttcaatcgggtgcacactggatatgaatggaataaatacaaccagactcattatgaccatgataacccaccaccgaaaattgtccaaggctacaagttcaatatattttaccctgatcttgtggacaaatcgaaagcaccaacatacagtatagagaaagatggaagcgccggagagacttgcttcataagatttcacgctggacctccatacgaggatattgctttccgtattgtgaacaaggagtgggaatactcacacaagaaggggttcaagtgtacttttgagcgtgggattctccatctctatttcaacttcaagcgttaccgttacaggcgctgaaatggctcaagaggcaggggaaaactggatcgattggactggtgcgtcatgattctgctgtatgctgtggcatggataccagtcgagtatgtatcttcagtataattaggtactatgctaaatgggaacacactttttggttttactgactgattccccccttttttgaggttgtacaataatacagcatagcaagctgatagttttctaacaaactagcatgtagtctgtgctaacgctaagatctcggtaatgagaggggttgatggcggtggcaacacgagtaagaggaggggtggcggggtcgctggagaagag

SEQ ID NO: 5639 - DNA, 2213 bp, Zea Mays
ccgactcggacgccgcctcctccgattacagcggctccccccgacggagccgtggacgccaccgccataggagccgccgccggagggacactccgtccacctccagcgacgcgagcggcagcgggagcgaggattcgaggtcggactccggacgccgagggaggagcggcggccggaggcgccggaatgtcaccgaggagcagatcattgagtacatggcgaagaagctgaaagcgaattcggtttcaggctactccaacgattcaaacccctttggtgatcccaacctgacagagaagtttgtgtggcgaaagaagatagagcatgatgtatctcagggacagaaggtggacttttctgtcaaatccgagaagaagaaacagctagaaagaatggctgaaatagagaaggttaagaaaagaagggaagaaagagctattgaaaaggcacagcacgaagaggaaatggcgttaatagctagagaaagagcacgtgcagagtttcaagactgggagaagaaggaggaagagtttcattttgaccaaagcaaggtcaggtctgagatcaggttgcgggaggggcgtacaaagcctattgatgttctccttaagaatcttagtttctcagatgaatttgacattgagttaaatgagccttatctggtgttcaagggattaacagtgaaagaaatggaagagctatgtgatgacattaagatgcatcttgatctggacagggaaagccaaacaaatgttaagtactgggaggcactcatggtggtatgtgaatgggagctaggtgaggctcggaaaagagatgccctagatcgggctagggtccgtggtgaggaaccaccacctgaggttcttgcagaagagagaggtttgcatgcaagtattgagggggatgtaaaaagtctcctggatggtaaaacttccacagagcttgaagatatgcaaagtcaaattgagtcccaaatgcgctctggaactgcgaaagttgttgaatactgggaggctattctgaaacggcttcatatttacaaagcaaaggcttgcctgagggagatacatgcttctatcctaaggaagcatttacatcgattggagcatcctggtgctgctgaacaggatgtggattctgagaaagaagttgataataaactggaggatgaaatgcatgaggacgaagatgataaacgatattcacctgagcctatgcctcagcagacagataacgaatttgaagaggcagatggatccttttctccacagctaatgcatggcaatgaagatgaagatgcaattgatcctgaagaggacaaagctgagctggaccgaaaacgtgaagctgtagttttggagcatcaaagaaaagttcaggaagccatgaaaacaaaggcaagagtacctgatgagatggagatgaaggccataaaaacaatgggagctatggaggaaggagatgcagtatttggtgccggtgctgaagtgaaccttgattcacaggtgtactggtggcacgacaagtatcgaccaagaaagcccaagtacttcaatcgggtgcacactggatatgaatggaataaatacaaccagactcattatgaccatgataacccaccaccgaaaattgtccaaggctacaagttcaatatattttaccctgatcttgtggacaaatcgaaagcaccaacatacagtatagagaaagatggaagcgccggagagacttgcttcataagatttcacgctggacctccatacgaggatattgctttccgtattgtgaacaaggagtgggaatactcacacaagaaggggttcaagtgtacttttgagcgtgggattctccatctctatttcaacttcaagcgttaccgttacaggcgctgaaatggctcaagaggcaggggaaaactggatcgattggactggtgcgtcatgattctgctgtatgctgtggcatggataccagtcgagtatgtatcttcagtataattaggtactatgctaaatgggaacacactttttggttttactgactgattccccccttttttgaggttgtacaataatacagcatagcaagctgatagttttctaacaaactagcatgtagtctgtgctaacgctaagatctcggtaatgagaggggttgatggcggtggcaacacgagtaagaggaggggtggcggggtcgctggagaagag

SEQ ID NO: 5640 - DNA, 2207 bp, Zea Mays
cgacggagccgtggacgccaccgccataggagccgccgccggagggacactccgtccacctccagcgacgcgagcggcagcgggagcgaggattcgaggtcggactccggacgccgagggaggagcggcggccggaggcgccggaatgtcaccgaggagcagatcattgagtacatggcgaagaaggcgcagaagaagaggcagagaaggtggcgaagaagctgaaagcgaattcggtttcaggctactccaacgattcaaacccctttggtgatcccaacctgacagagaagtttgtgtggcgaaagaagatagagcatgatgtatctcagggacagaaggtggacttttctgtcaaatccgagaagaagaaacagctagaaagaatggctgaaatagagaaggttaagaaaagaagggaagaaagagctattgaaaaggcacagcacgaagaggaaatggcgttaatagctagagaaagagcacgtgcagagtttcaagactgggagaagaaggaggaagagtttcattttgaccaaagcaaggtcaggtctgagatcaggttgcgggaggggcgtacaaagcctattgatgttctccttaagaatcttagtttctcagatgaatttgacattgagttaaatgagccttatctggtgttcaagggattaacagtgaaagaaatggaagagctatgtgatgacattaagatgcatcttgatctggacagggaaagccaaacaaatgttaagtactgggaggcactcatggtggtatgtgaatgggagctaggtgaggctcggaaaagagatgccctagatcgggctagggtccgtggtgaggaaccaccacctgaggttcttgcagaagagagaggtttgcatgcaagtattgagggggatgtaaaaagtctcctggatggtaaaacttccacagagcttgaagatatgcaaagtcaaattgagtcccaaatgcgctctggaactgcgaaagttgttgaatactgggaggctattctgaaacggcttcatatttacaaagcaaaggcttgcctgagggagatacatgcttctatcctaaggaagcatttacatcgattggagcatcctggtgctgctgaacaggatgtggattctgagaaagaagttgataataaactggaggatgaaatgcatgaggacgaagatgataaacgatattcacctgagcctatgcctcagcagacagataacgaatttgaagaggcagatggatccttttctccacagctaatgcatggcaatgaagatgaagatgcaattgatcctgaagaggacaaagctgagctggaccgaaaacgtgaagctgtagttttggagcatcaaagaaaagttcaggaagccatgaaaacaaaggcaagagtacctgatgagatggagatgaaggccataaaaacaatgggagctatggaggaaggagatgcagtatttggtgccggtgctgaagtgaaccttgattcacaggtgtactggtggcacgacaagtatcgaccaagaaagcccaagtacttcaatcgggtgcacactggatatgaatggaataaatacaaccagactcattatgaccatgataacccaccaccgaaaattgtccaaggctacaagttcaatatattttaccctgatcttgtggacaaatcgaaagcaccaacatacagtatagagaaagatggaagcgccggagagacttgcttcataagatttcacgctggacctccatacgaggatattgctttccgtattgtgaacaaggagtgggaatactcacacaagaaggggttcaagtgtacttttgagcgtgggattctccatctctatttcaacttcaagcgttaccgttacaggcgctgaaatggctcaagaggcaggggaaaactggatcgattggactggtgcgtcatgattctgctgtatgctgtggcatggataccagtcgagtatgtatcttcagtataattaggtactatgctaaatgggaacacactttttggttttactgactgattccccccttttttgaggttgtacaataatacagcatagcaagctgatagttttctaacaaactagcatgtagtctgtgctaacgctaagatctcggtaatgagaggggttgatggcggtggcaacacgagtaagaggaggggtggcggggtcgctggagaagag

SEQ ID NO: 5641 - DNA, 2985 bp, Zea Mays
cccgatcggaccataaaaacaaatgaaataaacaaataaaaatacgcgcgacgaacagagctgaacacaaacacccacatcgatccaacccaagccacgcctcggcgacaggccgacagcccacgagcgagatccaacccaagttccgacgccgcgggcgagaccgatcagatccacctcagccgtctcggatggcgtcagcatcgacggcggtgcggatgctccccgacggcggcgctgacgacgaggagcggtggctcgccgagggcatcgccggcgtccagcaaaacgccttctacatgcaccgcgccctcgattccaacaacctcaaggacgcactcaagtactcggcgcagatgctctccgaactgcgcacctcgcgactatcgccgcacaagtactacgagctgtacatgagggcgtttgatgagatgaagaagctggagatgttcttcagggaggagactcgccggggcagctgctctgtggttgatatgtacgagcttgtgcagcatgctgggaatgtcttaccgagactctatctcctgtgcacggtgggatctgtgtacatcaaatcgaaagaggctcctgctaaagatgttcttaaagatctcgttgaaatgtgccgaggcattcagcatccccttcgtggcctttttctgagaagttatctttctcaaataagcagagacaagttgcctgatattggttccgagtatgaagggggcctgcccgagaaaaggaaaagcgtgggaaggaaagaaatgaactgcgtgatctggtaggcaaaaaccttcatgttctaagccagattgagggtgttgaccttgatatgtacaaagaaactgttcttccaaggatattagagcaggtggttaattgtaaggatgaccttgcacagttctacctgatggactgcataatccaagtctttccagatgaataccatttacaaacattggaaacattattgaatgcatttccccagcttcagccaagtgttgatatcaaaacagtactctctcaacttatggacagattgtctaactatgctgcctcaagtcctgaagtgttaccagagttcttgcaagttgaagcttttgctaagttcagtaatgctattggaaaggtgatagaagcccaacctgacatgccagttgttggagccgtaactctatatgtatcgcttctgacttttactctccgtgtacatcctgaccggcttgattatgttgaccaagtgctcggtgcatgtgtcaagaaactttcaggcaaagcaaaacttgaagatagcagggcaacgaagcaaattgttgcacttcttagtgctcccctagaaaaatatagcaatattgttactgcattagaactttcaaactatcctcgggtcatggattatcttgataatgctacaaccaaagtgatggctgtggtaataattcaaagcataatgaaaaacacaacctgcatatctacttctgacaagattgaggcactattcgatttaattaaggggctgataaaggatatggatggggctcaagatgatgaacttgatgaagaagattttaaggaggaacagaactctgtagcacgtctcattcacatgttgcacaatgatgagcctgaagagatgttgaagatcttatgtactgtacagaagcatatacttcagggaggccccaaacgtttaactttcactgtgccttctttagtattctccgctcttaagctggtcaggagattacaaagccaagatggagatgtcactggggaggatgttcctgcaactccaaagaaaatattccagatattgcatcagactatcgacgcactttcttgtgttccttccccagagttagctctgagactatatttgcattgtgcagaggctgccaatgactgtgatttggaaccagttgcttatgagttctttactcaagcgttcatattatatgaagaagaaattgcggattcaaaggctcaaatcactgcaattcacctgataattgggacccttcagcggatgaatatatttggggtggaaaatagagacactctcactcacaagacaacagggtactcagcaaaacttctcaagaagcctgatcaatgccgagcagtttatgcgtgttcacatcttttctgggctgatgaccaagatgggataatggatggtgaaagggttctgctttgtttgaaacgtgccttgagaatcgcaaatgctgctcaacagatggctagtgctacaaggggaagcagtggatccgtaactctatttattgagattttgaacaagtacttgtacttctttgagaaaggaattccgcagatcacaaataccgtgattcaagatttgattgaattgattagaacggagaagcaaagtgataactctgtagctgatccatctacagaggcattcttttctagcactttgcggtacattgaatttcagaagcagaaaggtgggagcataggcgaaaaatatgaacagataaagacgagttcatgagtcagaactagcgcggcgccacgactggtttcgattttgttgagaattgggtcgtttgtttggcatggttcagtgaaatagaaaccataagttttagctcgctccatgtaaaagatgtttatacgagctgttaattctcaaatctcacggtctgagcgggtctgttcgcccattggcaacactttcaggtttagtcaggtggcaataagctgtgtcctttggggagcacaggtctgtacaggattacttgtgttcgtgatcagttctactgctacctgaatttcatcgttgtatatttccgccccttatgcgaagcttatggattttagatctctgtaacattcggagtacatgccttcatttctgagttctgactggacattgatgattgtttcagagtggccagtgcaggacttgaacattttggatgcccgttcgttgacattttaatgttacccattactctgctg

SEQ ID NO: 5642 - DNA, 2988 bp, Zea Mays
aaacaaatgaaataaacaaataaaaatacgcgcgacgaacagagctgaacacaaacacccacatcgatccaacccaagccacgcctcggcgacaggccgacagcccacgagcgagatccaacccaagttccgacgccgcgggcgagaccgatcagatccacctcagccgtctcggatggcgtcagcatcgacggcggtgcggatgctccccgacggcggcgctgacgacgaggagcggtggctcgccgagggcatcgccggcgtccagcaaaacgccttctacatgcaccgcgccctcgattccaacaacctcaaggacgcactcaagtactcggcgcagatgctctccgaactgcgcacctcgcgactatcgccgcacaagtactacgagctgtacatgagggcgtttgatgagatgaagaagctggagatgttcttcagggaggagactcgccggggcagctgctctgtggttgatatgtacgagcttgtgcagcatgctgggaatgtcttaccgagactctatctcctgtgcacggtgggatctgtgtacatcaaatcgaaagaggctcctgctaaagatgttcttaaagatctcgttgaaatgtgccgaggcattcagcatccccttcgtggcctttttctgagaagttatctttctcaaataagcagagacaagttgcctgatattggttccgagtatgaaggggatgctgaaactattaacgacgcagttgaatttgttcttcagaatttcatagaaatgaacaaactctgggttcggatgcaacatctggggcctgcccgagaaaaggaaaagcgtgggaaggaaagaaatgaactgcgtgatctggtaggcaaaaaccttcatgttctaagccagattgagggtgttgaccttgatatgtacaaagaaactgttcttccaaggatattagagcaggtggttaattgtaaggatgaccttgcacagttctacctgatggactgcataatccaagtctttccagatgaataccatttacaaacattggaaacattattgaatgcatttccccagcttcagccaagtgttgatatcaaaacagtactctctcaacttatggacagattgtctaactatgctgcctcaagtcctgaagtgttaccagagttcttgcaagttgaagcttttgctaagttcagtaatgctattggaaaggtgatagaagcccaacctgacatgccagttgttggagccgtaactctatatgtatcgcttctgacttttactctccgtgtacatcctgaccggcttgattatgttgaccaagtgctcggtgcatgtgtcaagaaactttcaggcaaagcaaaacttgaagatagcagggcaacgaagcaaattgttgcacttcttagtgctcccctagaaaaatatagcaatattgttactgcattagaactttcaaactatcctcgggtcatggattatcttgataatgctacaaccaaagtgatggctgtggtaataattcaaagcataatgaaaaacacaacctgcatatctacttctgacaagattgaggcactattcgatttaattaaggggctgataaaggatatggatggggctcaagatgatgaacttgatgaagaagattttaaggaggaacagaactctgtagcacgtctcattcacatgttgcacaatgatgagcctgaagagatgttgaagatcttatgtactgtacagaagcatatacttcagggaggccccaaacgtttaactttcactgtgccttctttagtattctccgctcttaagctggtcaggagattacaaagccaagatggagatgtcactggggaggatgttcctgcaactccaaagaaaatattccagatattgcatcaggctgccaatgactgtgatttggaaccagttgcttatgagttctttactcaagcgttcatattatatgaagaagaaattgcggattcaaaggctcaaatcactgcaattcacctgataattgggacccttcagcggatgaatatatttggggtggaaaatagagacactctcactcacaagacaacagggtactcagcaaaacttctcaagaagcctgatcaatgccgagcagtttatgcgtgttcacatcttttctgggctgatgaccaagatgggataatggatggtgaaagggttctgctttgtttgaaacgtgccttgagaatcgcaaatgctgctcaacagatggctagtgctacaaggggaagcagtggatccgtaactctatttattgagattttgaacaagtacttgtacttctttgagaaaggaattccgcagatcacaaataccgtgattcaagatttgattgaattgattagaacggagaagcaaagtgataactctgtagctgatccatctacagaggcattcttttctagcactttgcggtacattgaatttcagaagcagaaaggtgggagcataggcgaaaaatatgaacagataaagacgagttcatgagtcagaactagcgcggcgccacgactggtttcgattttgttgagaattgggtcgtttgtttggcatggttcagtgaaatagaaaccataagttttagctcgctccatgtaaaagatgtttatacgagctgttaattctcaaatctcacggtctgagcgggtctgttcgcccattggcaacactttcaggtttagtcaggtggcaataagctgtgtcctttggggagcacaggtctgtacaggattacttgtgttcgtgatcagttctactgctacctgaatttcatcgttgtatatttccgccccttatgcgaagcttatggattttagatctctgtaacattcggagtacatgccttcatttctgagttctgactggacattgatgattgtttcagagtggccagtgcaggacttgaacattttggatgcccgttcgttgacattttaatgttacccattactctgctg

SEQ ID NO: 5643 - DNA, 2961 bp, Zea Mays
atacgcgcgacgaacagagctgaacacaaacacccacatcgatccaacccaagccacgcctcggcgacaggccgacagcccacgagcgagatccaacccaagttccgacgccgcgggcgagaccgatcagatccacctcagccgtctcggatggcgtcagcatcgacggcggtgcggatgctccccgacggcggcgctgacgacgaggagcggtggctcgccgagggcatcgccggcgtccagcaaaacgccttctacatgcaccgcgccctcgattccaacaacctcaaggacgcactcaagtactcggcgcagatgctctccgaactgcgcacctcgcgactatcgccgcacaagtactacgagctgtgtgagtaactgtggatttggagctgctgggtctgtggaattctggaagtgggatcggtcggaattctgatgggattcacttgtccgctgcagacatgagggcgtttgatgagatgaagaagctggagatgttcttcagggaggagactcgccggggcagctgctctgtggttgatatgtacgagcttgtgcagcatgctgggaatgtcttaccgagactctatctcctgtgcacggtgggatctgtgtacatcaaatcgaaagaggctcctgctaaagatgttcttaaagatctcgttgaaatgtgccgaggcattcagcatccccttcgtggcctttttctgagaagttatctttctcaaataagcagagacaagttgcctgatattggttccgagtatgaaggggatgctgaaactattaacgacgcagttgaatttgttcttcagaatttcatagaaatgaacaaactctgggttcggatgcaacatctggggcctgcccgagaaaaggaaaagcgtgggaaggaaagaaatgaactgcgtgatctggtaggcaaaaaccttcatgttctaagccagattgagggtgttgaccttgatatgtacaaagaaactgttcttccaaggatattagagcaggtggttaattgtaaggatgaccttgcacagttctacctgatggactgcataatccaagtctttccagatgaataccatttacaaacattggaaacattattgaatgcatttccccagcttcaggtgatagaagcccaacctgacatgccagttgttggagccgtaactctatatgtatcgcttctgacttttactctccgtgtacatcctgaccggcttgattatgttgaccaagtgctcggtgcatgtgtcaagaaactttcaggcaaagcaaaacttgaagatagcagggcaacgaagcaaattgttgcacttcttagtgctcccctagaaaaatatagcaatattgttactgcattagaactttcaaactatcctcgggtcatggattatcttgataatgctacaaccaaagtgatggctgtggtaataattcaaagcataatgaaaaacacaacctgcatatctacttctgacaagattgaggcactattcgatttaattaaggggctgataaaggatatggatggggctcaagatgatgaacttgatgaagaagattttaaggaggaacagaactctgtagcacgtctcattcacatgttgcacaatgatgagcctgaagagatgttgaagatcttatgtactgtacagaagcatatacttcagggaggccccaaacgtttaactttcactgtgccttctttagtattctccgctcttaagctggtcaggagattacaaagccaagatggagatgtcactggggaggatgttcctgcaactccaaagaaaatattccagatattgcatcagactatcgacgcactttcttgtgttccttccccagagttagctctgagactatatttgcattgtgcagagttgcttatgagttctttactcaagcgttcatattatatgaagaagaaattgcggattcaaaggctcaaatcactgcaattcacctgataattgggacccttcagcggatgaatatatttggggtggaaaatagagacactctcactcacaagacaacagggtactcagcaaaacttctcaagaagcctgatcaatgccgagcagtttatgcgtgttcacatcttttctgggctgatgaccaagatgggataatggatggtgaaagggttctgctttgtttgaaacgtgccttgagaatcgcaaatgctgctcaacagatggctagtgctacaaggggaagcagtggatccgtaactctatttattgagattttgaacaagtacttgtacttctttgagaaaggaattccgcagatcacaaataccgtgattcaagatttgattgaattgattagaacggagaagcaaagtgataactctgtagctgatccatctacagaggcattcttttctagcactttgcggtacattgaatttcagaagcagaaaggtgggagcataggcgaaaaatatgaacagataaagacgagttcatgagtcagaactagcgcggcgccacgactggtttcgattttgttgagaattgggtcgtttgtttggcatggttcagtgaaatagaaaccataagttttagctcgctccatgtaaaagatgtttatacgagctgttaattctcaaatctcacggtctgagcgggtctgttcgcccattggcaacactttcaggtttagtcaggtggcaataagctgtgtcctttggggagcacaggtctgtacaggattacttgtgttcgtgatcagttctactgctacctgaatttcatcgttgtatatttccgccccttatgcgaagcttatggattttagatctctgtaacattcggagtacatgccttcatttctgagttctgactggacattgatgattgtttcagagtggccagtgcaggacttgaacattttggatgcccgttcgttgacattttaatgttacccattactctgctg

SEQ ID NO: 5644 - DNA, 3079 bp, Zea Mays
aacacccacatcgatccaacccaagccacgcctcggcgacaggccgacagcccacgagcgagatccaacccaagttccgacgccgcgggcgagaccgatcagatccacctcagccgtctcggatggcgtcagcatcgacggcggtgcggatgctccccgacggcggcgctgacgacgaggagcggtggctcgccgagggcatcgccggcgtccagcaaaacgccttctacatgcaccgcgccctcgattccaacaacctcaaggacgcactcaagtactcggcgcagatgctctccgaactgcgcacctcgcgactatcgccgcacaagtactacgagctgtacatgagggcgtttgatgagatgaagaagctggagatgttcttcagggaggagactcgccggggcagctgctctgtggttgatatgtacgagcttgtgcagcatgctgggaatgtcttaccgagactctatctcctgtgcacggtgggatctgtgtacatcaaatcgaaagaggctcctgctaaagatgttcttaaagatctcgttgaaatgtgccgaggcattcagcatccccttcgtggcctttttctgagaagttatctttctcaaataagcagagacaagttgcctgatattggttccgaggatgctgaaactattaacgacgcagttgaatttgttcttcagaatttcatagaaatgaacaaactctgggttcggatgcaacatctggggcctgcccgagaaaaggaaaagcgtgggaaggaaagaaatgaactgcgtgatctggtaattcagtgacagctggatattctactcaactgtattttcgaagtcatgcaaattggcattatttttttaatcttcttgtaggtaggcaaaaaccttcatgttctaagccagattgagggtgttgaccttgatatgtacaaagaaactgttcttccaaggatattagagcaggtggttaattgtaaggatgaccttgcacagttctacctgatggactgcataatccaagtctttccagatgaataccatttacaaacattggaaacattattgaatgcatttccccagcttcagccaagtgttgatatcaaaacagtactctctcaacttatggacagattgtctaactatgctgcctcaagtcctgaagtgttaccagagttcttgcaagttgaagcttttgctaagttcagtaatgctattggaaaggtgatagaagcccaacctgacatgccagttgttggagccgtaactctatatgtatcgcttctgacttttactctccgtgtacatcctgaccggcttgattatgttgaccaagtgctcggtgcatgtgtcaagaaactttcaggcaaagcaaaacttgaagatagcagggcaacgaagcaaattgttgcacttcttagtgctcccctagaaaaatatagcaatattgttactgcattagaactttcaaactatcctcgggtcatggattatcttgataatgctacaaccaaagtgatggctgtggtaataattcaaagcataatgaaaaacacaacctgcatatctacttctgacaagattgaggcactattcgatttaattaaggggctgataaaggatatggatggggctcaagatgatgaacttgatgaagaagattttaaggaggaacagaactctgtagcacgtctcattcacatgttgcacaatgatgagcctgaagagatgttgaagatcttatgtactgtacagaagcatatacttcagggaggccccaaacgtttaactttcactgtgccttctttagtattctccgctcttaagctggtcaggagattacaaagccaagatggagatgtcactggggaggatgttcctgcaactccaaagaaaatattccagatattgcatcagactatcgacgcactttcttgtgttccttccccagagttagctctgagactatatttgcattgtgcagaggctgccaatgactgtgatttggaaccagttgcttatgagttctttactcaagcgttcatattatatgaagaagaaattgcggattcaaaggctcaaatcactgcaattcacctgataattgggacccttcagcggatgaatatatttggggtggaaaatagagacactctcactcacaagacaacagggtactcagcaaaacttctcaagaagcctgatcaatgccgagcagtttatgcgtgttcacatcttttctgggctgatgaccaagatgggataatggatggtgaaagggttctgctttgtttgaaacgtgccttgagaatcgcaaatgctgctcaacagatggctagtgctacaaggggaagcagtggatccgtaactctatttattgagattttgaacaagtacttgtacttctttgagaaaggaattccgcagatcacaaataccgtgattcaagatttgattgaattgattagaacggagaagcaaagtgataactctgtagctgatccatctacagaggcattcttttctagcactttgcggtacattgaatttcagaagcagaaaggtgggagcataggcgaaaaatatgaacagataaagacgagttcatgagtcagaactagcgcggcgccacgactggtttcgattttgttgagaattgggtcgtttgtttggcatggttcagtgaaatagaaaccataagttttagctcgctccatgtaaaagatgtttatacgagctgttaattctcaaatctcacggtctgagcgggtctgttcgcccattggcaacactttcaggtttagtcaggtggcaataagctgtgtcctttggggagcacaggtctgtacaggattacttgtgttcgtgatcagttctactgctacctgaatttcatcgttgtatatttccgccccttatgcgaagcttatggattttagatctctgtaacattcggagtacatgccttcatttctgagttctgactggacattgatgattgtttcagagtggccagtgcaggacttgaacattttggatgcccgttcgttgacattttaatgttacccattactctgctg

SEQ ID NO: 5645 - DNA, 2971 bp, Zea Mays
cccacatcgatccaacccaagccacgcctcggcgacaggccgacagcccacgagcgagatccaacccaagttccgacgccgcgggcgagaccgatcagatccacctcagccgtctcggatggcgtcagcatcgacggcggtgcggatgctccccgacggcggcgctgacgacgaggagcggtggctcgccgagggcatcgccggcgtccagcaaaacgccttctacatgcaccgcgccctcgattccaacaacctcaaggacgcactcaagtactcggcgcagatgctctccgaactgcgcacctcgcgactatcgccgcacaagtactacgagctgtacatgagggcgtttgatgagatgaagaagctggagatgttcttcagggaggagactcgccggggcagctgctctgtggttgatatgtacgagcttgtgcagcatgctgggaatgtcttaccgagactctatctcctgtgcacggtgggatctgtgtacatcaaatcgaaagaggctcctgctaaagatgttcttaaagatctcgttgaaatgtgccgaggcattcagcatccccttcgtggcctttttctgagaagttatctttctcaaataagcagagacaagttgcctgatattggttccgagtatgaaggggatgctgaaactattaacgacgcagttgaatttgttcttcagaatttcatagaaatgaacaaactctgggttcggatgcaacatctggggcctgcccgagaaaaggaaaagcgtgggaaggaaagaaatgaactgcgtgatctggtaggcaaaaaccttcatgttctaagccagattgagggtgttgaccttgatatgtacaaagaaactgttcttccaaggatattagagcaggtggttaattgtaaggatgaccttgcacagttctacctgatggactgcataatccaagtctttccagatgaataccatttacaaacattggaaacattattgaatgcatttccccagcttcagcaagtgttgatatcaaaacagtactctctcaacttatggacagattgtctaactatgctgcctcaagtcctgaagtgttaccagagttcttgcaagttgaagcttttgctaagttcagtaatgctattggaaaggtgatagaagcccaacctgacatgccagttgttggagccgtaactctatatgtatcgcttctgacttttactctccgtgtacatcctgaccggcttgattatgttgaccaagtgctcggtgcatgtgtcaagaaactttcaggcaaagcaaaacttgaagatagcagggcaacgaagcaaattgttgcacttcttagtgctcccctagaaaaatatagcaatattgttactgcattagaactttcaaactatcctcgggtcatggattatcttgataatgctacaaccaaagtgatggctgtggtaataattcaaagcataatgaaaaacacaacctgcatatctacttctgacaagattgaggcactattcgatttaattaaggggctgataaaggatatggatggggctcaagatgatgaacttgatgaagaagattttaaggaggaacagaactctgtagcacgtctcattcacatgttgcacaatgatgagcctgaagagatgttgaagatcttatgtactgtacagaagcatatacttcagggaggccccaaacgtttaactttcactgtgccttctttagtattctccgctcttaagctggtcaggagattacaaagccaagatggagatgtcactggggaggatgttcctgcaactccaaagaaaatattccagatattgcatcagactatcgacgcactttcttgtgttccttccccagagttagctctgagactatatttgcattgtgcagagttgcttatgagttctttactcaagcgttcatattatatgaagaagaaattgcggattcaaaggctcaaatcactgcaattcacctgataattgggacccttcagcggatgaatatatttggggtggaaaatagagacactctcactcacaagacaacagggtactcagcaaaacttctcaagaagcctgatcaatgccgagcagtttatgcgtgttcacatcttttctgggctgatgaccaagatgggataatggatggtgaaagggttctgctttgtttgaaacgtgccttgagaatcgcaaatgctgctcaacagatggctagtgctacaaggggaagcagtggatccgtaactctatttattgagattttgaacaagtacttgtacttctttgagaaaggaattccgcagatcacaaataccgtgattcaagatttgattgaattgattagaacggagaagcaaagtgataactctgtagctgatccatctacagaggcattcttttctagcactttgcggtacattgaatttcagaagcagaaaggtgggagcataggcgaaaaatatgaacagataaagacgagttcatgagtcagaactagcgcggcgccacgactggtttcgattttgttgagaattgggtcgtttgtttggcatggttcagtgaaatagaaaccataagttttagctcgctccatgtaaaagatgtttatacgagctgttaattctcaaatctcacggtctgagcgggtctgttcgcccattggcaacactttcaggtttagtcaggtggcaataagctgtgtcctttggggagcacaggtctgtacaggattacttgtgttcgtgatcagttctactgctacctgaatttcatcgttgtatatttccgccccttatgcgaagcttatggattttagatctctgtaacattcggagtacatgccttcatttctgagttctgactggacattgatgattgtttcagagtggccagtgcaggacttgaacattttggatgcccgttcgttgacattttaatgttacccattactctgctg

SEQ ID NO: 5646 - DNA, 2955 bp, Zea Mays
ccaacccaagccacgcctcggcgacaggccgacagcccacgagcgagatccaacccaagttccgacgccgcgggcgagaccgatcagatccacctcagccgtctcggatggcgtcagcatcgacggcggtgcggatgctccccgacggcggcgctgacgacgaggagcggtggctcgccgagggcatcgccggcgtccagcaaaacgccttctacatgcaccgcgccctcgattccaacaacctcaaggacgcactcaagtactcggcgcagatgctctccgaactgcgcacctcgcgactatcgccgcacaagtactacgagctgtacatgagggcgtttgatgagatgaagaagctggagatgttcttcagggaggagactcgccggggcagctgctctgtggttgatatgtacgagcttgtgcagcatgctgggaatgtcttaccgagactctatctcctgtgcacggtgggatctgtgtacatcaaatcgaaagaggctcctgctaaagatgttcttaaagatctcgttgaaatgtgccgaggcattcagcatccccttcgtggcctttttctgagaagttatctttctcaaataagcagagacaagttgcctgatattggttccgagtatgaaggggatgctgaaactattaacgacgcagttgaatttgttcttcagaatttcatagaaatgaacaaactctgggttcggatgcaacatctggggcctgcccgagaaaaggaaaagcgtgggaaggaaagaaatgaactgcgtgatctggtaggcaaaaaccttcatgttctaagccagattgagggtgttgaccttgatatgtacaaagaaactgttcttccaaggatattagagcaggtggttaattgtaaggatgaccttgcacagttctacctgatggactgcataatccaagtctttccagatgaataccatttacaaacattggaaacattattgaatgcatttccccagcttcagccaagtgttgatatcaaaacagtactctctcaacttatggacagattgtctaactatgctgcctcaagtcctgaagtgttaccagagttcttgcaagttgaagcttttgctaagttcagtaatgctattggaaaggtgatagaagcccaacctgacatgccagttgttggagccgtaactctatatgtatcgcttctgacttttactctccgtgtacatcctgaccggcttgattatgttgaccaagtgctcggtgcatgtgtcaagaaactttcaggcaaagcaaaacttgaagatagcagggcaacgaagcaaattgttgcacttcttagtgctcccctagaaaaatatagcaatattgttactgcattagaactttcaaactatcctcgggtcatggattatcttgataatgctacaaccaaagtgatggctgtggtaataattcaaagcataatgaaaaacacaacctgcatatctacttctgacaagattgaggcactattcgatttaattaaggggctgataaaggatatggatggggctcaagatgatgaacttgatgaagaagattttaaggaggaacagaactctgtagcacgtctcattcacatgttgcacaatgatgagcctgaagagatgttgaagatcttatgtactgtacagaagcatatacttcagggaggccccaaacgtttaactttcactgtgccttctttagtattctccgctcttaagctggtcaggagattacaaagccaagatggagatgtcactggggaggatgttcctgcaactccaaagaaaatattccagatattgcatcagagttagctctgagactatatttgcattgtgcagaggctgccaatgactgtgatttggaaccagttgcttatgagttctttactcaagcgttcatattatatgaagaagaaattgcggattcaaaggctcaaatcactgcaattcacctgataattgggacccttcagcggatgaatatatttggggtggaaaatagagacactctcactcacaagacaacagggtactcagcaaaacttctcaagaagcctgatcaatgccgagcagtttatgcgtgttcacatcttttctgggctgatgaccaagatgggataatggatggtgaaagggttctgctttgtttgaaacgtgccttgagaatcgcaaatgctgctcaacagatggctagtgctacaaggggaagcagtggatccgtaactctatttattgagattttgaacaagtacttgtacttctttgagaaaggaattccgcagatcacaaataccgtgattcaagatttgattgaattgattagaacggagaagcaaagtgataactctgtagctgatccatctacagaggcattcttttctagcactttgcggtacattgaatttcagaagcagaaaggtgggagcataggcgaaaaatatgaacagataaagacgagttcatgagtcagaactagcgcggcgccacgactggtttcgattttgttgagaattgggtcgtttgtttggcatggttcagtgaaatagaaaccataagttttagctcgctccatgtaaaagatgtttatacgagctgttaattctcaaatctcacggtctgagcgggtctgttcgcccattggcaacactttcaggtttagtcaggtggcaataagctgtgtcctttggggagcacaggtctgtacaggattacttgtgttcgtgatcagttctactgctacctgaatttcatcgttgtatatttccgccccttatgcgaagcttatggattttagatctctgtaacattcggagtacatgccttcatttctgagttctgactggacattgatgattgtttcagagtggccagtgcaggacttgaacattttggatgcccgttcgttgacattttaatgttacccattactctgctg

SEQ ID NO: 5647 - DNA, 950 bp, Zea Mays
gtttatttccacatccaatccccatggggaatgggtttatgcaaatactcagcaaaacttctcaagaagcctgatcaatgccgagcagtttatgcgtgttcacatcttttctgggctgatgaccaagatgggataatggatggtgaaagggttctgctttgtttgaaacgtgccttgagaatcgcaaatgctgctcaacagatggctagtgctacaaggggaagcagtggatccgtaactctatttattgagattttgaacaagtacttgtacttctttgagaaaggaattccgcagatcacaaataccgtgattcaagatttgattgaattgattagaacggagaagcaaagtgataactctgtagctgatccatctacagaggcattcttttctagcactttgcggtacattgaatttcagaagcagaaaggtgggagcataggcgaaaaatatgaacagataaagacgagttcatgagtcagaactagcgcggcgccacgactggtttcgattttgttgagaattgggtcgtttgtttggcatggttcagtgaaatagaaaccataagttttagctcgctccatgtaaaagatgtttatacgagctgttaattctcaaatctcacggtctgagcgggtctgttcgcccattggcaacactttcaggtttagtcaggtggcaataagctgtgtcctttggggagcacaggtctgtacaggattacttgtgttcgtgatcagttctactgctacctgaatttcatcgttgtatatttccgccccttatgcgaagcttatggattttagatctctgtaacattcggagtacatgccttcatttctgagttctgactggacattgatgattgtttcagagtggccagtgcaggacttgaacattttggatgcccgttcgttgacattttaatgttacccattactctgctg

SEQ ID NO: 5648 - DNA, 1774 bp, Zea Mays
ataaaccatcggagaccggagtcacatcaacgtgcggtctgcagtttgggcgtcggcggcgggccgacgatgcgctctcggcgctcgctcgttgtcgcgtcgcgtgctactccaggacacgagccggctctcgactcctcccaccgcgtggcgcgagcgcggttgtctgccgccgatgaagatccgatccgattcgtctcccgggcgcggccgggtcggcggtcaagcaccactccactccaaatctggcgggcgccgcatcagaattcagtagatgcatcgccacgagctcacgtgcgcctcgagtccatgacaacccagacgcaacgacgacgacgccaaacgcgtgcgtgagcgtgcacgccaaccacgctcatcaacggtcgtaacgcgcaggaaaggaaacccaaccgcatccggtcccggcccgggcgcccaatttccgcgaacagcccaccttcccgccagctccgcctcatccgtagccagacaaagccaacgaggcaaccggcaacaacgtgcccccgcggccctgccggccggacgaacgaacgaagcagtcaaaacccccgcaccccaccgggcctccacacgcagcagcgacgcccccgccccgcgtcttctactcttcttcatcttcactgctcaccaacccatccatcccccagtcctcctcactgctcacccgtctcccatccccacaccaccaccaccaccatcttccggtcttcccctccccacacccggcgggatccccaccatccccttcccccgatggagctgttcgcgcgcgccaaggtggtgcggctcaagagccaccacgacaagttcctgtacgcggacgaggacgaggcgcacgtgacgcaggagcgggacgggtcgtcggcgaacgcgcggtgggccgtggagccggcgccgcacaacccgggcgccatccgcctgcggagccggtacggccactacctcaccgcctccggggagccgttcctgctggggatgacgggccggaaggtgacgcagacggcgcccgccgcgccccgccccgccaacgcgtccgtggactgggagcccgtgcgggacggcttccaggcgcgcctccgcaccagggcgggccacttcctccgcgccaacggggggctcccgccctggaggaactccgtcacccacgacgtgccccaccgcaccgccacgcaggactgggtgctctgggacgtcgaggtcgtgcagctcctcacgccggcgccgcccgaccgcgccggctccgcgcccctcgccaagttgccggactcgccgcccgcgccggagctcgccaacccgccgcagccgcatcaccgtccctccaagtcctacgccgcgccaccgccaccgcccacgctggagcccgaggcgccgccgcccaggctctccaagctcgagtcctccgattcattctctgcccccttgcacaaggtagagggacgtgccatccattatcacattgcagatgatctgggcaatgtgcaagatggcacagtgggacactcctttacattcaatggcagcaacttggaggagcttgcccacaagttgcaggaagagactggcctggataatatcatcatatgcacacgcagccctatcaacgggaagctcactcctctccgtctgcaactgccaccaaacaatgcagctatgcatattgtgctcgtccaggagtcctcaaaggtgtgacggtctggccgtgtgacgacaagttattcatgttgatgggggttgagcccaccatacacttcct

SEQ ID NO: 5649 - DNA, 728 bp, Zea Mays
ccaacattggttgcgatgccgtcttcacaaatcctccgattcattctctgcccccttgcacaaggtagagggacgtgccatccattatcacattgcagatgatctgggcaatgtgcaagatggcacagtgggacactcctttacattcaatggcagcaacttggaggagcttgcccacaagttgcaggaagagactggcctggataatatcatcatatgcacacgcagccctatcaacgggaagctcactcctctccgtctgcaactgccaccaaacaatgcagctatgcatattgtgctcgtccaggagtcctcaaaggtggctagatcatttgcacggccgtacggttcataaatcacaaacatttggcgaagacacggggggccttgagttctggtggattgtgcttgtgcgtgtcgctcgaagcccgtacatcattggatcaggtcatgccggttgtgcggtcacgctgggtgtcagaagcaacctagcttaaacctcattcgtgcacatgtaaaaggagcaccccccccccccaccacccacacacacacacacagtatagttaaaaccagcggagattcatcgcgtgatatgtggagagatgtgttccattgattaatttatactagttgagattctggccctgtatcttatatcattggttttgtattagttggtcaatagaatttgtactccgtgctgcgagccggctggttcttccccc

SEQ ID NO: 5650 - DNA, 725 bp, Zea Mays
gtgccttcgaaatgctaatcatgctgggtcctccgattcattctctgcccccttgcacaaggtagagggacgtgccatccattatcacattgcagatgatctgggcaatgtgcaagatggcacagtgggacactcctttacattcaatggcagcaacttggaggagcttgcccacaagttgcaggaagagactggcctggataatatcatcatatgcacacgcagccctatcaacgggaagctcactcctctccgtctgcaactgccaccaaacaatgcagctatgcatattgtgctcgtccaggagtcctcaaaggtggctagatcatttgcacggccgtacggttcataaatcacaaacatttggcgaagacacggggggccttgagttctggtggattgtgcttgtgcgtgtcgctcgaagcccgtacatcattggatcaggtcatgccggttgtgcggtcacgctgggtgtcagaagcaacctagcttaaacctcattcgtgcacatgtaaaaggagcaccccccccccccaccacccacacacacacacacagtatagttaaaaccagcggagattcatcgcgtgatatgtggagagatgtgttccattgattaatttatactagttgagattctggccctgtatcttatatcattggttttgtattagttggtcaatagaatttgtactccgtgctgcgagccggctggttcttccccc

SEQ ID NO: 5651 - DNA, 2695 bp, Zea Mays
gtgcccgccatgaagtcatcgtcatgcttgcgagctgcggggtggggcattgggattgaaacagaagtgggccccactcaaagatcgctgacaggcgggccccattgcgctgtacgaactgcgcgagcacgaccgagcccgaaggcccatttgtgtagcggctattgaagtccacccgtggcccagctgtaccggtctatgtctatccgatctccccgaagaattacttcctggagccacaggcccacaccacagcgaggcccgctgcagacggtgccatcgcgtcgcccatgccatgcacccactcacgctctcctccaccgcgctcctccgcctaatcaagtcgctctcgccggcggcggggccgagggcccacctcgcggccgcggagatccacggcctcctcttcaaggaagggctcctccacgccggggcgcacctccccacggcgctgctctcggcctacgccgcgctggggaggccgcggcacgcgcgggacctgttcgacgagatgcccgacccgggcctcgtctcccgcaccgccatggcgcgcgcgcacgcggcgtccgggcaggccgcccaggcgctcgccgtgttccgggacatgatcgcggacggcgtgctcccggacaacgtggccctggcggtcgctctggccgcgtgccacacgacagcctcgctccctgcagcggggatggcggcggcaaggagacctgggaagatggtccatgccatcatcgtgacaagcggcattgtgccggatgtgttcgtctccaccgagctgatcagggtctacggggagtacggtgagctggcgctctcccggaggttgtttgatgcgatgccggtgaggagcaccgtttcgtggaacgccatggtgcatcagtatatcaggcatagtaatgttggcgatgcttacgagctgttccttgcaatgccaaggagggatgtagtgtcatggaacacgatgattgccgggtattcccttgttggtcgatttatggaggcgctagagttgtcccgccagatgatatcgccgtcgtcatgtccagtgtatccaaatggacctacaatgagcactgtccttgctgcttgcgcaggtgccggttgtttagagactgggatttgggtccatgcctttgttgacaggaaccgcatgaatgatgatggctcattggatcggtccttgatagacatgtacgtcaaatgtggaagcatcgaaaaggcacttcaggtgttcgagaaggcacctgaggcgagggatctgtactcatggacgaccatgatttgtggattggcaatgcacggcagggctgctgatgctctaaaaatgtttggtatgatgcaagacaatggcatacaccctgatgatgttactcttgttggggtcctaaatgcttgtgcacactgtggacttgtggacgaaggccttcgacacttctactccttggagaagtatgcaatcacacccaaaattgaacactatggatgtgtcattgatcttcttggtcgtgttgggcggctgcaagaagcatacaacattatcaggaccatgcgcatgaagcctaatgcagtaatctggggtgcattcttgaacgcatgcaaagttcacagcaacgtggagcttggcgagatcgcagcagctgagctcaccaggttagatccaggtgacccctgggcaaaggtgatgctgtccagcttgtatgcaaaattgcaggactggaacagtctagccagggagagacgggagatgaacaacctgcagataaagaaaacaccagggtgcagctcaattgagcttgatggggaggtgcatgagtttgttgctggtggttttcaacatcctcaacatggcgaaatttgcactgtactagagaacgtcgaagcacaaacacatactggctaaagagatgtggaggcctcatgccctcatcagctgagttttttgttctatcaatgaatgttagcatgtagtagcaagtttcatgggcactggcagattaactgacctttgtgtgttccattagcctgtgaagttcgaaactggtcatattgctaagaattctaggaggttactattagggcccagagtaaatgactacgtgctgatgaaaatctgttcagattaatcattctggaacttgtactaacaattgaagcaagtggaggcatagcaccaattgtgtctgtgctgcagctctggatgtcagtagacaagaggtgtatcagagagaagcacttcaaggttaatttgttgagcaaattggagatgctggattttgtattttggcaggttgctcatgagtggtgaatggtctgacgacttcagaagaggatagatctgagattacctttcatgcatgttaaggaagttaagtagttgatgccttcaaataaatggagaaacgtcaggtgaaccgcgagcagaattctgtggcgcatttgttagcgcagttagctaggactctgttcatacagctgttcgattaagccaaatacctaactgtattgcccatctagtagaacctaactgtaacttgtcctcttaattaatactagcaattagcaaacatgtctgtacgttgcgatcggagaaaaaaaactatcaaatatttaggagaacaatgacacgagtgatacatagcattatttatgtttcaccatttatggaatttaaagactaattcgttttgtg

SEQ ID NO: 5652 - DNA, 2252 bp, Zea Mays
gacgcgacgcacgtcatagcgacatgtccgttcacacggcaggcaaaccggcggtacagtgcaagtgcaacacgacgacgcggagctaaaatattgaacggttgcgtctgcgcatttggctctcctccttcacgagcaagcatcccaaaggacgctacaaacctgacgtccatcgccgtggcctgtgacggtcgccgccttgacgttgacgacgacgcgcacacgcagacgcacccacgagcctgctgatccaaacactgtgaagattctataagtacaggcagcgggcgaggccgtgttccagatccagcctcgagcaccgggacctgccgcgtgcttcttactggcaacttggcaagtggcacggccgcacggatccatctccatcgtcgaggcgaggacgaggaagcagatcgaagcacccaaccacaccacactggtggtgagtggttgctggcgatggcgatggaagcgatgatgagcgggctcaactccggcgtggtgctcagcctgatcgccgtgctgtggacggtggtgtggcagaacctgcagcacctgcagctgcagcagttcttcgcgcggcagctgagccggcgcgcgcggcggctggcggcgatggtggacccgtacctgtcggtcaccatcgccgagtacgagggcgggcggatgaagcgcagcgacgcgtacgaggaggtcaaggcctacctcagcgacgccagcgcccacggcgtgcgccacctccgggccgagtccgccaaggacgccgacaagctcgtgctcagcatgtcggacggcgaggaggtggaggacgacttcgagggcgcgagggtctggtggtgggcctactccaagcagccgccgcgctcggacggcgccgcggcgtggtggagcggcggcggcgccgccgcgcaggaggagcgccacttctaccgcctcttcttcctggagcaccagcggtcgcttgtgctggacacgtacctcccgcgcgtccgccagctgggccgcgccgtcatggtgaagaaccgccagcggaagctgttcaccaacatctccacgcaccagtggagcgacggcgggttcatgaggtcggcgtggacccacgtggtgttcgagcaccccaagacgttcgccacgctcgccatggaccccgccgagaagaagagggtcatggacgacctcgacatgttcaagggcggcagggactactacgcgcgcgtcggcaaggcgtggaagcgcgggtacctcctgtacgggccccccgggacggggaagtcggccatgatcgccgccatggccaactacctcgactacgacatctacgacatcgagctcacgtccgtgcactccaacaccgacctccgcaagctcttcatcgagaccaccagcaagtccatcatcgtcatcgaggacatcgactgctccctcgacctcaccggcgcgcgcgagaagaagaaggcggcggaggaggacggcgacaaggacaagaaggacggcggcggccccagcaagcccggcgagaagaaggacaccagcagcaaggtgacgctgtcgggcctgctcaacttcatcgacgggctgtggtcggcgtgcggcggcgagcggatcatcgtgttcaccaccaaccacgtcaagaagctggacccggcgctcatccgcagagggcgcatggacaaacacatcgagatgtcctactgcggcttcgaggcgttcaagttcctggccaagacgtacctcgacgtggactcgcaccctctgttcgacgccgtcggcgagctactccgggaggtggacatgacgccggccgacgtcgccgagaacctcacgcccaagagcctcgacgacgggccggactcgtgcctcgcggacttggtgaaggcgctggaagaggccaagaaggctagcggagccggagaggatgaagaggaccagcaatatgagccatgaggaggaaaagctctagattattcagttcattattactgccagtttgtcgttagtcggtaactctgctgatttgtctgctgtgctacagtagtgcagaggctaatgataaaagttacccctagaataaattaattagctaggggtttgtgtttgtctaaatttatcttatcctagagaagagaagccccgttcttttttttctataaataagtctagataagacagtttttttccataaaagctgttagttcccctcaccacatgagagaatcggtaaacctcaaaatactaactcttttaaacttttt

SEQ ID NO: 5653 - DNA, 2018 bp, Zea Mays
atgggcggcatcaggcttactcatgcgatattagcccggtcacgagactcagcagtcagcagccgcagccgttgcatcacacttagcgccaccccatgccatgagaagaagctcttagaagaccagcgttgtcgctcgccaggagaggaggaggaggaggccgctctacggaagaagaagacgacgctgcgctgcgcggcgacggacgactggtcggtgggtgtcatgagaaggtcggccgtgtccgtgaggcgggcggcgccagcggcattggccatcttgttcggagcgctccttctggtgtcgttcgtcgtggacggcgtcaggaaagcggctccgccggcggcgatcggcgggaggaggatgatgctgggcggaggcgccggagggctgaggaccctggaggatttcaaggctcatgatcccttccaggacagcaagagaagggtgcccaatggccctgatcctatccacaacaggtactttgatctacgtacagcttactgcgctgcaagctttggttttggtgtttgagttggcccccccttttttccccttgtacccaatgcactggtttcttgaaactagaagctttaggattttcaaaaaaaattactacgtacgatatgaggccaaatgctgcagccttcacctaacttgaactagcagaattccaacgcttgacgtttttttttgtcatggcttgtttgtttgttaagcttgcgttacggaatgaagggaatgttcttgtttcaccagtttctgactggtggtatgcaaaggtgaatgttttgcagtgcgtctgttgtgatcattttgtcttgccatatgctcccatttaccatgttttgttggatattttcacgtaggataggtcaggaaagaaagaaagaaaaaacaatacttttcataataatataaaataaatgataacggataaaacgcagggagagggaagaaaaaacaaagggagacgacgcatatgagcaaaagatgccatgcgctctttttccctcaccactcccacattcccctatgatgatatgctataatctttcagcaaaagcaaccacacaagtcctattcccccagtgagcaacgtagatgcacatatcattcctgaaatcattagtctacatccatgaaagcagtcaaaacaaagcacagcacagcaccacacccacggttcatcatgatggtaaactacaggaaagccttaacggtttcagtgcatcacctgccgaaacaaagactgtgctgctgtctcagtccctgcttcagcttcagcttcagcttctaacccggtttcaaatcctgcagaggaaccggcaagtcaggacgatcgccgggacgagcatgacgtcgggagcgcgcatgccgaggcgtggaagcttccgaacccgaagaggccggcgatagcgacgtgttgggagcggcggctagcaaacagaagatgcgttgcgttgcatacttgcattgcatggaggaagaggaacagacaagaggtgcatcgtggggtggtgggtctggctgggatgctgggtgtaactagggggaggtggcctgccctatcttcttctaagcactgctatttaagacggttttaagcatgatgagaactttagctttttgggggaggggaaacaaaggctattctattctattcaattctattctgccagtgggggtttgtttgttttgttttgttttgtttttttgtaaagagagcagtaagtaccaagcttccctgtcacatggaaacaagcaagcatcagagattcttcttgacaaagggatgtgggcaagaagagctcctcctcctcctctccctgtcttttggccgcagctgctttatacatctcagtacaagtaccctgtgtttctttgaggtgttcattcttttgcattggcactgtatggtctgcagcacatcataagtttgctaaaggagtcatgggtctggactctgaaaaagaagcaccactggcacatgcaattctcttgcttgctggggcttt

SEQ ID NO: 5654 - DNA, 1104 bp, Zea Mays
cgtcgtcgtcgtccccctgctgctggtggtgctggaggaggagtggtcgccgacggtgccagcaacagcggagcacacaatcagagatcctgggcatgtcgcccgacgcccccgaggcggagatcttcaaggagtacgcgaagaagcacgagagcaacaacggcaccaccattcctgccgctgcaaccggcgccgccgcggcgaccgggaagagcacgagcgcggcgccgacggcggacggcgccgggaggcagcccggcacggtcttcttctacgtcgtgtcggcgctgctcgtctccgtcgcggtcctgctgtgctgatggcttaacggccggccgcggcagcgcatgcattcatggccggccggccggcagggagatggaggtgctactgcacgctgcacgactggaaggaagcccggagacacaattcaagtctttgagatgagcaaactaaaggacacgagtactctttttttttctctttcctgtagcctttttgtgtgtgtgtggcgtgttgtggggagtttgtgagacgtcggcttgtgctagtgctgacggtgcaccagcgacgcagctctgtactacttcccagctgttgggctgtggccttccagcctggggattttaatgtggtggcccgagactgccgacatgtctgtctgaatctgatgattctgatccactatgttggcacattgtatgtttggtttctttggtttcagttttagttctcgtcttcttgcttttttttatttaaagtaatattgtgtaagcaacatgcatgtaactagaaggacctttgtttgtatacgcttaagaaacagtttcgatactaaattttagttcccgtcacatcggtggtttgaatgcttgttaaaactatcaaatatagtctagttacacaactaattacacagattataatcaaacggcataacgaatccattaagcttaatttattcatgatgtatccatgtatgttataataaatatttgctaatcgtgattaattaggtttaataaatttgtttcgctatttagtcttcatttgtataattagttttgtagttttaagcggcattgaaactaacatgattcgaaa

SEQ ID NO: 5655 - DNA, 2233 bp, Zea Mays
cgacggtgccagcaacagcggagcacacaatcaggcattccattccatcccttcacgcccacccggccacgaggcgcgagctgaggcgtgaggcgtgaccacgaactgcgcacgcacgcaacgcaacgcaacgcgatctcagctcccaaccaaccttcatcaatccagtaccatcggaagcgtacatgcatacataccatacgtccataccatacggccggaccacgcccagcaaccaatcaataatactcctagtccgccaccagtcgctccgcctcggcgccatcgcacggaaagcttgctgttgctggcgacctcgcggcggggcgccggagcagccatgcctataaaatccgggcgagagcacccacccattcgtaccctatcacccgcctcccctgcctccggtcctctcccgcctctctctctctcttgcacacacacgacgtcgtacgcggcagctagcagcacgcacgatcgatcgccacagcgtacgtactagcacagaggacgacgaccgacgccatggcggcctccttcgcgcgcggcggcgtggcagcggcggcggcgacggcgctggtgatggtggcggcggtgctggcggtgtcgtgggccggcgtggcccgcgcggacttcgcccaggaccgcgccatgtgcgcggaccggctgatggggctggcgacgtgcctgacgttcgtgcaggacaaggcgacggcgcgcgcgccgacgcccgactgctgcgcggggctgaagcaggtggtggccgccagcaagctgtgcatgtgcgtgctggtcaaggaccgcgacgagccggcgctggggttcaagatcaacgtcacccgcgccatggacctgccctcgctctgcagcaaccccgccaccttctccgactgccccagtacgtcacgtgtggcgtcgtaacggagtgcctgtgccgcccctcctctctctctctctctctctctctctctctctctctctggctgagtggctgctgcctcatgaattcctgatgcgctgcgccggcacgtacaccaccgccgtacacacaccgcgtctcgctgtgtgtgcaccaatcgttgctctggtggtcacagcctttttgaagttacaacaccccatggcccatgcacgtgctacagtagcagtaccaccgaccaatcgatgcttgccttttttttttttgatttgacttttggatgacaacctgcagagatcctgggcatgtcgcccgacgcccccgaggcggagatcttcaaggagtacgcgaagaagcacgagagcaacaacggcaccaccattcctgccgctgcaaccggcgccgccgcggcgaccgggaagagcacgagcgcggcgccgacggcggacggcgccgggaggcagcccggcacggtcttcttctacgtcgtgtcggcgctgctcgtctccgtcgcggtcctgctgtgctgatggcttaacggccggccgcggcagcgcatgcattcatggccggccggccggcagggagatggaggtgctactgcacgctgcacgactggaaggaagcccggagacacaattcaagtctttgagatgagcaaactaaaggacacgagtactctttttttttctctttcctgtagcctttttgtgtgtgtgtggcgtgttgtggggagtttgtgagacgtcggcttgtgctagtgctgacggtgcaccagcgacgcagctctgtactacttcccagctgttgggctgtggccttccagcctggggattttaatgtggtggcccgagactgccgacatgtctgtctgaatctgatgattctgatccactatgttggcacattgtatgtttggtttctttggtttcagttttagttctcgtcttcttgcttttttttatttaaagtaatattgtgtaagcaacatgcatgtaactagaaggacctttgtttgtatacgcttaagaaacagtttcgatactaaattttagttcccgtcacatcggtggtttgaatgcttgttaaaactatcaaatatagtctagttacacaactaattacacagattataatcaaacggcataacgaatccattaagcttaatttattcatgatgtatccatgtatgttataataaatatttgctaatcgtgattaattaggtttaataaatttgtttcgctatttagtcttcatttgtataattagttttgtagttttaagcggcattgaaactaacatgattcgaaa

SEQ ID NO: 5656 - DNA, 1220 bp, Zea Mays
gcggtctacatggtactagggccaaggcactacgagacagaaaaatgaaacatccggtgcactatgatgtcgctcgggctatacatcttaatgacctaatgagcctcatgtcatgacgtcatactgctcagtgcactatattttttttctttttacagggtatgccgaatactgccaatatacatacactcgttggttttacagggtatgtcggtacatactcggcatacctgtaggtccaccaatgagatgaacagccccacaacctccttgtcagcacagctcgtgtctccggctagatctctcggcagctcctagtgtgcagtgtgcaggttagacatgcatgttttttgtatcgatactgtagtttgggtgtatttgtgttggtatataccatggccagtcgacgctgggtttgttctgagactttgggccgggaaagtcgaccttgagtttcgatatttctatataactagtggttgacgcgcgcctagcgcacgccgggttatatgacctttaccaaaattaaaaaggaacagtagatatgaaatgcctttaataagtagttagtacgatctgaaggtttgcattgtacttagttacaaactgataacatacatagttttcatgtcaaaatagatatgagctgcgccacataaactgatcctacatcacataatctgatacaggtgtttagtaccacataggaaaactggtccatcatcacataaactgatcttggtgtttagtactacataggaagggttgtttatacttgcgagcattatatttagttacaaaagggtaggatcaataacaaaggtggtgcaatgtatttaatggttgaatctcagttagcttcgtgtggttgcataaatcattcttggtctttttggtctgtggaatctttgaatatggatgatccttgtttgaacctattaaatgaaaggtaggattttaataatcttgtcaatcattatgtagtgaagtataaatatgcggtgcgtaaaaaatatatgcacgtacagttaacatgcttgatggatacgaggaacctaggtagaagcttacctctttggaggagattgaagaggaagctttctctttacctttatcagtgggagtttcctgcaaacgttaaataatagcaatgggtgagttgtacgtacatgtatttaaaaggtcactaaaatcacatgatgttggttgttgatatgtcc

SEQ ID NO: 5657 - DNA, 1822 bp, Zea Mays
ctcccacgcggacgcgctcgcagagtcgcaagagaagagccgcatcgcgtccattaggtccatagcatctggaggggacccgtctggcgtctgtctgggaccgggctgcccagccgctcgatcgacgtttggcgaggacgctgctccggtactccggttggttggaccggaggcgcggcgatgggggcgctgtcgcggccggaggaggtgctggcgctggtgaaattgcgggtggcagcggggcagatcaagcgtcagatcccgcccgaggaacactgggccttcgcctactccatgctccagaaggtctcccgcagcttcgccctcgtcatccagcagctcgggcccgaactccgcaatgccgtgtgcatcttctacctcgtgctccgtgccctcgacaccgttgaggatgacactagcatcccgaccgaggtgaaggtgcccatcctccaggaattttatcggcacgtctacaaccgcgactggcattattcattgtgtgtggctgggccttacaggtggaacaaatcactacaaagtgctgatggataagtttcacctcgtatccactgccttcctggagcttggtcaaggctatcaaaaggcaatcgaagaaatcactaggcgaatgggagcaggaatggcaaaatttatatgcaaggaggttgaaactgttgatgactatgacgagtattgtcactatgtagccgggctagttggttatggactttccaggctcttttatgctgctgggacggaagatctggctccagattcactatcaaattcaatgggtctctttttacagaaaactaatataattagggattatttggaggacataaatgagataccaaagtcccgcatgttctggcctcgagagatatggagtaaatatgcagataaactcgaggatttcaaatatgaggaaaataccgaaaaggcagtacaatgcttgaacgatatagtgacgaatgcactgattcatgctgaagagtgccttcagtacatgtcagccttgaagaaccatgccatcttccatttttgcgcaattccccagataatggcaattggaacatgtgctctttgctacaataacgtgcatgtctttagaggagttgtaaagatgagacgtggtctcacggcacgaataattgacgagacaaattcaatgtcagacgtctataccgctttctatgagttttcttcattgatagagtcaaagattgatgacaatgatccaaatgctgctctaacacggagacacgtgaattcaataaagcaaacttgcaagtcatctggtttggtaaagaggagggggtaccatttggacacatcaccttacaggcctatgctgatcatgattgtcctcctgctggtggctatccttttcggggcactgtataccaagtgacttgtagctggcctttttcccctatggagacgagacaaactctgccaatctgatccttttcgtactctgtagtccccaatgactgcaggaagttcggaattactggctgtagaagtgtagatcatacggcagcatgctactgcttccatgactccgttactgctctcgattcgtttcttcattatgttttttcgcgcgttgtatcgtttgaagctgttttaagcaacggaaaaaaaataccatgtgacacgtgtatcctacgaacatgggtttctgtttagttagcagtgggcgcactgtattatgttgtcttgttgacatgtcatgttttcaaagctgacgtgtttgtgtttaccagaattgtgtagtggagaagaacatttgccgcgttgaccttgatgagttact

SEQ ID NO: 5658 - DNA, 1498 bp, Zea Mays
ctcccacgcggacgcgctcgcagagtcgcaagagaagagccgcatcgcgtccattaggtccatagcatctggaggggacccgtctggcgtctgtctgggaccgggctgcccagccgctcgatcgacgtttggcgaggacgctgctccggtactccggttggttggaccggaggcgcggcgatgggggcgctgtcgcggccggaggaggtgctggcgctggtgaaattgcgggtggcagcggggcagatcaagcgtcagatcccgcccgaggaacactgggccttcgcctactccatgctccagaaggtctcccgcagcttcgccctcgtcatccagcagctcgggcccgaactccgcaatgccgtgtgcatcttctacctcgtgctccgtgccctcgacaccgttgaggatgacactagcatcccgaccgaggtgaaggtgcccatcctccaggaattttatcggcacgtctacaaccgcgactggcattattcatgtggaacaaatcactacaaagtgctgatggataagtttcacctcgtatccactgccttcctggagcttggtcaaggctatcaaaaggcaatcgaagaaatcactaggcgaatgggagcaggaatggcaaaatttatatgcaaggaggttgaaactgttgatgactatgacgagtattgtcactatgtagccgggctagttggttatggactttccaggctcttttatgctgctgggacggaagatctggctccagattcactatcaaattcaatgggtctctttttacagaaaactaatataattagggattatttggaggacataaatgagataccaaagtcccgcatgttctggcctcgagagatatggagtaaatatgcagataaactcgaggatttcaaatatgaggaaaataccgaaaaggcagtacaatgcttgaacgatatagtgacgaatgcactgattcatgctgaagagtgccttcagtacatgtcagccttgaagaaccatgccatcttccatttttgcgcaattccccagataatggcaattggaacatgtgctctttgctacaataacgtgcatgtctttagaggagttgtaaagatgagacgtggtctcacggcacgaataattgacgagacaaattcaatgtcagacgtctataccgctttctatgagttttcttcattgatagagtcaaagattgatgacaatgatccaaatgctgctctaacacggagacacgtgaattcaataaagcaaacttgcaagtcatctggtttggtaaagaggagggggtaccatttggacacatcaccttacaggcctatgctgatcatgattgtcctcctgctggtggctatccttttcggggcactgtataccaagtgacttgtagctggcctttttcccctatggagacgagacaaactctgccaatctgatatatgctcaaagaggattgcaaaggagaataaggaactcaagaaagaagtag

SEQ ID NO: 5659 - DNA, 1281 bp, Zea Mays
gcatgatggaagcaaggagccaagttttgatagttacacatcggagacaatttctatcaaaaggcaatcgaagaaatcactaggcgaatgggagcaggaatggcaaaatttatatgcaaggaggttgaaactgttgatgactatgacgagtattgtcactatgtagccgggctagttggttatggactttccaggctcttttatgctgctgggacggaagatctggctccagattcactatcaaattcaatgggtctctttttacagaaaactaatataattagggattatttggaggacataaatgagataccaaagtcccgcatgttctggcctcgagagatatggagtaaatatgcagataaactcgaggatttcaaatatgaggaaaataccgaaaaggcagtacaatgcttgaacgatatagtgacgaatgcactgattcatgctgaagagtgccttcagtacatgtcagccttgaagaaccatgccatcttccatttttgcgcaattccccagataatggcaattggaacatgtgctctttgctacaataacgtgcatgtctttagaggagttgtaaagatgagacgtggtctcacggcacgaataattgacgagacaaattcaatgtcagacgtctataccgctttctatgagttttcttcattgatagagtcaaagattgatgacaatgatccaaatgctgctctaacacggagacacgtgaattcaataaagcaaacttgcaagtcatctggtttggtaaagaggagggggtaccatttggacacatcaccttacaggcctatgctgatcatgattgtcctcctgctggtggctatccttttcggggcactgtataccaagtgacttgtagctggcctttttcccctatggagacgagacaaactctgccaatctgatccttttcgtactctgtagtccccaatgactgcaggaagttcggaattactggctgtagaagtgtagatcatacggcagcatgctactgcttccatgactccgttactgctctcgattcgtttcttcattatgttttttcgcgcgttgtatcgtttgaagctgttttaagcaacggaaaaaaaataccatgtgacacgtgtatcctacgaacatgggtttctgtttagttagcagtgggcgcactgtattatgttgtcttgttgacatgtcatgttttcaaagctgacgtgtttgtgtttaccagaattgtgtagtggagaagaacatttgccgcgttgaccttgatgagttact

SEQ ID NO: 5660 - DNA, 795 bp, Zea Mays
caagaatccaagactgattctccatctattttgataatggcaattggaacatgtgctctttgctacaataacgtgcatgtctttagaggagttgtaaagatgagacgtggtctcacggcacgaataattgacgagacaaattcaatgtcagacgtctataccgctttctatgagttttcttcattgatagagtcaaagattgatgacaatgatccaaatgctgctctaacacggagacacgtgaattcaataaagcaaacttgcaagtcatctggtttggtaaagaggagggggtaccatttggacacatcaccttacaggcctatgctgatcatgattgtcctcctgctggtggctatccttttcggggcactgtataccaagtgacttgtagctggcctttttcccctatggagacgagacaaactctgccaatctgatccttttcgtactctgtagtccccaatgactgcaggaagttcggaattactggctgtagaagtgtagatcatacggcagcatgctactgcttccatgactccgttactgctctcgattcgtttcttcattatgttttttcgcgcgttgtatcgtttgaagctgttttaagcaacggaaaaaaaataccatgtgacacgtgtatcctacgaacatgggtttctgtttagttagcagtgggcgcactgtattatgttgtcttgttgacatgtcatgttttcaaagctgacgtgtttgtgtttaccagaattgtgtagtggagaagaacatttgccgcgttgaccttgatgagttact

SEQ ID NO: 5661 - DNA, 909 bp, Zea Mays
ctcaaccctagcccaggagatttatcaatctagtcaagcaagagttaagaaagaaaacccttccttcttgcttggtcgtgggcaaggctattggccggtacccttgcactctctcatccctagccgccaccataacagattgttgtttgatcacggatggaattcatgtcatgatctaggcgaaaatgtgtctctattacctcacactctttatttataagaggtctcacggcacgaataattgacgagacaaattcaatgtcagacgtctataccgctttctatgagttttcttcattgatagagtcaaagattgatgacaatgatccaaatgctgctctaacacggagacacgtgaattcaataaagcaaacttgcaagtcatctggtttggtaaagaggagggggtaccatttggacacatcaccttacaggcctatgctgatcatgattgtcctcctgctggtggctatccttttcggggcactgtataccaagtgacttgtagctggcctttttcccctatggagacgagacaaactctgccaatctgatccttttcgtactctgtagtccccaatgactgcaggaagttcggaattactggctgtagaagtgtagatcatacggcagcatgctactgcttccatgactccgttactgctctcgattcgtttcttcattatgttttttcgcgcgttgtatcgtttgaagctgttttaagcaacggaaaaaaaataccatgtgacacgtgtatcctacgaacatgggtttctgtttagttagcagtgggcgcactgtattatgttgtcttgttgacatgtcatgttttcaaagctgacgtgtttgtgtttaccagaattgtgtagtggagaagaacatttgccgcgttgaccttgatgagttact

SEQ ID NO: 5662 - DNA, 638 bp, Zea Mays
gcactattgttgctgcagcctacatggagtctgagttgcctattgatgacaatgatccaaatgctgctctaacacggagacacgtgaattcaataaagcaaacttgcaagtcatctggtttggtaaagaggagggggtaccatttggacacatcaccttacaggcctatgctgatcatgattgtcctcctgctggtggctatccttttcggggcactgtataccaagtgacttgtagctggcctttttcccctatggagacgagacaaactctgccaatctgatccttttcgtactctgtagtccccaatgactgcaggaagttcggaattactggctgtagaagtgtagatcatacggcagcatgctactgcttccatgactccgttactgctctcgattcgtttcttcattatgttttttcgcgcgttgtatcgtttgaagctgttttaagcaacggaaaaaaaataccatgtgacacgtgtatcctacgaacatgggtttctgtttagttagcagtgggcgcactgtattatgttgtcttgttgacatgtcatgttttcaaagctgacgtgtttgtgtttaccagaattgtgtagtggagaagaacatttgccgcgttgaccttgatgagttact

SEQ ID NO: 5663 - DNA, 694 bp, Zea Mays
cttcttccagctacgagtctacgaccagttcggcagcacggcgagcatcccgtccgaccatccgctcgctcctcagagctagcctccaaactcgcaattatataactaccgtcccttgcaactttccagaccttttgcccccctgcttcctccgcctgcaccctctcacgagcgcccgcccgcccagatctagggttccatccgcgggcaagatgagcagcccccatggcggcctcgacgaccagatcgagcggctcatgcagtgcaagccgctcgctgagcccgaggtaagggctctgtgtgagaaggcaaaggagattctgatggaggaaagcaatgttcagcctgtaaagagtcctgttactatatgcggtgatattcatggacaatttcatgatcttgctgaactcttccgaattggtggaaagtgtccagatacgaactacctgtttatgggagattatgttgaccgtggttactactctgtcgaaactgtcacacttttggtgtctttaaaagttcgatatcctcagaggatcaccattctcagaggaaaccatgaaagccgacagattactcaagtttatgggttctatgacgaatgcttaaggaagtatggaaacgcaaatgtctggaaaacatttacagatctatttgattacttccccttgactgcattgtttgtttgttcttt

SEQ ID NO: 5664 - DNA, 256 bp, Zea Mays
cacttttctgccctcctagcgatagggcctgtctgttctccttccgccgctgctcgtcgtcagccccagcctcgtcgtggatcctgccccaccactccctctcgattccaaggtggatcgacacagagatgaccccttccagcccgccgtggagacgacgcttgccttccagtctgacatggagaggatcctgctactgcgttctctgtccatccccaggacacaggatgatgaatcagccttagcggttttggaa

SEQ ID NO: 5665 - DNA, 666 bp, Zea Mays
aaggttagagaatctagagctaaaaagagaggtgtcagcacctttgaaaatgaatatattgacgatcatgaagggatggcttatcttgagcatatgccaacatggactggttgtaatcatatcccaacaatatagaaatgttaagttagaggactttgtggatgattcctactccgtggagaagttccgaaaagcttatgaggggagggtggaacaactccgagacaagttcttttggccgagagtagattttgcaaataaagtgagtgccccatttgggaaaagaggtgtaggacgacaatggaagaatagaattaagggatgccttgaaggtggtagcgggagaaaacataagggaaatgagactgagaaagatagaaaagtgatccgaagaaagtataagtgccccaactgtggggaattgggacatcgcaagaacagcccgaagtgtccccaaaatgggacaaagaaaaagccaagaaaaccaagaaagaataccacgaaaggatggattcctccagcactaagggaagatgtcggctcatcacagacaccactcgccttgtctcatgcattggaagacgccggttcatcgcagccttctgcaagggtagctgagtcccctccaaggcaaactaggatagttgtacgcaaaatgacaccgaa

SEQ ID NO: 5666 - DNA, 1149 bp, Zea Mays
aaacgagcgagcgtatggctgtctccgtccggttgtagcgaagtccgacggcgggatccgattgtggcgaagtcacgcccgtgcagtgcgcccacagcaaaaagctccgcggcggtcgcgtgacgtcgcggcaaacggcaaacagcgaattcacagcagcaaacagtgtgaatcctgcaatctccaaacccaagcccggcggcgagatccgcgcggcaggcggacggggccgctcgaccgccttcgtgccttccaattcatgacggtgcggccggggtgggtggtgagggtggcgcatggctcggcggcggcgtggcagcgcgtggcgtgcaacccggagacgctcccgcctgaccgcgtcctcgcgctcatctgctgcgcgccactccacctcctcgcgcgcctcgccgccttcctctgcgtccccttcctccccgggcccgcacacaccccgctccgcctccaccgccgccgcttcctcgtcctccgccccccggagtttgcgccgcaccctttcgcttactccccctcgtcttcctcttcttcgtcggatgaggaagaggacgacgacgatggggacggcatccacgaacacgtcgattgaggtttgtaggccaaaaaggaaaaatggagataactttctcagaacatatctattcatgtgtttttgctacaaggttttgggtcatacctttgtgggagcacaatgtgatcctgatatcctctgcgtctctaattggtcatagcatgctaacttatgggaggttgcttgaggttaaggctcagaaaaggagaatttggggttgaggagggaagaatgaacattggcatgttgtgctggatgctgaactgctcgcccttctatgattctatctcgtagttctcaggatatggcattatgacgacgctcattataaaaagccaggtcagaagctctgcaaaaaggataccaacggatgaaactggtttgagttgtcattattgttgctgttgtttaaacgaactactgatttttttttttatattgaaaagaagaaagtggatgaggttaaaccttggtaaagaggatggttgtgttagacttggcgagtcaacgttaaacttagtcattttaatagtaatggaatctgaaagaaattcattgtggcg

SEQ ID NO: 5667 - DNA, 989 bp, Zea Mays
aacgagcgagcgtatggctgtctccgtccggttgtagcgaagtccgacggcgggatccgattgtggcgaagtcacgcccgtgcagtgcgcccacagcaaaaagctccgcggcggtcgcgtgacgtcgcggcaaacggcaaacagcgaattcacagcagcaaacagtgtgaatcctgcaatctccaaacccaagcccggcggcgagatccgcgcggcaggcggacggggccgctcgaccgccttcgtgccttccaattcatgacggtgcggccggggtgggtggtgagggtggcgcatggctcggcggcggcgtggcagcgcgtggcgtgcaacccggagacgctcccgcctgaccgcgtcctcgcgctcatctgctgcgcgccactccacctcctcgcgcgcctcgccgccttcctctgcgtccccttcctccccgggcccgcacacaccccgctccgcctccaccgccgccgcttcctcgtcctccgccccccggagtttgcgccgcaccctttcgcttactccccctcgtcttcctcttcttcgtcggatgaggaagaggacgacgacgatggggacggcatccacgaacacgtcgattgaggttgcttgaggttaaggctcagaaaaggagaatttggggttgaggagggaagaatgaacattggcatgttgtgctggatgctgaactgctcgcccttctatgattctatctcgtagttctcaggatatggcattatgacgacgctcattataaaaagccaggtcagaagctctgcaaaaaggataccaacggatgaaactggtttgagttgtcattattgttgctgttgtttaaacgaactactgatttttttttttatattgaaaagaagaaagtggatgaggttaaaccttggtaaagaggatggttgtgttagacttggcgagtcaacgttaaacttagtcattttaatagtaatggaatctgaaagaaattcattgtggcg

SEQ ID NO: 5668 - DNA, 985 bp, Zea Mays
gagcgagcgtatggctgtctccgtccggttgtagcgaagtccgacggcgggatccgattgtggcgaagtcacgcccgtgcagtgcgcccacagcaaaaagctccgcggcggtcgcgtgacgtcgcggcaaacggcaaacagcgaattcacagcagcaaacagtgtgaatcctgcaatctccaaacccaagcccggcggcgagatccgcgcggcaggcggacggggccgctcgaccgccttcgtgccttccaattcatgacggtgcggccggggtgggtggtgagggtggcgcatggctcggcggcggcgtggcagcgcgtggcgtgcaacccggagacgctcccgcctgaccgcgtcctcgcgctcatctgctgcgcgccactccacctcctcgcgcgcctcgccgccttcctctgcgtccccttcctccccgggcccgcacacaccccgctccgcctccaccgccgccgcttcctcgtcctccgccccccggagtttgcgccgcaccctttcgcttactccccctcgtcttcctcttcttcgtcggatgaggaagaggacgacgacgatggggacggcatccacgaacacgtcgattgaggtttgtaggccaaaaaggaaaaatggagataactttctcagaacatatctattcatgtgtttttgctacaaggttttgggtcatacctttgtgggagcacaatgtgatcctgatatcctctgcgtctctaattggtcatagcatgctaacttatgggaggttgcttgaggttaaggctcagaaaaggagaatttggggttgaggagggaagaatgaacattggcatgttgtgctggatgctgaactgctcgcccttctatgattctatctcgtagttctcaggatatggcattatgacgacgctcattataaaaagccagatgaagcgtgtctagctacttgggctcacagattctgtcaagatcatggctggctgctgagttg

SEQ ID NO: 5669 - DNA, 2090 bp, Zea Mays
accggtatctccagcggctcggctgacggccctccactgtagtctctcgatcgagctcggctcggtcctcccctgcgaggttccccgtcttcgtccgcgctgcaatccaacctggcgccgccgaacccttctctcgcccggtgctgccgaagccgaacccttctctcgcccggcctgccgtagtcctccactccgccggatcctctctcagctcgagcggtcttggagatccgtccgtcccgggatcatttggcgcggaggtttggcctgggaaaatggcaaacatacgtgcacttctggtcggcttatcgcgggcaaggggatccttagcagaggctggacgatgtgcttccacgaggccatcaattctagcatctctgggcgcacattacaagatccccatgccagcccgctggttctcatctacagggcttcctccacatctggtggtcggaatgccagcactatctcctactatggtaacatcgcgaaatggagaaaacaggaaggggacaagatagaggttggtgatgtgatatgtgagatagaaactgataaagccactcttgagtttgaaagccttgaagaggggtatttggccaagattttagcacctgaaggttctaaagatgttcaagttggacaacccattgctgttacggttgaagacgttgaggatattaagagtataccagctgatacatctttcggtggtgaacaaaaggaagagcaatcaacagaaagtgcaccgcaaaacaaagtagttaatgtgtctgaacaaagctcaacagtgagccggatcagcccggcagctaaattactgatcaaggaacatggactggatacatcatcactgagagcatcaggcccccgtggcacccttctgaaaggggatgttctggcagcattgaagtcaggtatcaattcaagttcaaccaaagaaaagaagtctccagctcaaccttcgtctcagccaactcgagattcccaatctcaagcatcctctatttcacaaaaggatgatacatatgaagatattccgaatagtcagatacgcaaggtcattgccaaaaggttgctcgaatcaaaacagacgactccacatttgtatctatccaaagatgttgtgctggatcccttgctcgctttcaggaatgaactaaaagagctacatggcattaaagtttcagtaaatgacatcatcataaaggctgtggcaattgcgttgcggaacgtccctgaagcaaatgcttactggaacaatgataaggaagaaactcaaaagtgcgattcagttgatatatctattgctgttgctacagagaagggcctgatgaccccaataataaggaatgcggatcaaaagactatatctgcaatatccgcagaggttaagcagctggctgaaaaggcaagagctgggaagcttgcacctaacgaatttcaagggggaactttcagtatctcgaatcttgggatgtaccctgtggaccatttctgtgcaatcattaaccctccacagtctggcattctcgcagtgggtagaggaaacaaggttgttgaacctgttgtggacagcgatggaaccgagaaggctgctgcagttacaaagatgagcctgacactatctgctgaccatcgtgtatttgatgggcaagtaggaggcaagtttttcacggagctggcgctgaatttcagcgacatcaggaggctgctattgtaaatgaaaggaggcaattaccgtgttttgacgtattctttgggagcgaaaaccgctcaggaaaagagaacatttggatgcaacccgtggtctgctgcttgatcggcatcccgtacaaaagtaaccaattttgtaataaatttataataagaatgcactggcaccttcacggttttttaacccgttttccattagttgggaggaggcatgtcctgagaatttagcaggtacggtgccattcaacttcgtggttccgcaacaatgaccacccttagattatgcaatctgagcggttctggatggacgcccattttgttgatgaccttgtgatacatggaagtaataacagaatgcttttgttacatttccc

SEQ ID NO: 5670 - DNA, 981 bp, Zea Mays
cctcaatcttcctatcctattttctctcactccatctcaagtcaggcacggtgacttgacgaggcccatctaagcacactacagcaccgggcgaggcggctaggccccctcaccgtccaccggcgactgggccggccgtcgctgccgccctgcctctccaccgtcgccggcgacgagcaccactaggtgtttttgagtctgttgcgagtgttgtggccatgtccatgttcaataggatcttcgggaagcccaaggagcaggccaactccaatgctttggccactctggacaagttaaatgagacacttgatatgctggagaagaaagaaaaggtgctggagaaaaaagcaaacgctgagcttgagagagccaaggagttctcgaaagcaaagaataaaagagcggctatccaatccttgaagaggaaaaaactttatgagcaacaaattgagcagcttggaaattttcagttgagaatccatgatcagatgatcatgttagaagcagctaaagctacaacagagactgttgatgcattgagaactggagctgcagctatgaaagcaatgcaaaaagcaacaaacattgatgatgtcgacaagaccatggatgaaattaacgaacagactgaaaacatgaaacaaattcaggatgctttgtcagctcctcttggagcttttgctgatttcgacgaggatgaactggaagctgaacttgaagaactggagggagcagagttggaatctcagcttcttgagcctgttgcagctcctccggtgcatccagtgcatgtcccagccaacaagcaaccagctcgccctgccccacagaaagttacagctgaagatgatgaacttgctgcactgcaagcggaaatggcattgtgatcagttgtcagcattacttatttgttaactatccgatgcagaggtgtacatatattagctagcttttaaattattctatactgttttattcctt

SEQ ID NO: 5671 - DNA, 1271 bp, Zea Mays
ctcaatcttcctatcctattttctctcactccatctcaagtcaggcacggtgacttgacgaggcccatctaagcacactacagcaccgggcgaggcggctaggccccctcaccgtccaccggcgactgggccggccgtcgctgccgccctgcctctccaccgtcgccggcgacgagcaccactaggtgtttttgagtctgttgcgagtgttgtggccatgtccatgttcaataggatcttcgggaagcccaaggagcaggccaactccaatgctttggccactctggacaagttaaatgagacacttgatatgctggagaagaaagaaaaggtgctggagaaaaaagcaaacgctgagcttgagagagccaaggagttctcgaaagcaaagaataaaagagcggctatccaatccttgaagaggaaaaaactttatgagcaacaaattgagcagcttggaaattttcagttgagaatccatgatcagatgatcatgttagaagcagctaaagctacaacagagactgttgatgcattgagaactggagctgcagctatgaaagcaatgcaaaaagcaacaaacattgatgatgtcgacaagaccatggatgaaattaacgaacagactgaaaacatgaaacaaattcaggatgctttgtcagctcctcttggagcttttgctgatttcgacgaggatgaactggaagctgaacttgaagaactggagggagcagagttggaatctcagcttcttgagcctgttgcagctcctccggtgcatccagtgcatgtcccagccaacaagcaaccagctcgccctgccccacagaaagttacagctgaagatgatgaacttgctgcactgcaagcggaaatggcattgtgatcaggaacttgcaggttctcatggagaggtgaaacatgtaaatgaagatgaaagctgagtcagctatactatatatttgccatgcgtgtacaaacttggccggatatttggcaaccgcagcagaaaaaagaggctgctccagcccagtgcttgtttcagtgactttggaatctgttgtcgatcgatgacagttcttctgttaatgtcgctcggttagctctacgctaattattcagatcacccaacgtgcattgtttcagtgttttgcttaattggcccatactgtctggagccgtgcatgtaaaagtgttgcagggttcacgtttgatgtggctgttcgcagcgctttcaacctcagttgaaggtccaagcaaggtggtgcggc

SEQ ID NO: 5672 - DNA, 969 bp, Zea Mays
ctcactccatctcaagtcaggcacggtgacttgacgaggcccatctaagcacactacagcaccgggcgaggcggctaggccccctcaccgtccaccggcgactgggccggccgtcgctgccgccctgcctctccaccgtcgccggcgacgagcaccactagctgttgttttgcctcccaggtgtttttgagtctgttgcgagtgttgtggccatgtccatgttcaataggatcttcgggaagcccaaggagcaggccaactccaatgctttggccactctggacaagttaaatgagacacttgatatgctggagaagaaagaaaaggtgctggagaaaaaagcaaacgctgagcttgagagagccaaggagttctcgaaagcaaagaataaaagagcggctatccaatccttgaagaggaaaaaactttatgagcaacaaattgagcagcttggaaattttcagttgagaatccatgatcagatgatcatgttagaagcagctaaagctacaacagagactgttgatgcattgagaactggagctgcagctatgaaagcaatgcaaaaagcaacaaacattgatgatgtcgacaagaccatggatgaaattaacgaacagactgaaaacatgaaacaaattcaggatgctttgtcagctcctcttggagcttttgctgatttcgacgaggatgaactggaagctgaacttgaagaactggagggagcagagttggaatctcagcttcttgagcctgttgcagctcctccggtgcatccagtgcatgtcccagccaacaagcaaccagctcgccctgccccacagaaagttacagctgaagatgatgaacttgctgcactgcaagcggaaatggcattgtgatcagttgtcaaaaatagagcagagctggtgccggaggatcccacatgagtgtggtctagactgtagagaagggataaaccgaggcagg

SEQ ID NO: 5673 - DNA, 910 bp, Zea Mays
ctcactccatctcaagtcaggcacggtgacttgacgaggcccatctaagcacactacagcaccgggcgaggcggctaggccccctcaccgtccaccggcgactgggccggccgtcgctgccgccctgcctctccaccgtcgccggcgacgagcaccactagctgttgttttgcctcccaggtgtttttgagtctgttgcgagtgttgtggccatgtccatgttcaataggatcttcgggaagcccaaggagcaggccaactccaatgctttggccactctggacaagttaaatgagacacttgatatgctggagaagaaagaaaaggtgctggagaaaaaagcaaacgctgagcttgagagagccaaggagttctcgaaagcaaagaataaaagagcggctatccaatccttgaagaggaaaaaactttatgagcaacaaattgagcagcttggaaattttcagttgagaatccatgatcagatgatcatgttagaagcagctaaagctacaacagagactgttgatgcattgagaactggagctgcagctatgaaagcaatgcaaaaagcaacaaacattgatgatgtcgacaagaccatggatgaaattaacgaacagactgaaaacatgaaacaaattcaggatgctttgtcagctcctcttggagcttttgctgatttcgacgaggatgaactggaagctgaacttgaagaactggagggagcagagttggaatctcagcttcttgagcctgttgcagctcctccggtgcatccagtgcatgtcccagccaacaagcaaccagctcgccctgccccacagaaagttacagctgaagatgatgaacttgctgcactgcaagcggaaatggcattgtgatcagaaattctcttggaactacacttaat

SEQ ID NO: 5674 - DNA, 366 bp, Zea Mays
gcaccgacacctctacggtcccagagatattcagatcagcctgctgcacgggacatgcttttggtggcaaggggacggacgacgggtgcctggtgcacgggccatcattccgttctactagccatcatctgcactgcgggcaggatgacaattccggaactgctagtgcaggagaccggagtgagtgaccccccgatcatgcatgtttctttctttctttctttcagctggaatgtctgcgtggagaggtatcaatcaaaccaattgccagctcctctctctctctctctatcaccaatgacagcagaccgaccattagctggcgtggtgtgacttgcccgtctgtcttcagcaccgtgcactctg

SEQ ID NO: 5675 - DNA, 2568 bp, Zea Mays
cgagctgcggaaacggcaaaagtggccgcgagacatcgctgtgcagtgcagtgcagcaagcggctagtggacgcacgcgccgctcccaaccgagacgacgagccgcccaaggcgacgagccattactcccgtttccccaaatcccaccacgcaggcagtcaggcacccgcattgtttcaaaaatctcgaatcggcccctggttctggcagcgcagccgccgccggcggacggagggccctctttccgggtgaggcaagtcgaggcctgctttgcctcgctgtaagctcgccggaagagggaaccggggaggggaaaagacgcgcggcagtggtggagtggaggtgccaaggctgagggaggcgcgccgccgcccatggacgccgcgcggtgggtcgtgtgcctgctcgtgacggtcatctgcttgtcgtgcgccgccgcgaacccgatgtccgtcagtcccaccatgctcaacgagggtgggcatcagcatgccatagcgtacgtccagggcgacaagtactacggcgccaaggcgactatcaatgtgtgggcgcccaagatcgaacagcccaacgagttcagcttgtcccagctctggatcttgggcggctcattcggggaggatctgaacagcatcgaggctggatggcaggttagccctgacctctacggggataacaacacgaggctcttcacgtactggacaagtgatgcgtaccaggcgacagggtgctacaacatgctgtgctcagggttcatccagatcaacaaccagatcgccatgggcgccagcatcttcccgacctcgagctactccggctcccagtatgatatcagcatactgatctggaaggaccccaaggagggcaactggtggatgcagttcggcaaggactacgtgctgggttactggccgtcgttcctcttctcgtacctggcggacagcgcgtcgatggtggagtggggcggggaggtggtgaactcgcaggcggacggcgtgcacacgtcgacgcagatgggcagcgggcacttccccgaggaagggttcggcagggcgagctacttcaagggggtgcaggtggtggacagcagcaacaacctcggggcgcccaggggcggcctgggcaccttcacggagcagtccagctgctacgacgtgcagagcggcagcaacgccgactggggcacctacttctactacggcgggcccgggaggagctccagctgccagtaactggtgggctctctagctaggtagtgatgtgcgtgctgctggcttcacctttgtttgtggtagtttcttcttcttcttccgattagtcattagtgccgccgtgccgggatggcttctgaagagaagcatggcatgtggtggtggtggtgccctaccctacccttgttgtggtggcctgcctccttttcctatatggtagattcacttgttcgtccttgtggttaggactgggcatttttaacccgaaaaccgaacccgaaccgaacccgaacccgaatagaccgaataggtcggttttcggttttcgggttcgggtttcggttcatagatctcttctgttcgggtatcggtttagggttcggtttccagccagccaaacccgattagactcaaagaaccgaactatagtgatcctccctctgtccctcagcccaaaccgcgaaacctagtaacgggctaacggcccaactcaggcacaggcactccgcggtgacataggcgcagtccagtccgcacccgcaccgcacgcagcacgcacccgcaggccgcattgccgcaaccctagccgcatggcgcacgctggtccgccgccgcgccgtcgatccaccgctgctctgccgcacggagtcgcactggtcagccaccgcgccgtcgatccaccgctctgccgcctctgcgcgtcagccgcgctaggcgccaaccttccactccataccggtccaccggcgtcgatccaccgacgactccgtactcggtacttccaccgcatcgcggcaccggtccaccgctctggcgactcggtgttctgcacttctgctccgatttcggcgtcctgctccacggtgcccacgactcgctgcagaccgacccagcacgtaaggtgccgcggatcctggttgcgtccgaggagaggctgcgccggaacgcggagttcctgctcaacgaggtcgggctgccgccgcagtacatcgtccgccgttcggtgcttctcatgtacagcctcgagaggcggatagtgccccggcacctcgtgctgatggttctcaaagagaaggggttggttgagcaggaccggtgcttcttcaacgtggttctcaacgaggctgcacttctgtttgtgaattgtgatggattgatgatgaacctgttaagttatttcctgtggtgtatgaacttgcatgtagttggcattttctaagtcaatttgtcatgtatttgtatgcacttctatgcaattttgtgtgaactgtgaaccactaaacctatttatcaattatcatgtctgtgcactgttcgggttggtgaagaaccgaatagaccgaaccgatttttt

SEQ ID NO: 5676 - DNA, 2550 bp, Zea Mays
cttttggccactccttgagctcgtgctctgattcaataaaagacgacggcttttgagtcatcttttctggttgttcttgaaaggaattcgctttcttgctattcctctcacttttgtgagtgtatgtgtgtgggagtccagacggggacatgatagactgcgtgcacatctcacaccagccagcgtttgatcacccatacctcaagaaccacacgatccagatgaggccgaactaccacccggaagggctgtacgaggaatccaaggcctccagcagcggtggcgagaggcctatggctcagctctggcatcagaacgggaggtgtcccgaaggtacggtccccatcaggagaacgaggaaggacgacctgctgagggcaagctcgatgcgtcggtacggcaggaagcgccgcgccgccgcgaacccgatgtccgtcagtcccaccatgctcaacgagggtgggcatcagcatgccatagcgtacgtccagggcgacaagtactacggcgccaaggcgactatcaatgtgtgggcgcccaagatcgaacagcccaacgagttcagcttgtcccagctctggatcttgggcggctcattcggggaggatctgaacagcatcgaggctggatggcaggttagccctgacctctacggggataacaacacgaggctcttcacgtactggacaagtgatgcgtaccaggcgacagggtgctacaacatgctgtgctcagggttcatccagatcaacaaccagatcgccatgggcgccagcatcttcccgacctcgagctactccggctcccagtatgatatcagcatactgatctggaaggaccccaaggagggcaactggtggatgcagttcggcaaggactacgtgctgggttactggccgtcgttcctcttctcgtacctggcggacagcgcgtcgatggtggagtggggcggggaggtggtgaactcgcaggcggacggcgtgcacacgtcgacgcagatgggcagcgggcacttccccgaggaagggttcggcagggcgagctacttcaagggggtgcaggtggtggacagcagcaacaacctcggggcgcccaggggcggcctgggcaccttcacggagcagtccagctgctacgacgtgcagagcggcagcaacgccgactggggcacctacttctactacggcgggcccgggaggagctccagctgccagtaactggtgggctctctagctaggtagtgatgtgcgtgctgctggcttcacctttgtttgtggtagtttcttcttcttcttccgattagtcattagtgccgccgtgccgggatggcttctgaagagaagcatggcatgtggtggtggtggtgccctaccctacccttgttgtggtggcctgcctccttttcctatatggtagattcacttgttcgtccttgtggttaggactgggcatttttaacccgaaaaccgaacccgaaccgaacccgaacccgaatagaccgaataggtcggttttcggttttcgggttcgggtttcggttcatagatctcttctgttcgggtatcggtttagggttcggtttccagccagccaaacccgattagactcaaagaaccgaactatagtgatcctccctctgtccctcagcccaaaccgcgaaacctagtaacgggctaacggcccaactcaggcacaggcactccgcggtgacataggcgcagtccagtccgcacccgcaccgcacgcagcacgcacccgcaggccgcattgccgcaaccctagccgcatggcgcacgctggtccgccgccgcgccgtcgatccaccgctgctctgccgcacggagtcgcactggtcagccaccgcgccgtcgatccaccgctctgccgcctctgcgcgtcagccgcgctaggcgccaaccttccactccataccggtccaccggcgtcgatccaccgacgactccgtactcggtacttccaccgcatcgcggcaccggtccaccgctctggcgactcggtgttctgcacttctgctccgatttcggcgtcctgctccacggtgcccacgactcgctgcagaccgacccagcacgtaaggtgccgcggatcctggttgcgtccgaggagaggctgcgccggaacgcggagttcctgctcaacgaggtcgggctgccgccgcagtacatcgtccgccgttcggtgcttctcatgtacagcctcgagaggcggatagtgccccggcacctcgtgctgatggttctcaaagagaaggggttggttgagcaggaccggtgcttcttcaacgtggttctcaacgaggctgcacttctgtttgtgaattgtgatggattgatgatgaacctgttaagttatttcctgtggtgtatgaacttgcatgtagttggcattttctaagtcaatttgtcatgtatttgtatgcacttctatgcaattttgtgtgaactgtgaaccactaaacctatttatcaattatcatgtctgtgcactgttcgggttggtgaagaaccgaatagaccgaaccgatttttt

SEQ ID NO: 5677 - DNA, 2654 bp, Zea Mays
ctctcacttttgtgagtgtatgtgtgtgggagtccagacggggacatgatagactgcgtgcacatctcacaccagccagcgtttgatcacccatacctcaagaaccacacgatccagatgaggccgaactaccacccggaagggctgtacgaggaatccaaggcctccagcagcggtggcgagaggcctatggctcagctctggcatcagaacgggaggtgtcccgaaggtacggtccccatcaggagaacgaggaaggacgacctgctgagggcaagctcgatgcgtcggtacggcaggaagcgccgcgccgccgcgaacccgatgtccgtcagtcccaccatgctcaacgagggtgggcatcagcatgccatagcgtacgtccagggcgacaagtactacggcgccaaggcgactatcaatgtgtgggcgcccaagatcgaacagcccaacgagttcagcttgtcccagctctggatcttgggcggctcattcggggaggatctgaacagcatcgaggctggatggcaggtacagagttagagagagagagagagagaggacacacaccgcaacacatgagcttcacattcataatcagcaccgagtaaatgcagcaccgtttgcgcggttggttgccgggccgcgatgcagtgtgtttgtgtgtgtgtgtgtgtgtgtgtcatgccatcacgaagcctgaatctgaataactcttgttgcttctccattgcatcaggttagccctgacctctacggggataacaacacgaggctcttcacgtactggacaagtgatgcgtaccaggcgacagggtgctacaacatgctgtgctcagggttcatccagatcaacaaccagatcgccatgggcgccagcatcttcccgacctcgagctactccggctcccagtatgatatcagcatactgatctggaaggaccccaaggagggcaactggtggatgcagttcggcaaggactacgtgctgggttactggccgtcgttcctcttctcgtacctggcggacagcgcgtcgatggtggagtggggcggggaggtggtgaactcgcaggcggacggcgtgcacacgtcgacgcagatgggcagcgggcacttccccgaggaagggttcggcagggcgagctacttcaagggggtgcaggtggtggacagcagcaacaacctcggggcgcccaggggcggcctgggcaccttcacggagcagtccagctgctacgacgtgcagagcggcagcaacgccgactggggcacctacttctactacggcgggcccgggaggagctccagctgccagtaactggtgggctctctagctaggtagtgatgtgcgtgctgctggcttcacctttgtttgtggtagtttcttcttcttcttccgattagtcattagtgccgccgtgccgggatggcttctgaagagaagcatggcatgtggtggtggtggtgccctaccctacccttgttgtggtggcctgcctccttttcctatatggtagattcacttgttcgtccttgtggttaggactgggcatttttaacccgaaaaccgaacccgaaccgaacccgaacccgaatagaccgaataggtcggttttcggttttcgggttcgggtttcggttcatagatctcttctgttcgggtatcggtttagggttcggtttccagccagccaaacccgattagactcaaagaaccgaactatagtgatcctccctctgtccctcagcccaaaccgcgaaacctagtaacgggctaacggcccaactcaggcacaggcactccgcggtgacataggcgcagtccagtccgcacccgcaccgcacgcagcacgcacccgcaggccgcattgccgcaaccctagccgcatggcgcacgctggtccgccgccgcgccgtcgatccaccgctgctctgccgcacggagtcgcactggtcagccaccgcgccgtcgatccaccgctctgccgcctctgcgcgtcagccgcgctaggcgccaaccttccactccataccggtccaccggcgtcgatccaccgacgactccgtactcggtacttccaccgcatcgcggcaccggtccaccgctctggcgactcggtgttctgcacttctgctccgatttcggcgtcctgctccacggtgcccacgactcgctgcagaccgacccagcacgtaaggtgccgcggatcctggttgcgtccgaggagaggctgcgccggaacgcggagttcctgctcaacgaggtcgggctgccgccgcagtacatcgtccgccgttcggtgcttctcatgtacagcctcgagaggcggatagtgccccggcacctcgtgctgatggttctcaaagagaaggggttggttgagcaggaccggtgcttcttcaacgtggttctcaacgaggctgcacttctgtttgtgaattgtgatggattgatgatgaacctgttaagttatttcctgtggtgtatgaacttgcatgtagttggcattttctaagtcaatttgtcatgtatttgtatgcacttctatgcaattttgtgtgaactgtgaaccactaaacctatttatcaattatcatgtctgtgcactgttcgggttggtgaagaaccgaatagaccgaaccgatttttt

SEQ ID NO: 5678 - DNA, 5118 bp, Zea Mays
tataatcggttgagtcgtcgcaataatagtaatccgtcactttatagatcctgagccccatggacaactttatcttcctccgcatgtaatcctaatgatactcagattctctacacagccagattctactcacagctagattctcggaaaagcgaatcagaaaaaagctgaaccaaacatgcccataacctattcagtactaatacaaatctttcagcgtcagcaaaaacaaaacatacctatcaccaaaatagtagcaaaatgtctttcaagaaatttcaccagccgtaggacgaccagtccagcagtgtggttctgattggtcccagtttggcatccactgagaccctgatacttcgaggctaaaagcctaccagcagcagtgcagctatgatccccctctagctatggccttcttctctcgcccgcgtgctacagtagattcgttccaaattatacttcacttcaattttgtcctaagttagagtagtagtttgatttaggacaaagctaaagtgagctataatttgaaacgtaggaagtaataagaataaaaaaacagcaagttccaacattaacgaaagtcagctagtcacctgattttgcacaataagacaaatggagaaatatgaaacacccacgtacagctttgcaggccacaaccttaatcttttaaggtttggcatgaacatacacttggtgcacaacgcaatacattatgcttaatcagtcagctggcataaaagtgcctccagaaattgacaataaccttcaggtgtgagctttgttccccacaacgactcggctagcatttgaattggtcattatacaaagttttcaaacctaaactactatgtcatacttgatcttcggatacgcacattaccaaacagaggtccgtcagaccatcatcacacaatctaaaccactgaacctaaacttgaccaatgcagcactttcttaaaaacataaatctggatgacattgatgtgatcttcatagatttaattgaatagggaatgaataaccaatagtaacaccgtttctgattggttcaagagtggtgggttcatgacatcaaccttctatctcattatgaaaccagtaggacgcagagtttggcatagatgtgcttccctactcccagtttgaagtcatgaaatggcaatgcactttagtacatggcatatactcatatagcaagtcaactagagatacacattgtatctaatctatccatcaaattccaaaccaagaggcaaataattggcacaaagaatctccaacaatagtatcaccgtgatatctttctgatgcagtgacaatgcacttccgtacatgactctagagatagaatagcacacgttgctgatataattttctagtatctcactgagttcctatgtgacgtccaattgattagcagtataggtgttcatctagatctattagcataggggccaaggtgcagggcggcactgttcaccgccgtcgagtcgggagttgtagcgccagcgtccagacgttctcctcctccctacaggttagggatctatggaggtgcgtcggtgtaatgggctccaccgacgacatggtagagcggttccgatcactagggcgctaggaggcgatcggggccttggatatgtggcggccagggttttgcagaggggaagcgttggcttctatgttggtgtcttgcctcattaatacagcgttcgtgactgagggccacatccagaggatagggttgtgcccccgatcagaccacgggttgttaggagggatagaatcgggctagtcttccttgatcgagccagagaacacacacctaatagttgtatctaagaggagcctatccatacgaaaccaggaggcaaacgattagcattaagcatgtacaacttgtgtcatgtgtgtgtctgtgtaatcacttgacagttaagtgcatgcatggatatattttgctgcaatctatacatcactacataaatgaatagctttaatagcgaggaactttaattgtgatccttaatttttttagtatcttgagggcactcccaatgcagacactatcatagtttttatgtgtattaattatcttaccaagcaagcagtttgcgaatgtggcagtagatttattgaggagaagggaaaaaacatttctacatcaagaaatggaagcttcacgtgcatctaagccagaggaaaaaatcgctatagcgttgtggagggtgccaccatttctaggcttgagattgggaaagaaaagaaggggcagtggcggcatgacaagagtcggcactgaataggagcatggaacagaaaagagaaggctaaatgaaatccaacgacccaaaaccattcagtttgatacaatcgcaccaatgtccaaataatgcatattagtagtcaaacggattcctttcaacaagttctacacagctatggtctttgatcgaccatacgattcaaaaggtaaaaaaatccttctctctttagtacaatcggtcaactcactaattatataaaaaataaaggtattacagtgtccttccgttaaatatgtagtggagcaggaaggagaattcaggtgcaacatgttctcacaggcacgacggtttatttagcaatggcaattcacattccccaatgggccttagatgccattgataagataagaaaatgttttctatggagaggtagaaaggaaccaaagggaggacattgtttggtggcctaggaaaaagtgtgtcgaccccttcaactaggaggcttgggaatctctagtctcccagagttttgttgggctctccgcatgagatggttgtggctacagaaaacatatttggggcggccttgggcagaccttcccatacaggtcccaaacaaagctagagctttttctctatggccctgatttctgaggttggggatggatcaaacactttgttctgggatgatagatggttgcatggcactagaatctctgacattgcccccagcctctacaactcaattccaagaagaattgctaagagaaggacggtgaaagaagcatttttaaataggagatggatttcagacattaaggggctcttacaataagagtcttggtagaatatctaaagctttggtaatccctctcagagattgagttatagcccaacccaacatataggatagacatgttttcagccttgctttagatgacaaatacacagcaaaagcagcatataaaagtatgttcttaggatctgctgcctttgatcactacaaaagaatctggagatcttgggccccctcaaagcgccgtttttttttcatttggctgatggcacacaacaaatgttggactctctgttcttaaggcgtcgcctaggcgtccgggcggtggtctaacgcctaggcgccttgcccgcctacctcgcctaggcgtccaggtggtgctccaacgccttggaccgtcttaccgctttaaaaaccatggttggactgctgatcgattggccaaaaggggtctgaatcacccacacaggtgtcctctttgtgaccaagaggatgaaaccctgaaccacctccttatttcctgcattttcacaagaattttctggtatatgattttaaggaaatttgggttacacgccctggctccacagcctggtctcacatccttcttggagtggtggaagagggctacagaggcagtgcagggaatggtcaagaaagggctggattctctcatcattttgggagccaggaagatttggaacctccgcaatagatgtgtgtttgatggagagaccccagcctttctcgaatcctgaaccaaactgatgatgagagaagcctttgggaactagcaggagccaagggcctctcctatttggctactcccttgccggtcgcccgaagactcttcctcatagatttgtttctttatgcttgtttctggtctccgtaaggagcatttttgtatttgtatttcggtcttctacggaccttttcctcttcttaatataatgaggcacagttcctctgcgctttcgagaaaaaaaattaagaaattaagatttattgggacttcctcacagtataaccatgtggagttggactgagttgaatatgaaccagaaagactgactggtacccaaataaattgttagtgaattgaggctagcatatatgccacatagttactttaccacagctgattcctctctatttgtggcgcatgcaagtgcttattaaatttgttcttatggaattcggatggttgggtctaaattgcactctctccttaagaaactacctatagatactatgtattgggactgccctgagaggttctagacatctaggtcgagacaaaaatgtcaaacttcctagataaattaatttgcaactgtttggagtacaatgaagaaaaggcgcagaaatactgcccggctataataataaccacactaaattacaaagacgagaaaaatatgcaaatacaaactaccccatagctcgttgattttgtctttatcttcaaaagagagaaaaggcaatactttttgttgcaattcactgtccacgaccatactagagtgtcggacgcgattaaccagacaccctgcaatttgttagaacccaaagtaatctaccgaaggggagaaaaaccgatttcgatgggcaagttaaacggaaatctagtagaaaggcacgaacttaatcacccaatccacagcaagcaagaggggaagggagaactaacttgtgcctcgagagcagctcatggagcgtctctttcttccgctgaggcgcctgggcggcagccgtctcgccggcggcggattcgacagctagggtttccaccaccaccaagagaatatttagggtttacgcacaccctaagttggctccttaataaaatgcccatctgacatcaccagtttttctctctgccgggcattttagaggagtcaacgttggggtgtgcataaacacaaatattctcctccaggccggactcgcttggatccggttccgcgcggggggagggaggagggagaggagcggaggcggagcagcgcccgggactggagcgtgggggtaggtggtgcggactgg

SEQ ID NO: 5679 - DNA, 1064 bp, Zea Mays
cctccacctccgggcgccccggccgccacgaccctgagcctgatgcctggcgcggacgtcggcgccgacgagcagcaggagccggccgccgcgagggccgaggagatgcccgagcctgcccccgcccccgccgcgccgccgccgctcaccatcttctacggcggcacggtggtggtgttcgaggacttcccggcggagaagacggccgaggtcatgcgcctcgcggccggcgacgacctgcccatcgcccggaaggcgtcgctgccgtggttcctggccaagcgcaaggaccgcctcgtcgagcgcgcgccctacgcccgcccgtcgtcccccgcgaaggagccggagaagaagacgtttactttttgtttgagaattcacatgacagggatggcctatgaccctttaagaactcatctagagcgaagagcagctgagcagttggatatattcaaggaaatggtatctttgcgtgtatttgagaggtacatgataagtgtaatggtttcacgttgtctgcagattttgtttggatattcactagatgagtaatttcaccatggtttaattctaacagttgctcttattacatccaagaccgccatgttctactgtaatattgtcttgtgtcctatcaaagcaaagaaatgtgttgacatgctttggttgttctgttgaaataatattcccagtatcatatatcccccttctatttcttctgagcaaaatgcttaccagtttgaacttagtttggtgctgatgttcttgtgatgactggactactcatccgttttttagttaattctgctttttgcaggatttttagtgaactcctatactgtgagcactggactacacattatgtttttttgcaggattacaagttcattctgtttttcaggtaagcagccaattaaggacaaaaattccaaaaaaagtattctctcttcattcttggagtaaaaactgagaaccaggtggtttgctctcatgaaccaaaactggttaactactaatattcatgtgccgatacaaatattctctgattgcaccacaaatgttgg

SEQ ID NO: 5680 - DNA, 1196 bp, Zea Mays
gccgtatggtgcgaccggatgatgatattgtgatgtgccacgctcgctttcgtcgagtggaagatgacgacgcgcccgcggtggcggtgtgtggatgcgcagactcccggcatatcaaaatccgcactccccattggccggcctcatatccccttatccgcttcgccacccgcggtctcgcccaccacccgctccggccggctcttgcgctagctgcatgctcgcgccgccctcctctccatcatccagtgctctctcctcttgcgattcgctcgctcgatcctagcttcccttcccagaagcgcagcgcccatggccatggccatggggcaccgccagtcgggcagctgcgcaaaggtgaggcccggcggcatcggcatcggcattggcatgggcatggtgtccaagcagcaccaaagaacaccgccgccgtcctcttactgtctacacctccaccacatcctctaccttagacctgtcgccagcagccaccacttgacgcgccactccgtcgacgtcaccaaagacgacaagccgcttgagccgctgccgccggcggctgcagagacagagagcacgcagcagcaggaggacgaggatggcgggccaaagctggacccgaggcggttcgaggagaagttcgcggtgctgaacacgggggtccacgagtgccagtcctgcgggtaccgctacgaccaggcggcgggggacccgtcgtacccagtgccgccgggcctccccttcgcgcagctgcccgatgactggcggtgccccacctgcggcgccgcgcagtccttcttcgagagcaagagcgtggagatcgccgggttcgcgcagaaccagcagttcgggctgggcggcaactccctcacctccggccagaagggcctgctcatctacgaatacttcgtccgtgcatgtactcctccccactcccagggaacaacattcatcatcaatcgagtagaaactcttggttttagattttttttgatttgatgcggtgatcgttaagttcacaggaacaccgagcgcatatcccctccatggttgtaatatgtgggcaacaaaactacaaactacacacaaagcatgtcataggcagagtggtagaggagggtacgcgtggtgcacacatatcttatccacccatggcctggcctccatctgtgttcctgatgcccgtggccatcacc

SEQ ID NO: 5681 - DNA, 1124 bp, Zea Mays
ttgtgatgtgccacgctcgctttcgtcgagtggaagatgacgacgcgcccgcggtggcggtgtgtggatgcgcagactcccggcatatcaaaatccgcactccccattggccggcctcatatccccttatccgcttcgccacccgcggtctcgcccaccacccgctccggccggctcttgcgctagctgcatgctcgcgccgccctcctctccatcatccagtgctctctcctcttgcgattcgctcgctcgatcctagcttcccttcccagaagcgcagcgcccatggccatggccatggggcaccgccagtcgggcagctgcgcaaaggtgaggcccggcggcatcggcatcggcattggcatgggcatggtgtccaagcagcaccaaagaacaccgccgccgtcctcttactgtctacacctccaccacatcctctaccttagacctgtcgccagcagccaccacttgacgcgccactccgtcgacgtcaccaaagacgacaagccgcttgagccgctgccgccggcggctgcagagacagagagcacgcagcagcaggaggacgaggatggcgggccaaagctggacccgaggcggttcgaggagaagttcgcggtgctgaacacgggggtccacgagtgccagtcctgcgggtaccgctacgaccaggcggcgggggacccgtcgtacccagtgccgccgggcctccccttcgcgcagctgcccgatgactggcggtgccccacctgcggcgccgcgcagtccttcttcgagagcaagagcgtggagatcgccgggttcgcgcagaaccagcagttcgggctgggcggcaactccctcacctccggccagaagggcctgctcatctacgaatacttcgtccgtgcatgtactcctccccactcccagggaacaacattcatcatcaatcgactataaactcttggttttagatttttttgatttgatgcggtgatcgttaagttcacaggaacaccgagcgcatatcccctccatgattgtaatatgtgggcaacaaaactacaaactagacacaaagcatgtcataggcagagtggtagaggagagtacgcgtggtgcacacatatcttatccaccca

SEQ ID NO: 5682 - DNA, 896 bp, Zea Mays
ttgtgatgtgccacgctcgctttcgtcgagtggaagatgacgacgcgcccgcggtggcggtgtgtggatgcgcagactcccggcatatcaaaatccgcactccccattggccggcctcatatccccttatccgcttcgccacccgcggtctcgcccaccacccgctccggccggctcttgcgctagctgcatgctcgcgccgccctcctctccatcatccagtgctctctcctcttgcgattcgctcgctcgatcctagcttcccttcccagaagcgcagcgcccatggccatggccatggggcaccgccagtcgggcagctgcgcaaaggtgaggcccggcggcatcggcatcggcattggcatgggcatggtgtccaagcagcaccaaagaacaccgccgccgtcctcttactgtctacacctccaccacatcctctaccttagacctgtcgccagcagccaccacttgacgcgccactccgtcgacgtcaccaaagacgacaagccgcttgagccgctgccgccggcggctgcagagacagagagcacgcagcagcaggaggacgaggatggcgggccaaagctggacccgaggcggttcgaggagaagttcgcggtgctgaacacgggggtccacgagtgccagtcctgcgggtaccgctacgaccaggcggcgggggacccgtcgtacccagtgccgccgggcctccccttcgcgcagctgcccgatgactggcggtgccccacctgcggcgccgcgcagtccttcttcgagagcaagagcgtggagatcgccgggttcgcgcagaaccagcagttcgggctgggcggcaactccctcacctccggccagaagggcctgctcatctacgaatacttcgtccgtgcatgtac

SEQ ID NO: 5683 - DNA, 1101 bp, Zea Mays
atgacgacgcgcccgcggtggcggtgtgtggatgcgcagactcccggcatatcaaaatccgcactccccattggccggcctcatatccccttatccgcttcgccacccgcggtctcgcccaccacccgctccggccggctcttagctgcatgctcgcgccgccctcctctccatcatccagtgctctctcctcttgcgattcgctcgctcgatcctagcttcccttccaagaagcgcagcgcccatggccatggccacgcaagcctccgccgccacgcgccacctgctggccgccgcctgggcgccggcggcgaagccgcggcagctgagctcgcagctcgcgctgccgtcgtcgtcctcccgcgggccggccccgctccgcgcgtccaccgaggaggcggtggaggcgcccaaggggttcgtggccccgcagctggaccccagcacgccgtccccgatcttcggcggcagcacgggcgggctgctccgcaaggcgcaggtgttcgagatgcccaccggcggcgccgccatcatgcgggagggccccaacctcttgaagctggcgcgcaaggagcagtgcctggcgctcggcaccaggttgcgctccaagtacaagatcacctaccagttctaccgcgtcttccccaacggcgaggtgcagtacctccaccccaaggacggcgtctacccggagaaggtcaaccccggcagggagggcgtcggccagaacttccgcagcatcggcaagaacgtcaaccccatcgacgtcaagttcaccggcaaggccaccttcgactaatcacacttcacgtacgccgcacgccccagccgggatccaaattaaagaacttcttcttctattaattacagtatattgtaatttggctgctggtacggtggtggcatgatttgagatgtgcatgatgatccttgtgtaattttattaccaagtctcttcttatatttacatgttcatttgcttgcttcttgcataacataacgcctatcgacaatgaccatcattagttttagtcctacgtgtatttgattcaatctctccgtgtttatagtataaattcaaccaaactaaagaagtttgag

SEQ ID NO: 5684 - DNA, 2129 bp, Zea Mays
gtgatttgtaaatatcgaaacgaagggggggtctccagtgaacattcctcgtccgtttttgttaaagccttaataaaggcaggtgcagctcccggggaagaagccaagggggaagcgaaaccgaaagagaggcagagcttggcaatggagctcccgtggggaatgctgctgccgctgctgctggtcctctccgtctcgtccccgtcctcgtcgtcggctgctgccacgctcgccgtcaccgctccgcccccactgcctgttcctcctcctcgtcatgctcaagacgccgaaggtaacactgctggctgctgtgcttgcctctcattgatttcaccatcaccgcgctgttttttttctgtgccaatcttccatccactatcccattcctggtgctcggggtcatttcgtctggattctttttagatctgcatgctgttctgtcaagcgcagcgcagtgcgtttagagtagtagtccatgcttgatcgatctccgtggaggaaaacgaagaaacagcggcctcatttttattacccctacagatgtctgtcatccgtgcaggacagtgaatctggtctagtgctattcttttcatcactctgttacttttcaccgtccataatcagttcacatttgcggtttcctgtccaagaacgctgttgattatcttgttccagcaatgtcccgtcaaatgcgctgtaatagaatagtatacgcgtcggacagacatcaaaagctcagatttttgctgacgcacccgtggtggtggcacacgcgcaggcatgctcatcaacggcaacttcgagacggcgccgcggaggctgaacaagaccctcatcgtggggcgccactcgctgccggggtggacggtgcaggggcacgtggagtacgtctcgggcggtccccagcccgggggcatgttcttcgcggtgccgcacggcgtgcacgcgctgcgcctcggcagccgcgcgtcggcgtcgcagaacgtgacggtgcggccgggggcgctgtacgcgctcacgttcgcggcgacgcggacgtgcgcgcaggacgaggccctgcgcgtggcggtggcgccgtcgctctcggcgcccgccgacgtcgccgtgcgcacgctctacagcggcgcgtccgccgacacctgggcctggggcttccgcgcctcctcccccgtcgcgcaggtcacgttcgccaaccccggcgtgcaggaggaccccgcgtgcggcccgctgctggacgccgtcgccatcaaggagctgcccgcgccgtacccgaccaaagacaacctgatcaagaacgacggcttcgagatcggtccccaggtgctcaggaactcgacggtcggcgtgctgctgccccccaagcagaaggacgcgacgtcgccgctgcccggctggatcatcgagtcgctcaaggcggtgcggttcatcgacgcggctcacttctctgtccccgcggggcagtatgcggtggagctggtggccgggcgggagagcgccatcgcgcaggtcatccgcaccgttcccaaccgcgcctacaacctgtcgttcgccgtcggcgacgcccggaacggctgccacggctccatgctggtggaggcgttcgcgggcaacgtcacgcagaaggtgccgttcgattccgccgggaaaggcgggttcaagacggcggcgttcaggttcgtggccggcggcgtccgcacccgcctcaccttctacagctcctactaccacaccaaggtcaccgacggcgtctcgctctgcggccccgtgctggaccaggtcaaggttgtgcctgtcaaggcgtagtgaaatgaatcgtgagagcgccgagtgacggtctgctctgctcgtcgtctgtagctgtgctcgtcgtgatttggcgtggtgggttgtgaaagtgtggtcgaattctggacccttcggaatctgatcgtggtgtgctgtgcggtgcgatgtgctgtagcgaaatttggttgctatctcttgttcactccacgtttggaatttgcgttttcaatccggtattgaaggtataataattaactgctagtacggtgactgaaacctaactagtctttaagatgttaaaatttatacgaaacatatatacaaaatgataaataatatgtaac

SEQ ID NO: 5685 - DNA, 1995 bp, Zea Mays
tttctttttatctgtcgattctgctaacatgcagcagtactaccggcttgttcgccgccggcgaccggaggaggaatgctcgccgccgcccggcgtgctcggtctgggcactcaggctggggcggagcagcagcgggagtaagaaggcaggcctcggcatcgtccgcaacctcgacggatagtacgaggacacctttaacgacgtccagcgggtacccgtgcctcaaacctcatactaaactaggagtctcttgcacttaactttcatcacttttcattacttgtgatgagcttccctccttctgtctgtggctgcaacaactgatgaaccacttaacctaataaatcttattaggttgtaatttgtatgaaagctactaggcccccgcgtcgcccctttggcgacttgggcggctgcaagcctagccgccgccaactcccctccctccccatctctttgccttgccgccgccggagctagctggtgggttgcccgcgcggctagcaatgaaggcggtggtggggtgcttgctgccctgctcacgcgtccaacccgtggcagcgctgtccgtccactcaggcagctagccttcggctgggtgcgcgcccgcgtggatggcccggtggcggcatctgcccatccctgatgctcggggggttggaggtgtgccttgactgcgtgctcgcgcaactgatgcggggagggctagatctggcgcccctagggctgggagcagtgtcggcccgtggagggatggatctggcgcgcgcgaggttggcggtctccgtgtgccagccgtcggaggcgctgggaggctggtcccgggccagcgcatgagcgggggtggagttcggcgttggtgcgccggcaggcctgcgcagtcggtcggaatggcggtggctggacctcctctcatctgcggctgcgtcggctagtgactcgggctagcgcagggtggtggtggcgacaggccccaaaatcttcatcattgtgcgagacgacggggcagtggcgacgacggaggcaacttgttgtgtctcgaggtttctgccagatgctgtgctgggagctcttgggcgaaagtctcggcgacggtgacgctcatgggtgccgcttcacctgttgagggcgtcgcatccccaacgttatcttccttgggtgaaagctcggtcgatcgcggataggcgacagtggcgtcacggtgacgtcactcccttcctgaagacgtcgcttctgaatttcgtcttggccatgactttgccttcggctattgctttgcttctcagcaacgtgaagtcggagatgctatttcaggggatgtggctcgtcaacgataacatgaggcgaacctcccttcttcgtggtccacaatatttcgaaggtcgggcaaaaacgagaggcggggcggagggtcaagattgaaagtcggagctgctctgtgccttgagcccggcaacgatgacctgttgagacctttcgtttcgagctatttatctgtttttcgtttggttcgcctatcatctgctttgggaagtcggagttgctggaagctctgcatctttgcttgacagcgatgacctttagcagttttgtgtgctctcgtgtgggttgtcgctgcctgtgttgtttgggcgctctgtgtcggcggtgattgtggtgccgtattgatgttccaatccaaccgacgagttgggttgtatgatgtcagcgtgttgatgtcccaatccaaccgcctattatctgttgtttagtccgatccggaccacttcttctttactaatataatcggtagctctcttgtttggttcgtttcaaaaaaattgtatgaataacaaaaagcttcggtagaggtctggcggtctctacattttccatttggaaaaaaaatccaaattactccaccgtacaatgttcacataatctactaaagtattttattagtttattttatctctaaacgagttggttcaatttacaacctaataagatttatc

SEQ ID NO: 5686 - DNA, 6627 bp, Zea Mays
agcaacggtaggagggtcaccatgtacacaagcttcatcagcttcccgctggatgcgatttgtagagctaatcacgctgcagtgcaggtggttagttgcaggcttgcagcccgggctgaacactcaagctagcgaacaagatcagaacagaatcgatggatatagtgcagctctttttgcaaggcttgctcaggttggtgctggtgctggttgctggattggatggtgacctggtggtgagtgagtaagctgcatgcccacggccgtttatataggcgcgctgaagagagttgcatgcgttgcttgtgaagaagaacaacgcgggagagtttggttggcagcagatatgtgcagtagagtgtgcatgcttgcagacacgccatgacccatacgtgcagacatagatggatccggccctcagattcttcagccatgatcgcaaggagataaatgtgcccgaactgattaactgctgaatcgagtccacctgcaggtttttcatgacgaaaattctcaaacatgtttcctttctcgttgcaattggcatgggaagcaaatccatgtccatctgattctgtggagtggactccatgaagattggagcatgagagcccccacggcagtgacaacaaaattcagttaggcatccgtggaaccgatataattgccccgtagcaacatatatctacgtgtcgatgatgatgcaatccggtacttggtacatatacgcctgattggatgaccgtacccacgcgtataatctcgcgtgagcctggccaaccacgtacgactgttttaggcgtacgtgtggatgcaaccaatataacttattttatgtctgtctatacagcctgcacttcacacgtgcaggcaaccaaacacaaactcagataaagtcaacgcacgtggtgacgcgggacgagacggtacagctaaccaatcacatattacctcggttttcgaatatttgtcaccaactagtttatttttgaactaaaatgagacaaataaaaaagaacggagggagtatatgtttatttgctatagccaacctgaacgtcactgtatgatacttagagaacaggtaatactaacggagtaatgatgttcacattctaaaataaaatcacatgtacaagagagtcatcatgtatgtaaaatgatcctaaacatagttcatgcatttccttgctattgatgcatttaaacttttttgatataataaaaggagttaaatgttaagtatgtcacttagatccacaaactttgaaaatgcatttctggatcccttaaacatgctaagaacttgtaaaaatggtaaatgataagttcatctttggatcataccgaccactgcggtatgccacttaataaatttaaggacccataaatgtatttccaaagttcgtatacctaaatgacatctcttgacaagtacatgggctacaatgcatttaactctaataaaaatgtgacaagaaaaaaggcaaaagatctttgttcattatcctgggcatcaaatacacttgggcgaagtttctaggatttttacaaaaaaatctactggttttagaacattataatactactaactggaggtcttcatcagaggctccattctctttcccgagataatctttgttcgtcttgtatctattagcactataatttagacatctctgtaagccttcataatcctcacctcaatataggatacaatagttcctacacacgtggatcttttcgatacccataatcaacgaactcgctagcttctttgtacattacatgttagcatacactttgttctcctctagaaggagttttgctagaactaataacactcgttgaagctaacatcagactaactgaattgaccttaaagtatcaacaactaaataacagatcacaatattgtgatttttgggtacaacccttagactcttcgtaaaaatgttatgttgcggtctcctctaaagcctccatactttcataaataatgttgatgactcagaataataatgcaattttgctacgaaaaaagttcacttgttttcttttaccaacctaaacttcgacgtcgtcttgacccacgtctttgtgcccaaagaaatcattagtaacacctggcataacgtgatcagtcttggtagtggtgttgtgtctcacataccattttcccctcaatacccatatttgatccctctacatgcatattacatccctcgataggcatatttggtccctcaacattggtgtatgttgggttcccaattgcataaggcgcaaaactgtggcggaaccgcccgaattattccagcttaagtgcccaagtcgcacccttaagggcagcaacacacttaaacaggaataatctgtcagtccctcggatctagtccgataaagccacttaccaggatcgaataccactagctcacacgaaggtgaggcacagagaaatacaataaaacataataccacaaatttaataagtatcattagtgattacattatcagagtttcaaaaataataaccataaattttaatgcagcggaaataactaacggagaagaaccgagtaacatggcgaagtctggccacactactcctcctggtcctctcctgcggaagcaataacccactcgaccgtctatcccggtggcagggatggaggccaagtcacaccagcaaccaatcaccctaagggaacctgcaaaaattatgccacaagcaaggctgagtatactaatactcagctagacttacccggtgtgaggagtctactcctctacctctagacatgcagctgtttggctgaggggtttggtttgccaaaagcactagctgagtctaaaatcaagttttagcttttcaagttttagtagaatcctttatactagatgtgtacctagctattcatacatggtatcaaacattttatcaatcaacatcttttgccagtcacctcatttccacttattactcaatgcagtacaatggatcaagcagtctcattagctgcgagaagcagacgattcgaatcgagtttttatccttgcaaggtaaacctaaacacacgacgtggcaaggcactccgtccccacacacatcaaccgtccccgtcgattccctggcaacagatcagggctcaccgccttggcgtacaatgcctcactgaccccgactgccgtcgtgcagtgaccgcacttgtacccaccataaccggaatgggagaccacgtctcaggtcgcgtgaggggatatgtctgcgggcaggttcactcaggtactaggcttaccgatttaccatatttctcggtatgtgtttagtacgttcaaacgcttgacacaggtatccgcacgttaatccttattccaattttcatctcgtagaccacgcgtccccatggactcgtgtccacagaccatcaccattctgttatcaaagtggatacaaccaattcatgacctcgcgcgagtgctagaaaaatcactcgacttctaccaagatccctaattagtaaagcagctactcgacctagcatactagtatccatctcaaaagggaacctgagttcatgcaactagggtttcagtcaactcctacacttaagtgcacagtacaagcctacaaacattaagtgtagtaaaataacatacaataacggttatgcataaaaccggggcttgcctttaatttaacacttaggtagtgtttgctgggggggtactcgcttggcgagcatcaactgggtaagtccatcagtcttcaggtcgtccaccaactgcatcttgtggttggcaccacatcactggctcgatcatcatctctcggtcctatatgaggtgcaagatgcatatgtatgaatataatgaaaagttatcacaagatatacaatacacggtagtgaactaaatatttaattgtaagacaccgcaaacaaccacatgttagatttagttatctacacgtcatcgggcatacgtagttactaccattagaaagacgaccgataccttctagacttaaccagcgcaatacgacatcacacgtgcaagcatttatcacattcactttaatcattcattggttacttaacattaggttagttaagtacttaagtttcctatgactgatatgtagacagatttagttgaaaaggaactagacacttaattgggctttacaattatttattaggcgaacacgtattagaccttaaccaatttagttccctaatttagcgaggcgtgtactagttacctacatacttatgctcacttatattagttatattatcgttactgcgtgttcaaccaaaatcaaaacgaggaaacggtgacatacgccacagagtagagcaatccacaaaatacaacaaaattaagacagcagcacagcagtggcttgttttaaccataactctttaaatattaatccaaaactagcaaactaagattttctggaaatcttagaaggtgctctacaactttggtattgtcatcaccgcacgattaaacacttagcaaggtcaaaagtgcaatcacagcagctctgtcccgatttggacagattcagacctgtgactttaaaaatccataactgaagattcagacatccaaacaaagtgatcttagactttctggaaagctaattaaatgttctacaaattatttataaacatctcaaggtgattcaatatttaattaaggataaaagacactagaaggcttgctgtcccaaattggacagattcagtcttcagactgtaaacgttcataacttattctttagaccaccaaaaatagtgatccaagactttttggaaatctcagcaaaagcactacataacttttataatcactaagaagtgattcaatgtttaattaaatcaaacaacatagttttcgaaatctgttctgacggtggacagaacacaacaactagtttgcaaatttcataactcctaaaccgtcaggcctttagttatgaaattttaacacaaccaagatcggaaaagcatctacaactttcttataacgatcataaacagattgcaacattaaattgagcaaacaatgcagtttctgaaatctgtacagaaattggacagattcagttactgaatttgtaaaaagcataactccttaactgtcagacctatggctgtcaaattttaacaccagcaagataataaagttatttaccacttttctatagcacatatctacagaaaacacaatttggttcatcaaatatacagcacaactaaaacagtgcatgcagtccaaaacagcaatcaataaattccttgatctagagacttgaattattctaacactttatcatttgttagagttaacataatcaaaggagaactaacaagtagacttactaaatttctatccgtatcattttgtacgctagaatcaccacacacaattaacaaacacatccaccacaataatcggacccggtacatatacatgtatcgatgcgcccttcacacactaatttgcattttagcttagacatcatatgaacactactgtttttttacccgcggtcataaccatgcgcaattgggctacaacacgcaattcatcgtgaccatgaacttaaagtcatctaataagttgattaacctgagcaacaacctaggccgctatacaacatactcgtcggctagcctattattatcgaaatctgagacacaacatatgccacaacatttatataaacgtacatattcacatgtattttcacacatccactaaatcatatgacccgtaaaccactattctctaactcgaaaccatcatgtgcttacttcccaattcatgaacacataacgcgtattgaccctactcaagatatagaggaagcgatgactactttgacatgtcaccacctctctatataagccaaaacaatttctactatcgactaagagttctaagtattaatcacattattactttacacgcgcaaataaacctcaacttaacaccagtgacaccgatgaatttttactaaactcatcatgcgcataaccatttaatctctaattggtactaaggtatatttcaacattccaagagacatgcaagcttttgtttacttctaattttcactaactcttctttataattataaaatgggtgttattttagcaccatacgaaagtacctaatttggggctggaatttttatgaggcaaaggtaataacaatttatgactaatgtataaatttcacatgcccaggttttatattttatttaatacaaaaataataaattgtcaatgcaataaagcatgtgagagcaagttaaatctaaaactaattattttctgtagatgcattaccatattgagttttcttaggctactataataccatgcaaggacagtagaacaccattttacatttttgcatctatacattatttttaaatcatttaaaactacttaaggtgcattaaacaagttaaatcactaacttaatcatacatgcacaacaattcatgaaatttttaccagtcaccaaacatcacaccaagagtctactgtaaaactttcaacctatttggagcaccagagctacagatccaaaaataacaatcac

SEQ ID NO: 5687 - DNA, 3823 bp, Zea Mays
  misc_feature (3822)..(3823): n is a, c, g, or t
ctctctcacccacccactctcctactgcgcgttgacgaacgctgtcgctggctagctgcaggcggagttcgctttcgtcttccagtcaaaaaggactgactggcctgcacgtcttctccagttcagagtttggacactgcttggacttggagtggcatttcaagccagctaagggtccagatccaccatccatggctgtgcttccaacgcccaggagaatcaacaacttggcccttgcaagcacggtgcttccaaaacgtgtgccgctccatttattacagaaaataacaaatgatttctctaaggaccgtgaacttggttccggtgcatacggaaaagtttacaagggagtgcataaaaatggcgaaacgatggctgtcaagttgcttcactccatggctggacttgatgataaactttttgaggaggagtttcacaacattgcaagactccaacacaagaatattgtgcgtcttgttggcttttgccatgaaactcaacgccaattcataccgcacgatggaaaaatgatttttgctgatagcaaatatatggccctttgcttcgaatatatgcataatggaagccttgacaagttcattattgatgaaaatagtgtccatgactggtccacacgctatgcaataatcaaggggatctgtgagggcttgaaataccttcacgaggaattgaatcctcctatttatcatttggatttaaaaccagctaatattttgttggatgacaatatgatgccaaagcttgcagattttggcttgtcaaagatttttgaacaggaacgaacacgaatcacacaaagttgtgtaggaacacatggatatctaccaccagaatatatagacaggaaagtaatctcaaataagcttgacatattcagtctgggtgtcatcatcataaagattataagtggacctacaggttacacccagtgtgctgaaatgccttccaaacaatttgttgagcttgtacatgaaaaatggaggaataagttacaaacaacaatggatgcagctgcattggagacatattgtgaacaagtagtgagatgcattgaaatggctttaagttgtgtggagaccgatcggcacaaaaggccgagtataggggctattattgatgagctaaataagatggagacaaataccgaccaggtattttcagtggatatatgctcgactccagcacaaacacaaccaccaccccttcctgattctagccacagcacagaagaaacaagcaacacaaagggagttagcagactgggaccgagagagtacgtacagagcacaatgcgggacctggtaattgggataaccaagtcggtggtggagggggtgatcagcaaggcccagtcggtgatggaggaagaaaatatgctacttattagcatgcagcatgacctccacttcatcaccgatgagtttcagatgatctattcattccttagcatcactgatgaggagcgtatcaacaacgcggtagtgaggatctgggtgatgcagacgcgtggtctggcctatgacctggaagactacatggatgccttctcctgcctggacaagaccagaaaatggtggtcccgcttgttccgagcatgcctggcaccaccggggtctccatacatgtcagtgacatctctggccgtggaactcaagcatctaaaggcaagggtcgaggacgttagccacaggaacactcggtataacctcatcagcgacgccggctcaaagcccggcctcgtgaggcaacagccggtgcctcctggtgctgtggcatacgaaaacgacacaagaaggaaacacatcttaggggatctcacccagcttatcaccaacaaggacgatgctgatcttcaattgatttcaatgtggggtgcaggtggaggcaccgggacgacatccatcataaggaagtgctacagtgatccagagatcatccaaaatttcatatgccgagcctgggtcaacctcagccatccattcaacccccatgagtttgtgcggtctttgatggctcacttttatgcaaacagttgccaagaaagacaaggagggatcatcggtgttgatgtcctaactagcatggatgcgactgccacccagggggatctcctcagcgagttcgttcagctagttgacaagaacaggtaccttgttgtcttggaagacctgcccaccatggcagagtgggactctatcaggacgttccttcccgacagaaagaatggcagctggatcatcgtgtcctcgcagaaatatgaaattgcaagtttatgtgtcggacatccctaccaaatattggacctgaagcagtcctcgcccactgagcactccgtatgtgccttcttgagagaggaggtcacattaaaagaaaaaaaaggaggcaatagaaaagaaaaaatttatgtcggagatgaaagcgaggtgaacaacggtagtacatcaaccaacagcaaggtgatatcaactgagtatgacttaagccataaccataggatggtcgccaactctaaatggaaagaagccagagactggatgcagaattcttcccttgtcggacgcagattgcagatgtatcaaattcatcgctgtatagctgaagcacaaaggaaccattcccatgttatgtctgtttggggaatagttggcgttgggaaatcagctattgtcagaaatttttactgcgacaggatacttgagaatcagcaatttcaagaatacggttgggtggatttatcacactcccaacccttcaatttgaaggacttctcacagaacttgcttacgaattttcaatcagattctcttcaagccaatgaaactacaccctctcgtggtatactggggacagtccgaaaatgttgtgagtttctaagtacacgtcattgcctcgtggtcatagatggccttcagtccaaagaggaatgggatttgatacaatcatcattggtatctagatactctaaatctaatactattatcattgtgataacaactgaagcaagcattgcagcatactgcgcagataaggatgaccttgtgtttaatgtcaaaactttagaaactgatgcagcctttgatctcttcgaaaatgagatatctaagaaggctccgttgtggaccacttcattatgtgatcgaggaaattcagtgacgcaagaacttgtttcaaagtgcggggggctcccaatggtaatagtggctatagctggcatattggctaccaaggtagtctcctggatggacactgcaacatccatcaatttgaggtttatgtttgagctagagatcaatccagacctgcaggatctgtttagctgggtgcattcctgcttccgtacttgtccagatttcatcaagccatgtatcttctacctatcattttttccaagagaccacaacattcgacgaaggcgtctagtaaggcgttggatcgctgagggttactgcagggacagtgatgataaatctgcagaggagaatggggagttcttcttctccaaactcctcggtatgagcataatccaaccggagtccagtgacgcgaggatggtctcgtgtcaaatcaatggatttttccgtgagtgcatcctctcacggtcaggggaaatggaagaccttgtcattgaactggccgacagatgcaacctaaccacccaacgcagtgggcgtcatcttgtcatatcggaaagctgggacagagataagattttattcgagagcatcgacttctcacggctacggtcaatgacagtgtttggaatgtggaaatcattcttcatctccaaaagtatgaagcttnn

SEQ ID NO: 5688 - DNA, 3735 bp, Zea Mays
  misc_feature (3734)..(3735): n is a, c, g, or t
ccactctcctactgcgcgttgacgaacgctgtcgctggctagctgcaggcggagttcgctttcgtcttccagtcaaaaaggactgactggcctgcacgtcttctccagagtttggacactgcttggacttggagtggcatttcaagccagctaagggtccagatccaccatccatggctgtgcttccaacgcccaggagaatcaacaacttggcccttgcaagcacggtgcttccaaaacgtgtgccgctccatttattacagaaaataacaaatgatttctctaaggaccgtgaacttggttccggtgcatacggaaaagtttacaagggagtgcataaaaatggcgaaacgatggctgtcaagttgcttcactccatggctggacttgatgataaactttttgaggaggagtttcacaacattgcaagactccaacacaagaatattgtgcgtcttgttggcttttgccatgaaactcaacgccaattcataccgcacgatggaaaaatgatttttgctgatagcaaatatatggccctttgcttcgaatatatgcataatggaagccttgacaagttcattattgatgaaaatagtgtccatgactggtccacacgctatgcaataatcaaggggatctgtgagggcttgaaataccttcacgaggaattgaatcctcctatttatcatttggatttaaaaccagctaatattttgttggatgacaatatgatgccaaagcttgcagattttggcttgtcaaagatttttgaacaggaacgaacacgaatcacacaaagttgtgtaggaacacatggatatctaccaccagaatatatagacaggaaagtaatctcaaataagcttgacatattcagtctgggtgtcatcatcataaagattataagtggacctacaggttacacccagtgtgctgaaatgccttccaaacaatttgttgagcttgtacatgaaaaatggaggaataagttacaaacaacaatggatgcagctgcattggagacatattgtgaacaagtagtgagatgcattgaaatggctttaagttgtgtggagaccgatcggcacaaaaggccgagtataggggctattattgatgagctaaataagatggagacaaataccgaccaggtattttcagtggatatatgctcgactccagcacaaacacaaccaccaccccttcctgattctagccacagcacagaagaaacaagcaacacaaagggagttagcagactgggaccgagagagtacgtacagagcacaatgcgggacctggtaattgggataaccaagtcggtggtggagggggtgatcagcaaggcccagtcggtgatggaggaagaaaatatgctacttattagcatgcagcatgacctccacttcatcaccgatgagtttcagatgatctattcattccttagcatcactgatgaggagcgtatcaacaacgcggtagtgaggatctgggtgatgcagacgcgtggtctggcctatgacctggaagactacatggatgccttctcctgcctggacaagaccagaaaatggtggtcccgcttgttccgagcatgcctggcaccaccggggtctccatacatgtcagtgacatctctggccgtggaactcaagcatctaaaggcaagggtcgaggacgttagccacaggaacactcggtataacctcatcagcgacgccggctcaaagcccggcctcgtgaggcaacagccggtgcctcctggtgctgtggcatacgaaaacgacacaagaaggaaacacatcttaggggatctcacccagcttatcaccaacaaggacgatgctgatcttcaattgatttcaatgtggggtgcaggtggaggcaccgggacgacatccatcataaggaagtgctacagtgatccagagatcatccaaaatttcatatgccgagcctgggtcaacctcagccatccattcaacccccatgagtttgtgcggtctttgatggctcacttttatgcaaacagttgccaagaaagacaaggagggatcatcggtgttgatgtcctaactagcatggatgcgactgccacccagggggatctcctcagcgagttcgttcagctagttgacaagaacaggtaccttgttgtcttggaagacctgcccaccatggcagagtgggactctatcaggacgttccttcccgacagaaagaatggcagctggatcatcgtgtcctcgcagaaatatgaaattgcaagtttatgtgtcggacatccctaccaaatattggacctgaagcagtcctcgcccactgagcactccgtatgtgccttcttgagagaggaggtcacattaaaagaaaaaaaaggaggcaatagaaaagaaaaaatttatgtcggagatgaaagcgaggtgaacaacggtagtacatcaaccaacagcaaggtgatatcaactgagtatgacttaagccataaccataggatggtcgccaactctaaatggaaagaagccagagactggatgcagaattcttcccttgtcggacgcagattgcagatgtatcaaattcatcgctgtatagctgaagcacaaaggaaccattcccatgttatgtctgtttggggaatagttggcgttgggaaatcagctattgtcagaaatttttactgcgacaggatacttgagaatcagcaatttcaagaatacggttgggtggatttatcacactcccaacccttcaatttgaaggacttctcacagaacttgcttacgaattttcaatcagattctcttcaagccaatgaaactacaccctctcgtggtatactggggacagtccgaaaatgttgtgagtttctaagtacacgtcattgcctcgtggtcatagatggccttcagtccaaagaggaatgggatttgatacaatcatcattggtatctagatactctaaatctaatactattatcattgtgataacaactgaagcaagcattgcagcatactgcgcagataaggatgaccttgtgtttaatgtcaaaactttagaaactgatgcagcctttgatctcttcgaaaatgagatatctaagaaggctccgttgtggaccacttcattatgtgatcgaggaaattcagtgacgcaagaacttgtttcaaagtgcggggggctcccaatggtaatagtggctatagctggcatattggctaccaagacctgcaggatctgtttagctgggtgcattcctgcttccgtacttgtccagatttcatcaagccatgtatcttctacctatcattttttccaagagaccacaacattcgacgaaggcgtctagtaaggcgttggatcgctgagggttactgcagggacagtgatgataaatctgcagaggagaatggggagttcttcttctccaaactcctcggtatgagcataatccaaccggagtccagtgacgcgaggatggtctcgtgtcaaatcaatggatttttccgtgagtgcatcctctcacggtcaggggaaatggaagaccttgtcattgaactggccgacagatgcaacctaaccacccaacgcagtgggcgtcatcttgtcatatcggaaagctgggacagagataagattttattcgagagcatcgacttctcacggctacggtcaatgacagtgtttggaatgtggaaatcattcttcatctccaaaagtatgaagcttnn

SEQ ID NO: 5689 - DNA, 5905 bp, Zea Mays
  misc_feature (5904)..(5905): n is a, c, g, or t
gtcgctggctagctgcaggcggagttcgctttcgtcttccagttgcactaatagcgggagaatgctaaaaggtattttgatctacttatgattaatttaatgcgttctaaatatttttagtttatagaaccaaacaatgactaagatttagtcgtctaaggtcattctcagtggaagttttattgtacggtttctaaaagtgacacatcaacttttatctataaaacagtgtattctgagtttcatctagataaaatcctctcttctcccataaaaccctctccatctctctcaccataaataccttgccatatcatcaaatatgatgatgtgtcttatcatttaacgagaataaaattatgataaaacttctactgataatggctcaactaaggcctcttttgtttgtcccggattcatccaggaactattctagttgaccaaaacttatataaattagataaataatttagatcctgttcgattttcagggattcgagcctcggattgaattctagccggattacttctctaatttatatagattttgacgagctgtaacgaatcctggtctattccggtacaaccgaacaggcccttagctaggaaccattccacggttagtccctgcaaggaaccattagggcctgttcgcttcttcaggaatgaacccgaatttattccagctcattaaaatttatataaattagagaagtaatttggccaggaactatttcaaggctccaatccgtgaaaaccgaacaggcctttagctggtttataacggcctatgcggaatgtaacagctcgttaataaaagagaagcgaggaagagaaactgatcgtgcacgaagctcatgcttcagaagagaatcgaggaaagagaaattgatcgacgcacgatgtaccaagctcgtgctttagaaagagtagagagtagagaaaggtgtagagatttgccggtttggtggcggtacgcacgagcaggcgcccggcggcgtacgaaattagctcgggggcgtacaggtcgctctcgtctggctcggggctgggtccgctgccgtggtggccgtccaccgggcgagccgtcgaggtacccaatttctgccatggcgatccgcccggaccaatgctcgattctccatctgaccatcgtcggtaagcctcctgccccactaccgccctccaaagcggcgcgcgcgccaccgccatctccacccacgcccaccttgctgccgcggccgccccgtaccgctaccgcgccctcgatctgaccccacggggcaggatggacaaagggaaatcggtggtggccgagctggtggcgtcgttcagcgatgtccgtgtcacgccgcgccagccgccagaaccccaagccaagagcttcctaccgtcgccctccttctgtaagctccctgccgcctgttcgcttatgttgggtaactggctaggctgactgtgtattggttatggctgcttgaagttttccgtgatttatttcatgtgttggcgtctcctgcaaaacgagagatgcacataattaagaattttctaggatcataaagcagtgatgggtttgattgattaactttagggcatttttcctgattgcccaccaatttccgccatggcaatccgcccggactaatgcccgattctccatctgacgatcctcggtaggtttggtcctgcgtgattcacatgtctcgtcaggttcttgcgggttcttttgtttttttgttgttgtggttcgtcttgtggatttccttgttgcctggtcgagtatttatatttttcatcggcccattcgcgacgattctcttgctgtcgcccggagagaaaatgcttctggcgtcttcctcaccctcccgttctatattgcagaattgagctttttcctgcagagtcttggattttgttgcattatgactttgcgatcatcaatgaacatagacgaaaacatatactccatgacagcgaggatacaacttttcacccaaataaattggtagagtcactcatcaaatatgattatatgtcgtcgcaatacatgaactattttatgctactcatttgactacaaatgcagtgacagctactgcaccccttgttaatttgaaacacgtacgtattatatgtatatatgcatatgaagagcttaacttagtcaaaaaggactgactggcctgcacgtcttctccagttcagagtttggacactgcttggacttggagtggcatttcaagccagctaagggtccagatccaccatccatggctgtgcttccaacgcccaggagaatcaacaacttggcccttgcaagcacggtgcttccaaaacgtgtgccgctccatttattacagaaaataacaaatgatttctctaaggaccgtgaacttggttccggtgcatacggaaaagtttacaagggagtgcataaaaatggcgaaacgatggctgtcaagttgcttcactccatggctggacttgatgataaactttttgaggaggagtttcacaacattgcaagactccaacacaagaatattgtgcgtcttgttggcttttgccatgaaactcaacgccaattcataccgcacgatggaaaaatgatttttgctgatagcaaatatatggccctttgcttcgaatatatgcataatggaagccttgacaagttcattattgatgaaaatagtgtccatgactggtccacacgctatgcaataatcaaggggatctgtgagggcttgaaataccttcacgaggaattgaatcctcctatttatcatttggatttaaaaccagctaatattttgttggatgacaatatgatgccaaagcttgcagattttggcttgtcaaagatttttgaacaggaacgaacacgaatcacacaaagttgtgtaggaacacatggatatctaccaccagaatatatagacaggaaagtaatctcaaataagcttgacatattcagtctgggtgtcatcatcataaagattataagtggacctacaggttacacccagtgtgctgaaatgccttccaaacaatttgttgagcttgtacatgaaaaatggaggaataagttacaaacaacaatggatgcagctgcattggagacatattgtgaacaagtagtgagatgcattgaaatggctttaagttgtgtggagaccgatcggcacaaaaggccgagtataggggctattattgatgagctaaataagatggagacaaataccgaccaggtattttcagtggatatatgctcgactccagcacaaacacaaccaccaccccttcctgattctagccacagcacagaagaaacaagcaacacaaagggagttagcagactgggaccgagagagtacgtacagagcacaatgcgggacctggtaattgggataaccaagtcggtggtggagggggtgatcagcaaggcccagtcggtgatggaggaagaaaatatgctacttattagcatgcagcatgacctccacttcatcaccgatgagtttcagatgatctattcattccttagcatcactgatgaggagcgtatcaacaacgcggtagtgaggatctgggtgatgcagacgcgtggtctggcctatgacctggaagactacatggatgccttctcctgcctggacaagaccagaaaatggtggtcccgcttgttccgagcatgcctggcaccaccggggtctccatacatgtcagtgacatctctggccgtggaactcaagcatctaaaggcaagggtcgaggacgttagccacaggaacactcggtataacctcatcagcgacgccggctcaaagcccggcctcgtgaggcaacagccggtgcctcctggtgctgtggcatacgaaaacgacacaagaaggaaacacatcttaggggatctcacccagcttatcaccaacaaggacgatgctgatcttcaattgatttcaatgtggggtgcaggtggaggcaccgggacgacatccatcataaggaagtgctacagtgatccagagatcatccaaaatttcatatgccgagcctgggtcaacctcagccatccattcaacccccatgagtttgtgcggtctttgatggctcacttttatgcaaacagttgccaagaaagacaaggagggatcatcggtgttgatgtcctaactagcatggatgcgactgccacccagggggatctcctcagcgagttcgttcagctagttgacaagaacaggtaccttgttgtcttggaagacctgcccaccatggcagagtgggactctatcaggacgttccttcccgacagaaagaatggcagctggatcatcgtgtcctcgcagaaatatgaaattgcaagtttatgtgtcggacatccctaccaaatattggacctgaagcagtcctcgcccactgagcactccgtatgtgccttcttgagagaggaggtcacattaaaagaaaaaaaaggaggcaatagaaaagaaaaaatttatgtcggagatgaaagcgaggtgaacaacggtagtacatcaaccaacagcaaggtgatatcaactgagtatgacttaagccataaccataggatggtcgccaactctaaatggaaagaagccagagactggatgcagaattcttcccttgtcggacgcagattgcagatgtatcaaattcatcgctgtatagctgaagcacaaaggaaccattcccatgttatgtctgtttggggaatagttggcgttgggaaatcagctattgtcagaaatttttactgcgacaggatacttgagaatcagcaatttcaagaatacggttgggtggatttatcacactcccaacccttcaatttgaaggacttctcacagaacttgcttacgaattttcaatcagattctcttcaagccaatgaaactacaccctctcgtggtatactggggacagtccgaaaatgttgtgagtttctaagtacacgtcattgcctcgtggtcatagatggccttcagtccaaagaggaatgggatttgatacaatcatcattggtatctagatactctaaatctaatactattatcattgtgataacaactgaagcaagcattgcagcatactgcgcagataaggatgaccttgtgtttaatgtcaaaactttagaaactgatgcagcctttgatctcttcgaaaatgagatatctaagaaggctccgttgtggaccacttcattatgtgatcgaggaaattcagtgacgcaagaacttgtttcaaagtgcggggggctcccaatggtaatagtggctatagctggcatattggctaccaaggtagtctcctggatggacactgcaacatccatcaatttgaggtttatgtttgagctagagatcaatccagacctgcaggatctgtttagctgggtgcattcctgcttccgtacttgtccagatttcatcaagccatgtatcttctacctatcattttttccaagagaccacaacattcgacgaaggcgtctagtaaggcgttggatcgctgagggttactgcagggacagtgatgataaatctgcagaggagaatggggagttcttcttctccaaactcctcggtatgagcataatccaaccggagtccagtgacgcgaggatggtctcgtgtcaaatcaatggatttttccgtgagtgcatcctctcacggtcaggggaaatggaagaccttgtcattgaactggccgacagatgcaacctaaccacccaacgcagtgggcgtcatcttgtcatatcggaaagctgggacagagataagattttattcgagagcatcgacttctcacggctacggtcaatgacagtgtttggaatgtggaaatcattcttcatctccaaaagtatgaagcttnn

SEQ ID NO: 5690 - DNA, 5289 bp, Zea Mays
  misc_feature (5288)..(5289): n is a, c, g, or t
tcgtgcacgaagctcatgcttcagaagagaatcgaggaaagagaaattgatcgacgcacgatgtaccaagctcgtgctttagaaagagtagagagtagagaaaggtgtagagatttgccggtttggtggcggtacgcacgagcaggcgcccggcggcgtacgaaattagctcgggggcgtacaggtcgctctcgtctggctcggggctgggtccgctgccgtggtggccgtccaccgggcgagccgtcgaggtacccaatttctgccatggcgatccgcccggaccaatgctcgattctccatctgaccatcgtcggtaagcctcctgccccactaccgccctccaaagcggcgcgcgcgccaccgccatctccacccacgcccaccttgctgccgcggccgccccgtaccgctaccgcgccctcgatctgaccccacggggcaggatggacaaagggaaatcggtggtggccgagctggtggcgtcgttcagcgatgtccgtgtcacgccgcgccagccgccagaaccccaagccaagagcttcctaccgtcgccctccttctgtaagctccctgccgcctgttcgcttatgttgggtaactggctaggctgactgtgtattggttatggctgcttgaagttttccgtgatttatttcatgtgttggcgtctcctgcaaaacgagagatgcacataattaagaattttctaggatcataaagcagtgatgggtttgattgattaactttagggcatttttcctgattgcccaccaatttccgccatggcaatccgcccggactaatgcccgattctccatctgacgatcctcggtaggtttggtcctgcgtgattcacatgtctcgtcaggttcttgcgggttcttttgtttttttgttgttgtggttcgtcttgtggatttccttgttgcctggtcgagtatttatatttttcatcggcccattcgcgacgattctcttgctgtcgcccggagagaaaatgcttctggcgtcttcctcaccctcccgttctatattgcagaattgagctttttcctgcagagtcttggattttgttgcattatgactttgcgatcatcaatgaacatagacgaaaacatatactccatgacagcgaggatacaacttttcacccaaataaattggtagagtcactcatcaaatatgattatatgtcgtcgcaatacatgaactattttatgctactcatttgactacaaatgcagtgacagctactgcaccccttgttaatttgaaacacgtacgtattatatgtatatatgcatatgaagagcttaacttaggtactacctaacccccccccccccccccccccccacacacacacacacacacccacacaaaaaaaatcttgttaagattgcagttaatttaatccggtcttttgcagtcaaaaaggactgactggcctgcacgtcttctccagttcagagtttggacactgcttggacttggagtggcatttcaagccagctaagggtccagatccaccatccatggctgtgcttccaacgcgtcaggatcccttattaaatatcccggcagcgccttctccactccctgctggccgtcttgagcatgagcatgatggacctactccttttctttttccagccaggagaatcaacaacttggcccttgcaagcacggtgcttccaaaacgtgtgccgctccatttattacagaaaataacaaatgatttctctaaggaccgtgaacttggttccggtgcatacggaaaagtttacaagcagggagtgcataaaaatggcgaaacgatggctgtcaagttgcttcactccatggctggacttgatgataaactttttgaggaggagtttcacaacattgcaagactccaacacaagaatattgtgcgtcttgttggcttttgccatgaaactcaacgccaattcataccgcacgatggaaaaatgatttttgctgatagcaaatatatggccctttgcttcgaatatatgcataatggaagccttgacaagttcattattgactgtttgctccaacagatgaaaatagtgtccatgactggtccacacgctatgcaataatcaaggggatctgtgagggcttgaaataccttcacgaggaattgaatcctcctatttatcatttggatttaaaaccagctaatattttgttggatgacaatatgatgccaaagcttgcagattttggcttgtcaaagatttttgaacaggaacgaacacgaatcacacaaagttgtgtaggaacacatggatatctaccaccagaatatatagacaggaaagtaatctcaaataagcttgacatattcagtctgggtgtcatcatcataaagattataagtggacctacaggttacacccagtgtgctgaaatgccttccaaacaatttgttgagcttgtacatgaaaaatggaggaataagttacaaacaacaatggatgcagctgcattggagacatattgtgaacaagtagtgagatgcattgaaatggctttaagttgtgtggagaccgatcggcacaaaaggccgagtataggggctattattgatgagctaaataagatggagacaaataccgaccaggtattttcagtggatatatgctcgactccagcacaaacacaaccaccaccccttcctgattctagccacagcacagaagaaacaagcaacacaaagggagttagcagactgggaccgagagagtacgtacagagcacaatgcgggacctggtaattgggataaccaagtcggtggtggagggggtgatcagcaaggcccagtcggtgatggaggaagaaaatatgctacttattagcatgcagcatgacctccacttcatcaccgatgagtttcagatgatctattcattccttagcatcactgatgaggagcgtatcaacaacgcggtagtgaggatctgggtgatgcagacgcgtggtctggcctatgacctggaagactacatggatgccttctcctgcctggacaagaccagaaaatggtggtcccgcttgttccgagcatgcctggcaccaccggggtctccatacatgtcagtgacatctctggccgtggaactcaagcatctaaaggcaagggtcgaggacgttagccacaggaacactcggtataacctcatcagcgacgccggctcaaagcccggcctcgtgaggcaacagccggtgcctcctggtgctgtggcatacgaaaacgacacaagaaggaaacacatcttaggggatctcacccagcttatcaccaacaaggacgatgctgatcttcaattgatttcaatgtggggtgcaggtggaggcaccgggacgacatccatcataaggaagtgctacagtgatccagagatcatccaaaatttcatatgccgagcctgggtcaacctcagccatccattcaacccccatgagtttgtgcggtctttgatggctcacttttatgcaaacagttgccaagaaagacaaggagggatcatcggtgttgatgtcctaactagcatggatgcgactgccacccagggggatctcctcagcgagttcgttcagctagttgacaagaacaggtaccttgttgtcttggaagacctgcccaccatggcagagtgggactctatcaggacgttccttcccgacagaaagaatggcagctggatcatcgtgtcctcgcagaaatatgaaattgcaagtttatgtgtcggacatccctaccaaatattggacctgaagcagtcctcgcccactgagcactccgtatgtgccttcttgagagaggaggtcacattaaaagaaaaaaaaggaggcaatagaaaagaaaaaatttatgtcggagatgaaagcgaggtgaacaacggtagtacatcaaccaacagcaaggtgatatcaactgagtatgacttaagccataaccataggatggtcgccaactctaaatggaaagaagccagagactggatgcagaattcttcccttgtcggacgcagattgcagatgtatcaaattcatcgctgtatagctgaagcacaaaggaaccattcccatgttatgtctgtttggggaatagttggcgttgggaaatcagctattgtcagaaatttttactgcgacaggatacttgagaatcagcaatttcaagaatacggttgggtggatttatcacactcccaacccttcaatttgaaggacttctcacagaacttgcttacgaattttcaatcagattctcttcaagccaatgaaactacaccctctcgtggtatactggggacagtccgaaaatgttgtgagtttctaagtacacgtcattgcctcgtggtcatagatggccttcagtccaaagaggaatgggatttgatacaatcatcattggtatctagatactctaaatctaatactattatcattgtgataacaactgaagcaagcattgcagcatactgcgcagataaggatgaccttgtgtttaatgtcaaaactttagaaactgatgcagcctttgatctcttcgaaaatgagatatctaagaaggctccgttgtggaccacttcattatgtgatcgaggaaattcagtgacgcaagaacttgtttcaaagtgcggggggctcccaatggtaatagtggctatagctggcatattggctaccaaggtagtctcctggatggacactgcaacatccatcaatttgaggtttatgtttgagctagagatcaatccagacctgcaggatctgtttagctgggtgcattcctgcttccgtacttgtccagatttcatcaagccatgtatcttctacctatcattttttccaagagaccacaacattcgacgaaggcgtctagtaaggcgttggatcgctgagggttactgcagggacagtgatgataaatctgcagaggagaatggggagttcttcttctccaaactcctcggtatgagcataatccaaccggagtccagtgacgcgaggatggtctcgtgtcaaatcaatggatttttccgtgagtgcatcctctcacggtcaggggaaatggaagaccttgtcattgaactggccgacagatgcaacctaaccacccaacgcagtgggcgtcatcttgtcatatcggaaagctgggacagagataagattttattcgagagcatcgacttctcacggctacggtcaatgacagtgtttggaatgtggaaatcattcttcatctccaaaagtatgaagcttnn

SEQ ID NO: 5691 - DNA, 3984 bp, Zea Mays
  misc_feature (3983)..(3984): n is a, c, g, or t
tcgtgcacgaagctcatgcttcagaagagaatcgaggaaagagaaattgatcgacgcacgatgtaccaagctcgtgctttagaaagagtagagagtagagaaaggtgtagagatttgccggtttggtggcggtacgcacgagcaggcgcccggcggcgtacgaaattagctcgggggcgtacaggtcgctctcgtctggctcggggctgggtccgctgccgtggtggccgtccaccgggcgagccgtcgaggtacccaatttctgccatggcgatccgcccggaccaatgctcgattctccatctgaccatcgtcggtaagcctcctgccccactaccgccctccaaagcggcgcgcgcgccaccgccatctccacccacgcccaccttgctgccgcggccgccccgtaccgctaccgcgccctcgatctgaccccacggggcaggatggacaaagggaaatcggtggtggccgagctggtggcgtcgttcagcgatgtccgtgtcacgccgcgccagccgccagaaccccaagccaagagcttcctaccgtcgccctccttctgtaagctccctgccgcctgttcgcttatgttgggtaactggctaggctgactgtgtattggttatggctgcttgaagttttccgtgatttatttcatgtgttggcgtctcctgcaaaacgagagatgcacataattaagaattttctaggatcataaagcagtgatgggtttgattgattaactttagggcatttttcctgattgcccaccaatttccgccatggcaatccgcccggactaatgcccgattctccatctgacgatcctcggtaggtttggtcctgcgtgattcacatgtctcgtcaggttcttgcgggttcttttgtttttttgttgttgtggttcgtcttgtggatttccttgttgcctggtcgagtatttatatttttcatcggcccattcgcgacgattctcttgctgtcgcccggagagaaaatgcttctggcgtcttcctcaccctcccgttctatattgcagaattgagctttttcctgcagagtcttggattttgttgcattatgactttgcgatcatcaatgaacatagacgaaaacatatactccatgacagcgaggatacaacttttcacccaaataaattggtagagtcactcatcaaatatgattatatgtcgtcgcaatacatgaactattttatgctactcatttgactacaaatgcagtgacagctactgcaccccttgttaatttgaaacacgtacgtattatatgtatatatgcatatgaagagcttaacttaggtactacctaacccccccccccccccccccccccacacacacacacacacacccacacaaaaaaaatcttgttaagattgcagttaatttaatccggtcttttgcagtcaaaaaggactgactggcctgcacgtcttctccagttctattttgctgccagttcagagtttggacactgcttggacttggagtggcatttcaagccagctaagggtccagatccaccatccatggctgtgcttccaacgcccaggagaatcaacaacttggcccttgcaagcacggtgcttccaaaacgtgtgccgctccatttattacagaaaataacaaatgatttctctaaggaccgtgaacttggttccggtgcatacggaaaagtttacaagggagtgcataaaaatggcgaaacgatggctgtcaagttgcttcactccatggctggacttgatgataaactttttgaggaggagtttcacaacattgcaagactccaacacaagaatattgtgcgtcttgttggcttttgccatgaaactcaacgccaattcataccgcacgatggaaaaatgatttttgctgatagcaaatatatggccctttgcttcgaatatatgcataatggaagccttgacaagttcattattgatgaaaatagtgtccatgactggtccacacgctatgcaataatcaaggggatctgtgagggcttgaaataccttcacgaggaattgaatcctcctatttatcatttggatttaaaaccagctaatattttgttggatgacaatatgatgccaaagcttgcagattttggcttgtcaaagatttttgaacaggaacgaacacgaatcacacaaagttgtgtaggaacacatggatatctaccaccagaatatatagacaggaaagtaatctcaaataagcttgacatattcagtctgggtgtcatcatcataaagattataagtggacctacaggttacacccagtgtgctgaaatgccttccaaacaatttgttgagcttgtacatgaaaaatggaggaataagttacaaacaacaatggatgcagctgcattggagacatattgtgaacaagtagtgagatgcattgaaatggctttaagttgtgtggagaccgatcggcacaaaaggccgagtataggggctattattgatgagctaaataagatggagacaaataccgaccaggaggtcacattaaaagaaaaaaaaggaggcaatagaaaagaaaaaatttatgtcggagatgaaagcgaggtgaacaacggtagtacatcaaccaacagcaaggtgatatcaactgagtatgacttaagccataaccataggatggtcgccaactctaaatggaaagaagccagagactggatgcagaattcttcccttgtcggacgcagattgcagatgtatcaaattcatcgctgtatagctgaagcacaaaggaaccattcccatgttatgtctgtttggggaatagttggcgttgggaaatcagctattgtcagaaatttttactgcgacaggatacttgagaatcagcaatttcaagaatacggttgggtggatttatcacactcccaacccttcaatttgaaggacttctcacagaacttgcttacgaattttcaatcagattctcttcaagccaatgaaactacaccctctcgtggtatactggggacagtccgaaaatgttgtgagtttctaagtacacgtcattgcctcgtggtcatagatggccttcagtccaaagaggaatgggatttgatacaatcatcattggtatctagatactctaaatctaatactattatcattgtgataacaactgaagcaagcattgcagcatactgcgcagataaggatgaccttgtgtttaatgtcaaaactttagaaactgatgcagcctttgatctcttcgaaaatgagatatctaagaaggctccgttgtggaccacttcattatgtgatcgaggaaattcagtgacgcaagaacttgtttcaaagtgcggggggctcccaatggtaatagtggctatagctggcatattggctaccaaggtagtctcctggatggacactgcaacatccatcaatttgaggtttatgtttgagctagagatcaatccagacctgcaggatctgtttagctgggtgcattcctgcttccgtacttgtccagatttcatcaagccatgtatcttctacctatcattttttccaagagaccacaacattcgacgaaggcgtctagtaaggcgttggatcgctgagggttactgcagggacagtgatgataaatctgcagaggagaatggggagttcttcttctccaaactcctcggtatgagcataatccaaccggagtccagtgacgcgaggatggtctcgtgtcaaatcaatggatttttccgtgagtgcatcctctcacggtcaggggaaatggaagaccttgtcattgaactggccgacagatgcaacctaaccacccaacgcagtgggcgtcatcttgtcatatcggaaagctgggacagagataagattttattcgagagcatcgacttctcacggctacggtcaatgacagtgtttggaatgtggaaatcattcttcatctccaaaagtatgaagcttnn

SEQ ID NO: 5692 - DNA, 5165 bp, Zea Mays
  misc_feature (5164)..(5165): n is a, c, g, or t
tcgtgcacgaagctcatgcttcagaagagaatcgaggaaagagaaattgatcgacgcacgatgtaccaagctcgtgctttagaaagagtagagagtagagaaaggtgtagagatttgccggtttggtggcggtacgcacgagcaggcgcccggcggcgtacgaaattagctcgggggcgtacaggtcgctctcgtctggctcggggctgggtccgctgccgtggtggccgtccaccgggcgagccgtcgaggtacccaatttctgccatggcgatccgcccggaccaatgctcgattctccatctgaccatcgtcggtaagcctcctgccccactaccgccctccaaagcggcgcgcgcgccaccgccatctccacccacgcccaccttgctgccgcggccgccccgtaccgctaccgcgccctcgatctgaccccacggggcaggatggacaaagggaaatcggtggtggccgagctggtggcgtcgttcagcgatgtccgtgtcacgccgcgccagccgccagaaccccaagccaagagcttcctaccgtcgccctccttctgtaagctccctgccgcctgttcgcttatgttgggtaactggctaggctgactgtgtattggttatggctgcttgaagttttccgtgatttatttcatgtgttggcgtctcctgcaaaacgagagatgcacataattaagaattttctaggatcataaagcagtgatgggtttgattgattaactttagggcatttttcctgattgcccaccaatttccgccatggcaatccgcccggactaatgcccgattctccatctgacgatcctcggtaggtttggtcctgcgtgattcacatgtctcgtcaggttcttgcgggttcttttgtttttttgttgttgtggttcgtcttgtggatttccttgttgcctggtcgagtatttatatttttcatcggcccattcgcgacgattctcttgctgtcgcccggagagaaaatgcttctggcgtcttcctcaccctcccgttctatattgcagaattgagctttttcctgcagagtcttggattttgttgcattatgactttgcgatcatcaatgaacatagacgaaaacatatactccatgacagcgaggatacaacttttcacccaaataaattggtagagtcactcatcaaatatgattatatgtcgtcgcaatacatgaactattttatgctactcatttgactacaaatgcagtgacagctactgcaccccttgttaatttgaaacacgtacgtattatatgtatatatgcatatgaagagcttaacttaggtactacctaacccccccccccccccccccccccacacacacacacacacacccacacaaaaaaaatcttgttaagattgcagttaatttaatccggtcttttgcagtcaaaaaggactgactggcctgcacgtcttctccagagtttggacactgcttggacttggagtggcatttcaagccagctaagggtccagatccaccatccatggctgtgcttccaacgcccaggagaatcaacaacttggcccttgcaagcacggtgcttccaaaacgtgtgccgctccatttattacagaaaataacaaatgatttctctaaggaccgtgaacttggttccggtgcatacggaaaagtttacaagggagtgcataaaaatggcgaaacgatggctgtcaagttgcttcactccatggctggacttgatgataaactttttgaggaggagtttcacaacattgcaagactccaacacaagaatattgtgcgtcttgttggcttttgccatgaaactcaacgccaattcataccgcacgatggaaaaatgatttttgctgatagcaaatatatggccctttgcttcgaatatatgcataatggaagccttgacaagttcattattgatgaaaatagtgtccatgactggtccacacgctatgcaataatcaaggggatctgtgagggcttgaaataccttcacgaggaattgaatcctcctatttatcatttggatttaaaaccagctaatattttgttggatgacaatatgatgccaaagcttgcagattttggcttgtcaaagatttttgaacaggaacgaacacgaatcacacaaagttgtgtaggaacacatggatatctaccaccagaatatatagacaggaaagtaatctcaaataagcttgacatattcagtctgggtgtcatcatcataaagattataagtggacctacaggttacacccagtgtgctgaaatgccttccaaacaatttgttgagcttgtacatgaaaaatggaggaataagttacaaacaacaatggatgcagctgcattggagacatattgtgaacaagtagtgagatgcattgaaatggctttaagttgtgtggagaccgatcggcacaaaaggccgagtataggggctattattgatgagctaaataagatggagacaaataccgaccaggtattttcagtggatatatgctcgactccagcacaaacacaaccaccaccccttcctgattctagccacagcacagaagaaacaagcaacacaaagggagttagcagactgggaccgagagagtacgtacagagcacaatgcgggacctggtaattgggataaccaagtcggtggtggagggggtgatcagcaaggcccagtcggtgatggaggaagaaaatatgctacttattagcatgcagcatgacctccacttcatcaccgatgagtttcagatgatctattcattccttagcatcactgatgaggagcgtatcaacaacgcggtagtgaggatctgggtgatgcagacgcgtggtctggcctatgacctggaagactacatggatgccttctcctgcctggacaagaccagaaaatggtggtcccgcttgttccgagcatgcctggcaccaccggggtctccatacatgtcagtgacatctctggccgtggaactcaagcatctaaaggcaagggtcgaggacgttagccacaggaacactcggtataacctcatcagcgacgccggctcaaagcccggcctcgtgaggcaacagccggtgcctcctggtgctgtggcatacgaaaacgacacaagaaggaaacacatcttaggggatctcacccagcttatcaccaacaaggacgatgctgatcttcaattgatttcaatgtggggtgcaggtggaggcaccgggacgacatccatcataaggaagtgctacagtgatccagagatcatccaaaatttcatatgccgagcctgggtcaacctcagccatccattcaacccccatgagtttgtgcggtctttgatggctcacttttatgcaaacagttgccaagaaagacaaggagggatcatcggtgttgatgtcctaactagcatggatgcgactgccacccagggggatctcctcagcgagttcgttcagctagttgacaagaacaggtaccttgttgtcttggaagacctgcccaccatggcagagtgggactctatcaggacgttccttcccgacagaaagaatggcagctggatcatcgtgtcctcgcagaaatatgaaattgcaagtttatgtgtcggacatccctaccaaatattggacctgaagcagtcctcgcccactgagcactccgtatgtgccttcttgagagaggaggtcacattaaaagaaaaaaaaggaggcaatagaaaagaaaaaatttatgtcggagatgaaagcgaggtgaacaacggtagtacatcaaccaacagcaaggtgatatcaactgagtatgacttaagccataaccataggatggtcgccaactctaaatggaaagaagccagagactggatgcagaattcttcccttgtcggacgcagattgcagatgtatcaaattcatcgctgtatagctgaagcacaaaggaaccattcccatgttatgtctgtttggggaatagttggcgttgggaaatcagctattgtcagaaatttttactgcgacaggatacttgagaatcagcaatttcaagaatacggttgggtggatttatcacactcccaacccttcaatttgaaggacttctcacagaacttgcttacgaattttcaatcagattctcttcaagccaatgaaactacaccctctcgtggtatactggggacagtccgaaaatgttgtgagtttctaagtacacgtcattgcctcgtggtcatagatggccttcagtccaaagaggaatgggatttgatacaatcatcattggtatctagatactctaaatctaatactattatcattgtgataacaactgaagcaagcattgcagcatactgcgcagataaggatgaccttgtgtttaatgtcaaaactttagaaactgatgcagcctttgatctcttcgaaaatgagatatctaagaaggctccgttgtggaccacttcattatgtgatcgaggaaattcagtgacgcaagaacttgtttcaaagtgcggggggctcccaatggtaatagtggctatagctggcatattggctaccaaggtagtctcctggatggacactgcaacatccatcaatttgaggtttatgtttgagctagagatcaatccagacctgcaggatctgtttagctgggtgcattcctgcttccgtacttgtccagatttcatcaagccatgtatcttctacctatcattttttccaagagaccacaacattcgacgaaggcgtctagtaaggcgttggatcgctgagggttactgcagggacagtgatgataaatctgcagaggagaatggggagttcttcttctccaaactcctcggtatgagcataatccaaccggagtccagtgacgcgaggatggtctcgtgtcaaatcaatggatttttccgtgagtgcatcctctcacggtcaggggaaatggaagaccttgtcattgaactggccgacagatgcaacctaaccacccaacgcagtgggcgtcatcttgtcatatcggaaagctgggacagagataagattttattcgagagcatcgacttctcacggctacggtcaatgacagtgtttggaatgtggaaatcattcttcatctccaaaagtatgaagcttnn

SEQ ID NO: 5693 - DNA, 2452 bp, Zea Mays
  misc_feature (2451)..(2452): n is a, c, g, or t
tcgtgcacgaagctcatgcttcagaagagaatcgaggaaagagaaattgatcgacgcacgatgtaccaagctcgtgctttagaaagagtagagagtagagaaaggtgtagagatttgccggtttggtggcggtacgcacgagcaggcgcccggcggcgtacgaaattagctcgggggcgtacaggtcgctctcgtctggctcggggctgggtccgctgccgtggtggccgtccaccgggcgagccgtcgaggtacccaatttctgccatggcgatccgcccggaccaatgctcgattctccatctgaccatcgtcggtaagcctcctgccccactaccgccctccaaagcggcgcgcgcgccaccgccatctccacccacgcccaccttgctgccgcggccgccccgtaccgctaccgcgccctcgatctgaccccacggggcaggatggacaaagggaaatcggtggtggccgagctggtggcgtcgttcagcgatgtccgtgtcacgccgcgccagccgccagaaccccaagccaagagcttcctaccgtcgccctccttcttcaaaaaggactgactggcctgcacgtcttctccagagtttggacactgcttggacttggagtggcatttcaagccagctaagggtccagatccaccatccatggctgtgcttccaacgcgtcaggatcccttattaaatatcccggcagcgccttctccactccctgctggccgtcttgagcatgagcatgatggacctactccttttctttttccagccaggagaatcaacaacttggcccttgcaagcacggtgcttccaaaacgtgtgccgctccatttattacagaaaataacaaatgatttctctaaggaccgtgaacttggttccggtgcatacggaaaagtttacaagggagtgcataaaaatggcgaaacgatggctgtcaagttgcttcactccatggctggacttgatgataaactttttgaggaggagtttcacaacattgcaagactccaacacaagaatattgtgcgtcttgttggcttttgccatgaaactcaacgccaattcataccgcacgatggaaaaatgatttttgctgatagcaaatatatggccctttgcttcgaatatatgcataatggaagccttgacaagttcattattgatgaaaatagtgtccatgactggtccacacgctatgcaataatcaaggggatctgtgagggcttgaaataccttcacgaggaattgaatcctcctatttatcatttggatttaaaaccagctaatattttgttggatgacaatatgatgccaaagcttgcagattttggcttgtcaaagatttttgaacaggaacgaacacgaatcacacaaagttgtgtaggaacacatggatatctaccaccagaatatatagacaggaaagtaatctcaaataagcttgacatattcagtctgggtgtcatcatcataaagattataagtggacctacaggttacacccagtgtgctgaaatgccttccaaacaatttgttgagcttgtacatgaaaaatggaggaataagttacaaacaacaatggatgcagctgcattggagacatattgtgaacaagtagtgagatgcattgaaatggctttaagttgtgtggagaccgatcggcacaaaaggccgagtataggggctattattgatgagctaaataagatggagacaaataccgaccagatatctaagaaggctccgttgtggaccacttcattatgtgatcgaggaaattcagtgacgcaagaacttgtttcaaagtgcggggggctcccaatggtaatagtggctatagctggcatattggctaccaaggtagtctcctggatggacactgcaacatccatcaatttgaggtttatgtttgagctagagatcaatccagacctgcaggatctgtttagctgggtgcattcctgcttccgtacttgtccagatttcatcaagccatgtatcttctacctatcattttttccaagagaccacaacattcgacgaaggcgtctagtaaggcgttggatcgctgagggttactgcagggacagtgatgataaatctgcagaggagaatggggagttcttcttctccaaactcctcggtatgagcataatccaaccggagtccagtgacgcgaggatggtctcgtgtcaaatcaatggatttttccgtgagtgcatcctctcacggtcaggggaaatggaagaccttgtcattgaactggccgacagatgcaacctaaccacccaacgcagtgggcgtcatcttgtcatatcggaaagctgggacagagataagattttattcgagagcatcgacttctcacggctacggtcaatgacagtgtttggaatgtggaaatcattcttcatctccaaaagtatgaagcttnn

SEQ ID NO: 5694 - DNA, 4499 bp, Zea Mays
  misc_feature (4498)..(4499): n is a, c, g, or t
tcgtgcacgaagctcatgcttcagaagagaatcgaggaaagagaaattgatcgacgcacgatgtaccaagctcgtgctttagaaagagtagagagtagagaaaggtgtagagatttgccggtttggtggcggtacgcacgagcaggcgcccggcggcgtacgaaattagctcgggggcgtacaggtcgctctcgtctggctcggggctgggtccgctgccgtggtggccgtccaccgggcgagccgtcgaggtacccaatttctgccatggcgatccgcccggaccaatgctcgattctccatctgaccatcgtcggtaagcctcctgccccactaccgccctccaaagcggcgcgcgcgccaccgccatctccacccacgcccaccttgctgccgcggccgccccgtaccgctaccgcgccctcgatctgaccccacggggcaggatggacaaagggaaatcggtggtggccgagctggtggcgtcgttcagcgatgtccgtgtcacgccgcgccagccgccagaaccccaagccaagagcttcctaccgtcgccctccttcttcaaaaaggactgactggcctgcacgtcttctccagttctattttgctgccagttcagagtttggacactgcttggacttggagtggcatttcaagccagctaagggtccagatccaccatccatggctgtgcttccaacgcgtcaggatcccttattaaatatcccggcagcgccttctccactccctgctggccgtcttgagcatgagcatgatggacctactccttttctttttccagccaggagaatcaacaacttggcccttgcaagcacggtgcttccaaaacgtgtgccgctccatttattacagaaaataacaaatgatttctctaaggaccgtgaacttggttccggtgcatacggaaaagtttacaaggtataaataatttaaggcgtggcacatatatacagggttacctggccctacatatattcatggacagagtaccattttctgctctgcagctacttgcattaacccatgcttaattatgcgacgtcaagcagggagtgcataaaaatggcgaaacgatggctgtcaagttgcttcactccatggctggacttgatgataaactttttgaggaggagtttcacaacattgcaagactccaacacaagaatattgtgcgtcttgttggcttttgccatgaaactcaacgccaattcataccgcacgatggaaaaatgatttttgctgatagcaaatatatggccctttgcttcgaatatatgcataatggaagccttgacaagttcattattgatgaaaatagtgtccatgactggtccacacgctatgcaataatcaaggggatctgtgagggcttgaaataccttcacgaggaattgaatcctcctatttatcatttggatttaaaaccagctaatattttgttggatgacaatatgatgccaaagcttgcagattttggcttgtcaaagatttttgaacaggaacgaacacgaatcacacaaagttgtgtaggaacacatggatatctaccaccagaatatatagacaggaaagtaatctcaaataagcttgacatattcagtctgggtgtcatcatcataaagattataagtggacctacaggtacatgaaaaatggaggaataagttacaaacaacaatggatgcagctgcattggagacatattgtgaacaagtagtgagatgcattgaaatggctttaagttgtgtggagaccgatcggcacaaaaggccgagtataggggctattattgatgagctaaataagatggagacaaataccgaccaggtattttcagtggatatatgctcgactccagcacaaacacaaccaccaccccttcctgattctagccacagcacagaagaaacaagcaacacaaagggagttagcagactgggaccgagagagtacgtacagagcacaatgcgggacctggtaattgggataaccaagtcggtggtggagggggtgatcagcaaggcccagtcggtgatggaggaagaaaatatgctacttattagcatgcagcatgacctccacttcatcaccgatgagtttcagatgatctattcattccttagcatcactgatgaggagcgtatcaacaacgcggtagtgaggatctgggtgatgcagacgcgtggtctggcctatgacctggaagactacatggatgccttctcctgcctggacaagaccagaaaatggtggtcccgcttgttccgagcatgcctggcaccaccggggtctccatacatgtcagtgacatctctggccgtggaactcaagcatctaaaggcaagggtcgaggacgttagccacaggaacactcggtataacctcatcagcgacgccggctcaaagcccggcctcgtgaggcaacagccggtgcctcctggtgctgtggcatacgaaaacgacacaagaaggaaacacatcttaggggatctcacccagcttatcaccaacaaggacgatgctgatcttcaattgatttcaatgtggggtgcaggtggaggcaccgggacgacatccatcataaggaagtgctacagtgatccagagatcatccaaaatttcatatgccgagcctgggtcaacctcagccatccattcaacccccatgagtttgtgcggtctttgatggctcacttttatgcaaacagttgccaagaaagacaaggagggatcatcggtgttgatgtcctaactagcatggatgcgactgccacccagggggatctcctcagcgagttcgttcagctagttgacaagaacaggtaccttgttgtcttggaagacctgcccaccatggcagagtgggactctatcaggacgttccttcccgacagaaagaatggcagctggatcatcgtgtcctcgcagaaatatgaaattgcaagtttatgtgtcggacatccctaccaaatattggacctgaagcagtcctcgcccactgagcactccgtatgtgccttcttgagagaggtcacattaaaagaaaaaaaaggaggcaatagaaaagaaaaaatttatgtcggagatgaaagcgaggtgaacaacggtagtacatcaaccaacagcaaggtgatatcaactgagtatgacttaagccataaccataggatggtcgccaactctaaatggaaagaagccagagactggatgcagaattcttcccttgtcggacgcagattgcagatgtatcaaattcatcgctgtatagctgaagcacaaaggaaccattcccatgttatgtctgtttggggaatagttggcgttgggaaatcagctattgtcagaaatttttactgcgacaggatacttgagaatcagcaatttcaagaatacggttgggtggatttatcacactcccaacccttcaatttgaaggacttctcacagaacttgcttacgaattttcaatcagattctcttcaagccaatgaaactacaccctctcgtggtatactggggacagtccgaaaatgttgtgagtttctaagtacacgtcattgcctcgtggtcatagatggccttcagtccaaagaggaatgggatttgatacaatcatcattggtatctagatactctaaatctaatactattatcattgtgataacaactgaagcaagcattgcagcatactgcgcagataaggatgaccttgtgtttaatgtcaaaactttagaaactgatgcagcctttgatctcttcgaaaatgagatatctaagaaggctccgttgtggaccacttcattatgtgatcgaggaaattcagtgacgcaagaacttgtttcaaagtgcggggggctcccaatggtaatagtggctatagctggcatattggctaccaaggtagtctcctggatggacactgcaacatccatcaatttgaggtttatgtttgagctagagatcaatccagacctgcaggatctgtttagctgggtgcattcctgcttccgtacttgtccagatttcatcaagccatgtatcttctacctatcattttttccaagagaccacaacattcgacgaaggcgtctagtaaggcgttggatcgctgagggttactgcagggacagtgatgataaatctgcagaggagaatggggagttcttcttctccaaactcctcggtatgagcataatccaaccggagtccagtgacgcgaggatggtctcgtgtcaaatcaatggatttttccgtgagtgcatcctctcacggtcaggggaaatggaagaccttgtcattgaactggccgacagatgcaacctaaccacccaacgcagtgggcgtcatcttgtcatatcggaaagctgggacagagataagattttattcgagagcatcgacttctcacggctacggtcaatgacagtgtttggaatgtggaaatcattcttcatctccaaaagtatgaagcttnn

SEQ ID NO: 5695 - DNA, 4266 bp, Zea Mays
  misc_feature (4265)..(4266): n is a, c, g, or t
tcgtgcacgaagctcatgcttcagaagagaatcgaggaaagagaaattgatcgacgcacgatgtaccaagctcgtgctttagaaagagtagagagtagagaaaggtgtagagatttgccggtttggtggcggtacgcacgagcaggcgcccggcggcgtacgaaattagctcgggggcgtacaggtcgctctcgtctggctcggggctgggtccgctgccgtggtggccgtccaccgggcgagccgtcgaggtacccaatttctgccatggcgatccgcccggaccaatgctcgattctccatctgaccatcgtcggtaagcctcctgccccactaccgccctccaaagcggcgcgcgcgccaccgccatctccacccacgcccaccttgctgccgcggccgccccgtaccgctaccgcgccctcgatctgaccccacggggcaggatggacaaagggaaatcggtggtggccgagctggtggcgtcgttcagcgatgtccgtgtcacgccgcgccagccgccagaaccccaagccaagagcttcctaccgtcgccctccttcttcaaaaaggactgactggcctgcacgtcttctccagttcagagtttggacactgcttggacttggagtggcatttcaagccagctaaggccaggagaatcaacaacttggcccttgcaagcacggtgcttccaaaacgtgtgccgctccatttattacagaaaataacaaatgatttctctaaggaccgtgaacttggttccggtgcatacggaaaagtttacaagggagtgcataaaaatggcgaaacgatggctgtcaagttgcttcactccatggctggacttgatgataaactttttgaggaggagtttcacaacattgcaagactccaacacaagaatattgtgcgtcttgttggcttttgccatgaaactcaacgccaattcataccgcacgatggaaaaatgatttttgctgatagcaaatatatggccctttgcttcgaatatatgcataatggaagccttgacaagttcattattgatgaaaatagtgtccatgactggtccacacgctatgcaataatcaaggggatctgtgagggcttgaaataccttcacgaggaattgaatcctcctatttatcatttggatttaaaaccagctaatattttgttggatgacaatatgatgccaaagcttgcagattttggcttgtcaaagatttttgaacaggaacgaacacgaatcacacaaagttgtgtaggaacacatggatatctaccaccagaatatatagacaggaaagtaatctcaaataagcttgacatattcagtctgggtgtcatcatcataaagattataagtggacctacaggttacacccagtgtgctgaaatgccttccaaacaatttgttgagcttgtacatgaaaaatggaggaataagttacaaacaacaatggatgcagctgcattggagacatattgtgaacaagtagtgagatgcattgaaatggctttaagttgtgtggagaccgatcggcacaaaaggccgagtataggggctattattgatgagctaaataagatggagacaaataccgaccaggtattttcagtggatatatgctcgactccagcacaaacacaaccaccaccccttcctgattctagccacagcacagaagaaacaagcaacacaaagggagttagcagactgggaccgagagagtacgtacagagcacaatgcgggacctggtaattgggataaccaagtcggtggtggagggggtgatcagcaaggcccagtcggtgatggaggaagaaaatatgctacttattagcatgcagcatgacctccacttcatcaccgatgagtttcagatgatctattcattccttagcatcactgatgaggagcgtatcaacaacgcggtagtgaggatctgggtgatgcagacgcgtggtctggcctatgacctggaagactacatggatgccttctcctgcctggacaagaccagaaaatggtggtcccgcttgttccgagcatgcctggcaccaccggggtctccatacatgtcagtgacatctctggccgtggaactcaagcatctaaaggcaagggtcgaggacgttagccacaggaacactcggtataacctcatcagcgacgccggctcaaagcccggcctcgtgaggcaacagccggtgcctcctggtgctgtggcatacgaaaacgacacaagaaggaaacacatcttaggggatctcacccagcttatcaccaacaaggacgatgctgatcttcaattgatttcaatgtggggtgcaggtggaggcaccgggacgacatccatcataaggaagtgctacagtgatccagagatcatccaaaatttcatatgccgagcctgggtcaacctcagccatccattcaacccccatgagtttgtgcggtctttgatggctcacttttatgcaaacagttgccaagaaagacaaggagggatcatcggtgttgatgtcctaactagcatggatgcgactgccacccagggggatctcctcagcgagttcgttcagctagttgacaagaacaggtaccttgttgtcttggaagacctgcccaccatggcagagtgggactctatcaggacgttccttcccgacagaaagaatggcagctggatcatcgtgtcctcgcagaaatatgaaattgcaagtttatgtgtcggacatccctaccaaatattggacctgaagcagtcctcgcccactgagcactccgtatgtgccttcttgagagaggaggtcacattaaaagaaaaaaaaggaggcaatagaaaagaaaaaatttatgtcggagatgaaagcgaggtgaacaacggtagtacatcaaccaacagcaaggtgatatcaactgagtatgacttaagccataaccataggatggtcgccaactctaaatggaaagaagccagagactggatgcagaattcttcccttgtcggacgcagattgcagatgtatcaaattcatcgctgtatagctgaagcacaaaggaaccattcccatgttatgtctgtttggggaatagttggcgttgggaaatcagctattgtcagaaatttttactgcgacaggatacttgagaatcagcaatttcaagaatacggttgggtggatttatcacactcccaacccttcaatttgaaggacttctcacagaacttgcttacgaattttcaatcagattctcttcaagccaatgaaactacaccctctcgtggtatactggggacagtccgaaaatgttgtgagtttctaagtacacgtcattgcctcgtggtcatagatggccttcagtccaaagaggaatgggatttgatacaatcatcattggtatctagatactctaaatctaatactattatcattgtgataacaactgaagcaagcattgcagcatactgcgcagataaggatgaccttgtgtttaatgtcaaaactttagaaactgatgcagcctttgatctcttcgaaaatgagatatctaagaaggctccgttgtggaccacttcattatgtgatcgaggaaattcagtgacgcaagaacttgtttcaaagtgcggggggctcccaatggtaatagtggctatagctggcatattggctaccaaggtagtctcctggatggacactgcaacatccatcaatttgaggtttatgtttgagctagagatcaatccagacctgcaggatctgtttagctgggtgcattcctgcttccgtacttgtccagatttcatcaagccatgtatcttctacctatcattttttccaagagaccacaacattcgacgaaggcgtctagtaaggcgttggatcgctgagggttactgcagggacagtgatgataaatctgcagaggagaatggggagttcttcttctccaaactcctcggtatgagcataatccaaccggagtccagtgacgcgaggatggtctcgtgtcaaatcaatggatttttccgtgagtgcatcctctcacggtcaggggaaatggaagaccttgtcattgaactggccgacagatgcaacctaaccacccaacgcagtgggcgtcatcttgtcatatcggaaagctgggacagagataagattttattcgagagcatcgacttctcacggctacggtcaatgacagtgtttggaatgtggaaatcattcttcatctccaaaagtatgaagcttnn

SEQ ID NO: 5696 - DNA, 5187 bp, Zea Mays
  misc_feature (5186)..(5187): n is a, c, g, or t
tcgtgcacgaagctcatgcttcagaagagaatcgaggaaagagaaattgatcgacgcacgatgtaccaagctcgtgctttagaaagagtagagagtagagaaaggtgtagagatttgccggtttggtggcggtacgcacgagcaggcgcccggcggcgtacgaaattagctcgggggcgtacaggtcgctctcgtctggctcggggctgggtccgctgccgtggtggccgtccaccgggcgagccgtcgaggtacccaatttctgccatggcgatccgcccggaccaatgctcgattctccatctgaccatcgtcggtaagcctcctgccccactaccgccctccaaagcggcgcgcgcgccaccgccatctccacccacgcccaccttgctgccgcggccgccccgtaccgctaccgcgccctcgatctgaccccacggggcaggatggacaaagggaaatcggtggtggccgagctggtggcgtcgttcagcgatgtccgtgtcacgccgcgccagccgccagaaccccaagccaagagcttcctaccgtcgccctccttctgtaagctccctgccgcctgttcgcttatgttgggtaactggctaggctgactgtgtattggttatggctgcttgaagttttccgtgatttatttcatgtgttggcgtctcctgcaaaacgagagatgcacataattaagaattttctaggatcataaagcagtgatgggtttgattgattaactttagggcatttttcctgattgcccaccaatttccgccatggcaatccgcccggactaatgcccgattctccatctgacgatcctcggtaggtttggtcctgcgtgattcacatgtctcgtcaggttcttgcgggttcttttgtttttttgttgttgtggttcgtcttgtggatttccttgttgcctggtcgagtatttatatttttcatcggcccattcgcgacgattctcttgctgtcgcccggagagaaaatgcttctggcgtcttcctcaccctcccgttctatattgcagaattgagctttttcctgcagagtcttggattttgttgcattatgactttgcgatcatcaatgaacatagacgaaaacatatactccatgacagcgaggatacaacttttcacccaaataaattggtagagtcactcatcaaatatgattatatgtcgtcgcaatacatgaactattttatgctactcatttgactacaaatgcagtgacagctactgcaccccttgttaatttgaaacacgtacgtattatatgtatatatgcatatgaagagcttaacttaggtactacctaacccccccccccccccccccccccacacacacacacacacacccacacaaaaaaaatcttgttaagattgcagttaatttaatccggtcttttgcagtcaaaaaggactgactggcctgcacgtcttctccagttctattttgctgccagttcagagtttggacactgcttggacttggagtggcatttcaagccagctaagggtccagatccaccatccatggctgtgcttccaacgcccaggagaatcaacaacttggcccttgcaagcacggtgcttccaaaacgtgtgccgctccatttattacagaaaataacaaatgatttctctaaggaccgtgaacttggttccggtgcatacggaaaagtttacaagggagtgcataaaaatggcgaaacgatggctgtcaagttgcttcactccatggctggacttgatgataaactttttgaggaggagtttcacaacattgcaagactccaacacaagaatattgtgcgtcttgttggcttttgccatgaaactcaacgccaattcataccgcacgatggaaaaatgatttttgctgatagcaaatatatggccctttgcttcgaatatatgcataatggaagccttgacaagttcattattgatgaaaatagtgtccatgactggtccacacgctatgcaataatcaaggggatctgtgagggcttgaaataccttcacgaggaattgaatcctcctatttatcatttggatttaaaaccagctaatattttgttggatgacaatatgatgccaaagcttgcagattttggcttgtcaaagatttttgaacaggaacgaacacgaatcacacaaagttgtgtaggaacacatggatatctaccaccagaatatatagacaggaaagtaatctcaaataagcttgacatattcagtctgggtgtcatcatcataaagattataagtggacctacaggttacacccagtgtgctgaaatgccttccaaacaatttgttgagcttgtacatgaaaaatggaggaataagttacaaacaacaatggatgcagctgcattggagacatattgtgaacaagtagtgagatgcattgaaatggctttaagttgtgtggagaccgatcggcacaaaaggccgagtataggggctattattgatgagctaaataagatggagacaaataccgaccaggtattttcagtggatatatgctcgactccagcacaaacacaaccaccaccccttcctgattctagccacagcacagaagaaacaagcaacacaaagggagttagcagactgggaccgagagagtacgtacagagcacaatgcgggacctggtaattgggataaccaagtcggtggtggagggggtgatcagcaaggcccagtcggtgatggaggaagaaaatatgctacttattagcatgcagcatgacctccacttcatcaccgatgagtttcagatgatctattcattccttagcatcactgatgaggagcgtatcaacaacgcggtagtgaggatctgggtgatgcagacgcgtggtctggcctatgacctggaagactacatggatgccttctcctgcctggacaagaccagaaaatggtggtcccgcttgttccgagcatgcctggcaccaccggggtctccatacatgtcagtgacatctctggccgtggaactcaagcatctaaaggcaagggtcgaggacgttagccacaggaacactcggtataacctcatcagcgacgccggctcaaagcccggcctcgtgaggcaacagccggtgcctcctggtgctgtggcatacgaaaacgacacaagaaggaaacacatcttaggggatctcacccagcttatcaccaacaaggacgatgctgatcttcaattgatttcaatgtggggtgcaggtggaggcaccgggacgacatccatcataaggaagtgctacagtgatccagagatcatccaaaatttcatatgccgagcctgggtcaacctcagccatccattcaacccccatgagtttgtgcggtctttgatggctcacttttatgcaaacagttgccaagaaagacaaggagggatcatcggtgttgatgtcctaactagcatggatgcgactgccacccagggggatctcctcagcgagttcgttcagctagttgacaagaacaggtaccttgttgtcttggaagacctgcccaccatggcagagtgggactctatcaggacgttccttcccgacagaaagaatggcagctggatcatcgtgtcctcgcagaaatatgaaattgcaagtttatgtgtcggacatccctaccaaatattggacctgaagcagtcctcgcccactgagcactccgtatgtgccttcttgagagaggaggtcacattaaaagaaaaaaaaggaggcaatagaaaagaaaaaatttatgtcggagatgaaagcgaggtgaacaacggtagtacatcaaccaacagcaaggtgatatcaactgagtatgacttaagccataaccataggatggtcgccaactctaaatggaaagaagccagagactggatgcagaattcttcccttgtcggacgcagattgcagatgtatcaaattcatcgctgtatagctgaagcacaaaggaaccattcccatgttatgtctgtttggggaatagttggcgttgggaaatcagctattgtcagaaatttttactgcgacaggatacttgagaatcagcaatttcaagaatacggttgggtggatttatcacactcccaacccttcaatttgaaggacttctcacagaacttgcttacgaattttcaatcagattctcttcaagccaatgaaactacaccctctcgtggtatactggggacagtccgaaaatgttgtgagtttctaagtacacgtcattgcctcgtggtcatagatggccttcagtccaaagaggaatgggatttgatacaatcatcattggtatctagatactctaaatctaatactattatcattgtgataacaactgaagcaagcattgcagcatactgcgcagataaggatgaccttgtgtttaatgtcaaaactttagaaactgatgcagcctttgatctcttcgaaaatgagatatctaagaaggctccgttgtggaccacttcattatgtgatcgaggaaattcagtgacgcaagaacttgtttcaaagtgcggggggctcccaatggtaatagtggctatagctggcatattggctaccaaggtagtctcctggatggacactgcaacatccatcaatttgaggtttatgtttgagctagagatcaatccagacctgcaggatctgtttagctgggtgcattcctgcttccgtacttgtccagatttcatcaagccatgtatcttctacctatcattttttccaagagaccacaacattcgacgaaggcgtctagtaaggcgttggatcgctgagggttactgcagggacagtgatgataaatctgcagaggagaatggggagttcttcttctccaaactcctcggtatgagcataatccaaccggagtccagtgacgcgaggatggtctcgtgtcaaatcaatggatttttccgtgagtgcatcctctcacggtcaggggaaatggaagaccttgtcattgaactggccgacagatgcaacctaaccacccaacgcagtgggcgtcatcttgtcatatcggaaagctgggacagagataagattttattcgagagcatcgacttctcacggctacggtcaatgacagtgtttggaatgtggaaatcattcttcatctccaaaagtatgaagcttnn

SEQ ID NO: 5697 - DNA, 4302 bp, Zea Mays
  misc_feature (4301)..(4302): n is a, c, g, or t
tcgtgcacgaagctcatgcttcagaagagaatcgaggaaagagaaattgatcgacgcacgatgtaccaagctcgtgctttagaaagagtagagagtagagaaaggtgtagagatttgccggtttggtggcggtacgcacgagcaggcgcccggcggcgtacgaaattagctcgggggcgtacaggtcgctctcgtctggctcggggctgggtccgctgccgtggtggccgtccaccgggcgagccgtcgaggtacccaatttctgccatggcgatccgcccggaccaatgctcgattctccatctgaccatcgtcggtaagcctcctgccccactaccgccctccaaagcggcgcgcgcgccaccgccatctccacccacgcccaccttgctgccgcggccgccccgtaccgctaccgcgccctcgatctgaccccacggggcaggatggacaaagggaaatcggtggtggccgagctggtggcgtcgttcagcgatgtccgtgtcacgccgcgccagccgccagaaccccaagccaagagcttcctaccgtcgccctccttcttcaaaaaggactgactggcctgcacgtcttctccagttcagagtttggacactgcttggacttggagtggcatttcaagccagctaagggtccagatccaccatccatggctgtgcttccaacgcccaggagaatcaacaacttggcccttgcaagcacggtgcttccaaaacgtgtgccgctccatttattacagaaaataacaaatgatttctctaaggaccgtgaacttggttccggtgcatacggaaaagtttacaagggagtgcataaaaatggcgaaacgatggctgtcaagttgcttcactccatggctggacttgatgataaactttttgaggaggagtttcacaacattgcaagactccaacacaagaatattgtgcgtcttgttggcttttgccatgaaactcaacgccaattcataccgcacgatggaaaaatgatttttgctgatagcaaatatatggccctttgcttcgaatatatgcataatggaagccttgacaagttcattattgatgaaaatagtgtccatgactggtccacacgctatgcaataatcaaggggatctgtgagggcttgaaataccttcacgaggaattgaatcctcctatttatcatttggatttaaaaccagctaatattttgttggatgacaatatgatgccaaagcttgcagattttggcttgtcaaagatttttgaacaggaacgaacacgaatcacacaaagttgtgtaggaacacatggatatctaccaccagaatatatagacaggaaagtaatctcaaataagcttgacatattcagtctgggtgtcatcatcataaagattataagtggacctacaggttacacccagtgtgctgaaatgccttccaaacaatttgttgagcttgtacatgaaaaatggaggaataagttacaaacaacaatggatgcagctgcattggagacatattgtgaacaagtagtgagatgcattgaaatggctttaagttgtgtggagaccgatcggcacaaaaggccgagtataggggctattattgatgagctaaataagatggagacaaataccgaccaggtattttcagtggatatatgctcgactccagcacaaacacaaccaccaccccttcctgattctagccacagcacagaagaaacaagcaacacaaagggagttagcagactgggaccgagagagtacgtacagagcacaatgcgggacctggtaattgggataaccaagtcggtggtggagggggtgatcagcaaggcccagtcggtgatggaggaagaaaatatgctacttattagcatgcagcatgacctccacttcatcaccgatgagtttcagatgatctattcattccttagcatcactgatgaggagcgtatcaacaacgcggtagtgaggatctgggtgatgcagacgcgtggtctggcctatgacctggaagactacatggatgccttctcctgcctggacaagaccagaaaatggtggtcccgcttgttccgagcatgcctggcaccaccggggtctccatacatgtcagtgacatctctggccgtggaactcaagcatctaaaggcaagggtcgaggacgttagccacaggaacactcggtataacctcatcagcgacgccggctcaaagcccggcctcgtgaggcaacagccggtgcctcctggtgctgtggcatacgaaaacgacacaagaaggaaacacatcttaggggatctcacccagcttatcaccaacaaggacgatgctgatcttcaattgatttcaatgtggggtgcaggtggaggcaccgggacgacatccatcataaggaagtgctacagtgatccagagatcatccaaaatttcatatgccgagcctgggtcaacctcagccatccattcaacccccatgagtttgtgcggtctttgatggctcacttttatgcaaacagttgccaagaaagacaaggagggatcatcggtgttgatgtcctaactagcatggatgcgactgccacccagggggatctcctcagcgagttcgttcagctagttgacaagaacaggtaccttgttgtcttggaagacctgcccaccatggcagagtgggactctatcaggacgttccttcccgacagaaagaatggcagctggatcatcgtgtcctcgcagaaatatgaaattgcaagtttatgtgtcggacatccctaccaaatattggacctgaagcagtcctcgcccactgagcactccgtatgtgccttcttgagagaggaggtcacattaaaagaaaaaaaaggaggcaatagaaaagaaaaaatttatgtcggagatgaaagcgaggtgaacaacggtagtacatcaaccaacagcaaggtgatatcaactgagtatgacttaagccataaccataggatggtcgccaactctaaatggaaagaagccagagactggatgcagaattcttcccttgtcggacgcagattgcagatgtatcaaattcatcgctgtatagctgaagcacaaaggaaccattcccatgttatgtctgtttggggaatagttggcgttgggaaatcagctattgtcagaaatttttactgcgacaggatacttgagaatcagcaatttcaagaatacggttgggtggatttatcacactcccaacccttcaatttgaaggacttctcacagaacttgcttacgaattttcaatcagattctcttcaagccaatgaaactacaccctctcgtggtatactggggacagtccgaaaatgttgtgagtttctaagtacacgtcattgcctcgtggtcatagatggccttcagtccaaagaggaatgggatttgatacaatcatcattggtatctagatactctaaatctaatactattatcattgtgataacaactgaagcaagcattgcagcatactgcgcagataaggatgaccttgtgtttaatgtcaaaactttagaaactgatgcagcctttgatctcttcgaaaatgagatatctaagaaggctccgttgtggaccacttcattatgtgatcgaggaaattcagtgacgcaagaacttgtttcaaagtgcggggggctcccaatggtaatagtggctatagctggcatattggctaccaaggtagtctcctggatggacactgcaacatccatcaatttgaggtttatgtttgagctagagatcaatccagacctgcaggatctgtttagctgggtgcattcctgcttccgtacttgtccagatttcatcaagccatgtatcttctacctatcattttttccaagagaccacaacattcgacgaaggcgtctagtaaggcgttggatcgctgagggttactgcagggacagtgatgataaatctgcagaggagaatggggagttcttcttctccaaactcctcggtatgagcataatccaaccggagtccagtgacgcgaggatggtctcgtgtcaaatcaatggatttttccgtgagtgcatcctctcacggtcaggggaaatggaagaccttgtcattgaactggccgacagatgcaacctaaccacccaacgcagtgggcgtcatcttgtcatatcggaaagctgggacagagataagattttattcgagagcatcgacttctcacggctacggtcaatgacagtgtttggaatgtggaaatcattcttcatctccaaaagtatgaagcttnn

SEQ ID NO: 5698 - DNA, 3946 bp, Zea Mays
  misc_feature (3945)..(3946): n is a, c, g, or t
aagagcttcctaccgtcgccctccttctttctattttgctgccagttcagagtttggacactgcttggacttggagtggcatttcaagccagctaagggtccagatccaccatccatggctgtgcttccaacgcccaggagaatcaacaacttggcccttgcaagcacggtgcttccaaaacgtgtgccgctccatttattacagaaaataacaaatgatttctctaaggaccgtgaacttggttccggtgcatacggaaaagtttacaagggagtgcataaaaatggcgaaacgatggctgtcaagttgcttcactccatggctggacttgatgataaactttttgaggaggagtttcacaacattgcaagactccaacacaagaatattgtgcgtcttgttggcttttgccatgaaactcaacgccaattcataccgcacgatggaaaaatgatttttgctgatagcaaatatatggccctttgcttcgaatatatgcataatggaagccttgacaagttcattattggtattattgcgctcttcttattctcgtatgatcaattgaattcacttgaagtaaccattcttcaaattcacattttgagagactgtttgctccaacagatgaaaatagtgtccatgactggtccacacgctatgcaataatcaaggggatctgtgagggcttgaaataccttcacgaggaattgaatcctcctatttatcatttggatttaaaaccagctaatattttgttggatgacaatatgatgccaaagcttgcagattttggcttgtcaaagatttttgaacaggaacgaacacgaatcacacaaagttgtgtaggaacacagtaagataaactcttatgaattttactcatgcaatgatttttatatttttttcctgtatttcatcatatcagtaacatgtatacatgatgtcttatgcagtggatatctaccaccagaatatatagacaggaaagtaatctcaaataagcttgacatattcagtctgggtgtcatcatcataaagattataagtggacctacaggttacacccagtgtgctgaaatgccttccaaacaatttgttgagcttgtacatgaaaaatggaggaataagttacaaacaacaatggatgcagctgcattggagacatattgtgaacaagtagtgagatgcattgaaatggctttaagttgtgtggagaccgatcggcacaaaaggccgagtataggggctattattgatgagctaaataagatggagacaaataccgaccagggtattttcagtggatatatgctcgactccagcacaaacacaaccaccaccccttcctgattctagccacagcacagaagaaacaagcaacacaaagggagttagcagactgggaccgagagagtacgtacagagcacaatgcgggacctggtaattgggataaccaagtcggtggtggagggggtgatcagcaaggcccagtcggtgatggaggaagaaaatatgctacttattagcatgcagcatgacctccacttcatcaccgatgagtttcagatgatctattcattccttagcatcactgatgaggagcgtatcaacaacgcggtagtgaggatctgggtgatgcagacgcgtggtctggcctatgacctggaagactacatggatgccttctcctgcctggacaagaccagaaaatggtggtcccgcttgttccgagcatgcctggcaccaccggggtctccatacatgtcagtgacatctctggccgtggaactcaagcatctaaaggcaagggtcgaggacgttagccacaggaacactcggtataacctcatcagcgacgccggctcaaagcccggcctcgtgaggcaacagccggtgcctcctggtgctgtggcatacgaaaacgacacaagaaggaaacacatcttaggggatctcacccagcttatcaccaacaaggacgatgctgatcttcaattgatttcaatgtggggtgcaggtggaggcaccgggacgacatccatcataaggaagtgctacagtgatccagagatcatccaaaatttcatatgccgagcctgggtcaacctcagccatccattcaacccccatgagtttgtgcggtctttgatggctcacttttatgcaaacagttgccaagaaagacaaggagggatcatcggtgttgatgtcctaactagcatggatgcgactgccacccagggggatctcctcagcgagttcgttcagctagttgacaagaacaggtaccttgttgtcttggaagacctgcccaccatggcagagtgggactctatcaggacgttccttcccgacagaaagaatggcagctggatcatcgtgtcctcgcagaaatatgaaattgcaagtttatgtgtcggacatccctaccaaatattggacctgaagcagtcctcgcccactgagcactccgtatgtgccttcttgagagaggaggtcacattaaaagaaaaaaaaggaggcaatagaaaagaaaaaatttatgtcggagatgaaagcgaggtgaacaacggtagtacatcaaccaacagcaaggtgatatcaactgagtatgacttaagccataaccataggatggtcgccaactctaaatggaaagaagccagagactggatgcagaattcttcccttgtcggacgcagattgcagatgtatcaaattcatcgctgtatagctgaagcacaaaggaaccattcccatgttatgtctgtttggggaatagttggcgttgggaaatcagctattgtcagaaatttttactgcgacaggatacttgagaatcagcaatttcaagaatacggttgggtggatttatcacactcccaacccttcaatttgaaggacttctcacagaacttgcttacgaattttcaatcagattctcttcaagccaatgaaactacaccctctcgtggtatactggggacagtccgaaaatgttgtgagtttctaagtacacgtcattgcctcgtggtcatagatggccttcagtccaaagaggaatgggatttgatacaatcatcattggtatctagatactctaaatctaatactattatcattgtgataacaactgaagcaagcattgcagcatactgcgcagataaggatgaccttgtgtttaatgtcaaaactttagaaactgatgcagcctttgatctcttcgaaaatgagatatctaagaaggctccgttgtggaccacttcattatgtgatcgaggaaattcagtgacgcaagaacttgtttcaaagtgcggggggctcccaatggtaatagtggctatagctggcatattggctaccaaggtagtctcctggatggacactgcaacatccatcaatttgaggtttatgtttgagctagagatcaatccagacctgcaggatctgtttagctgggtgcattcctgcttccgtacttgtccagatttcatcaagccatgtatcttctacctatcattttttccaagagaccacaacattcgacgaaggcgtctagtaaggcgttggatcgctgagggttactgcagggacagtgatgataaatctgcagaggagaatggggagttcttcttctccaaactcctcggtatgagcataatccaaccggagtccagtgacgcgaggatggtctcgtgtcaaatcaatggatttttccgtgagtgcatcctctcacggtcaggggaaatggaagaccttgtcattgaactggccgacagatgcaacctaaccacccaacgcagtgggcgtcatcttgtcatatcggaaagctgggacagagataagattttattcgagagcatcgacttctcacggctacggtcaatgacagtgtttggaatgtggaaatcattcttcatctccaaaagtatgaagcttnn

SEQ ID NO: 5699 - DNA, 2525 bp, Zea Mays
caaaacaatctaacattgacataacatagaatactacactatacaacagcttaaactcgctctaaattctcaccttaatcttcgagtttaatttttcatcaaagctccttacatcttacttcggatgatccttagcaagatttccggtcgcaggagttgtggacaaaaatgtttcaagacttatgatgccaccagaaaatggtcatcctcacgtaggccaagatcgatatttggtccatcacgaaaaagaagcgtacaaaacgcagagacagacggaagaaaacgaggtatttcaccccttcatgtacaaagtacaaactgcgtgcaacaacggagctttgaccaatcgtgtcgctcgcatgtcacccacccactagctagcaacattagcatacaagtatcagtgtcaccgttctcacagcttgcaccggagcccaaagctgcgcagcagcttgctcaggcatctcttggcccgtgactcgcggcgtatgggcccgccgcgcccgcgcgtctctgcgccgctgccggagaagatcgcccggaggcgaccgaagtgcgtgcttctcccctcgtacgccaccgcatccgggttctcctgaaaccgccgcggaaatcaagatcgttactaagagaagaagaccatatccgggtgaattggtgatccgcgcggcgcgtgtgatcaacgggcagcagctgtccgcacgaaccagcacatagcgcttccactcggtctccttggcgacgacgacatggcggcgcgcgtcgtaggtgaagcgggggtggtccttgatccggctgacggcgtcgaactcgcgccggagctcgcccagccgccgctgcagatcctcgacggggaatgcggaccccgtggccgcgttgagctcggcgcggatggcagaccagtcgtccgcggtgaggtcgcccacgcccacgccgcagccgcgcgtgcgccgctgcagcaggtccaggaacttggcgtcgtgctgggccgtccacacgtccacgtgcagccgcgacaggatcttgcggagcgaccgccgcgacaccggcggcctcgtcgtcgtggccttgaccacggcctcctcgtggccgtggccgtcgccgtcttcgaagcgcatcatcggctgctggtcaatcatcagtagttggctaacggtcctgactggctgcgtttgcacgttacgcatctcctgctcctgccttccatgtcgacggaatggttagttggtgacgcaagcgtgtgtgtacccagactaatggacggcgagtccgagagcacgtactgcgactgcgaggcgtcgtcggcgcggaggcggaggctgacgaagacgacggagccgtggcgcacgccgtagtgcgcgacgggcatgccgtcgtcgtcgaggtgtcggccggcgaagaagagccgctggtcgccggcggctacgccctcgcgggccatgatcatggacttgagctgcgccaccgtgttggcgccgtcgacgtccagcgccacccggtccccgcggagcgtacgcgccatgatcctcatcgtcgtcgccgcaggaggagccggcccgcctctcgactcgaggcggctagtatctgtagctctgtcgtcggcgcacggcgcggcactcatgagcccgacaggagagtgaattgaggctccgggaggaggaagaaaataaaggatcgagcagaagataatggggacagatcggagatccggaggcggatgggacgcgcatggacgagcacgacggggctttggctggcacagccaggcgtgcatgatggttgcgcgggaataaagctagctgttggatgaggcggcgacgtgaagaaacgaattttcttccgctgtccgctgcagcgccgactcgcctccgtctatctgtacttgcttcgaacagaatctgattctccggagcaaacggggctagaaaaagtgtcagggactggcccatgctgctgcagttggtgcttcagcaggagagctgggccggcccacgtaaatctgtacgagatcttatccaaaaacagctccgctccccctctccccgcgtgcccacgtcttcgtcggggccgtcgccggcgacgagttggcaagacatgacattggcgcttgatcaaaagcgatggaagaaagctattgagaaaaagcaacagcgagcttaagctcattattctttcctgccccttgggccccagttggatgagcatgtgtctggtcatcaatgtggcgcatgaagtttcagagttttctatctctatacacataatgtattgactgaggttctacttttggtttccctgtgtagcgttagagcactgtgaaaacgaatgaattatgttaaactgcccccattttttatgtttgctacatcccggatcctcacatgacattcagaatgattcatctgttcttgaaatctttattatcccttttaacatgctactccatccgttccaaactatagttctttctggcttttgtagatacgtagcttttgctacacattttgatatatatagcttttagt

SEQ ID NO: 5700 - DNA, 2593 bp, Zea Mays
ttcctgctagtttgcgctggccgctggcttatagttagtgctcgcttctagaacgcgtccagaattcgtggactcgcccccgctccgccccagctcacacgccaagtcccagtacaaagcctacggaatttccccccacctccaattcgagttgtccgcttccagtcagtcgccgccgtcgccgctgaaaccgaaacttgaaaaaccagctcgccgggggtccggccgatttaccccaaatttcgctgctgctgctgctgataggaggccgcggcgaccaccatgggcaactgctgcgccacgccgtcgacgacggaggagagcggcaagagccgccagaagaagccgaagcagaaggcgaacccctacaacgtggcgtacaaccgcggggcggcgccggcggcggcgcgcccgggcctggtggtgctgcgggacccgacggggcgggacctcggcgcgcagtacgagctgggcggcgagctgggccgcggcgagttcggcgtcacgtacctgtgcacggagtccgccacgggggcgcgctacgcgtgcaagtccatctccaagcgcaagctgcgcacgcccgtggacgtggaggacgtgcgccgggaggtggacatcatgcgccacatgccgccgcaccccaacatcgtcagcctccgcgccgcctacgaggacgaggacgccgtgcacctcgtcatggagctctgcgagggaggcgagctcttcgacaggatcgtcgcccggggccactacaccgagcgtgccgccgccgccgtcacgcgcacaatcgtcgaggtcgtccagatgtgccacaggcatggcgtcatgcaccgggatcttaaaccagagaactttttatatgcaagcaagaaggagagttcccctctgaaagcaatcgattttgggctgtcagtgttcttcaggcctggtgagcgatttactgaaatcgtaggcagcccatactacatggctccagaggttctaaagcgaaactatggccctgaagttgatgtttggagtgctggagtgatactttacatacttctctgtggtgtaccaccattttgggcagaaactgaacagggagtagcacaggcaattatacgatctgtggtagatttcaaaagagaaccatggcccagagtatctgagcctgctaaagatcttgtcaggcggatgctggacccaaatccattgacacggtttactgcagcacaagtacttgacatttctcttggtgatactgtccgagcaagactgcaacaatttgctgcgatgaacaagttaaagaagaaagcattaagggtgattgccgagcatctgtcagtggaggaagtagctgacataaagcaaatgtttgaaaagatggacgtgagcaagaatggcaagctaacattcgaggaattcaaggcgggccttcgtaaactggggaaccaaatgcctgattcagatcttcagataatgatggatgccgctgacatcgataaaaacgggaccctagattacgaggaattcgtgaccgtgtctgttcatgtgagaaaaataggcaacgatgagcacatccaaaaggccttcacatacttcgaccggaacaagagcgggtacatagagatcgaagagcttagagaggcactggctgatgaactggagggaaccgatgaagacatcatcaatggcatcatccgagacgtggacacggataaggacgggaaaataagctacgacgagttcgcggcgatgatgaaggccggcactgactggaggaaggcatcacggcagtactcgaggcagcggttcagcaacctgagcctgaagcttcagaaggacgggtccctcggcgccgagacacggtaggcgggggccggccaccgcctaccgccacccgacggagaagtgatccgagtgttcgtcgagctgtagtcaggtgattcgattccacgcacgttccaattttacacggtgaatcttcagtcgagcttgtagttcttgggtttgtgattgtaaagatggtggttgtgcccgtacgtactgtagatgcagcagcgtgtacctacacaatttacagagaaaatgcatgctggagtagcacaagtagtcttgctttgtagtaacttgtaattagaatttgtttgtatgatatgcgatattatgatggttgtcggcggcacagctccgtgaatgcctacaagtaggggtgacaatgggctctaaattttacactataaaatttaaggatcggatcgagttaggatcgggctctatttccattcattttttaactaaaatttatttagggccctgtcaatttgtgaagaagcatttggatcgcgatccattaccagcccggctacgagaagatgctgttgctgacgcagtgctgctgatggcttgccggcgctgcttgaacttgctttggcaccagcctgtatgtagggcaaacacaagaagatgctggcacggtgcggttgtccgttgcctgcagtgccgggagccacttcaattcgccggcaacggcaacagaatcggcgattgtgcagtctcaaatccgtggttttgttttccagggcaaccgaataaaagcataaatacctcc

SEQ ID NO: 5701 - DNA, 1334 bp, Zea Mays
gccgccgcgggggcgccgtgcgggacgccagtgccgttccccgtgtcattccaccccgcgtactacgcgacgcacgcgtcaatggccacgagtgtgccctacccgactcccgagccggtggcggtggcggaagcgaagatcaagaggaagagctctggcgccctctctggcggttgcacttccggaagtgccggtgggagcgagggctcatcagataaaagagatgctacccatcataaggtattaccttctgtaaggaggagaaagtccagcggcgccaatgtacaaggtgagccatcgcaggctgcgacagctcaacatgctgcagctgagtcacgagtcacagcaaaaaagaggcccgcaacagaactctcggtttcgacacctgagatagctggaacctccaatgtcattgtcaggccgaacttgaacattgggatggacctttggactgattctccagttaaagcagagacctctggacagggtgaaataaatgctgcgacgcattcccatcatggcagcactttgtcgatgatggtatggctatcttacataagggagtatatagtggcaattgtcgctaacaaatagcatttgcattgcatctccaactcagataacatgctgtcttctggcaggatgagcgagaactgaaaagggagagaagaaagcaatctaacagagagtcagctaggagatcaaggctacgcaagcagaatgtgaggaactagcgcagaaggtaactgacctgaccgtcgtcaacggcacgctcagatcagaactcgacgagcttaagaaggcctgtgaagacatggaagcagagaattcacagctaattggtgaactggagcagtccgaggcgcctagcgttgtgacgactctgagcatccagattgacacaacgaaggcgcatcatagaagcagtgaccagcatggtaataaaaacaacactggtagcaatgggtagtggtagttttggagtgtggcatccgtgagctaggctttttacctctaggtgaggcagaaagatgagatgaggtggttaatatttagctgcaccatcgcccatcgtcatcagtccttgttgttctccttggaacatcatctgtgccttctctttacctgctcacaagcaatctgataccaacagagtctacggcctgtgtatattagccatgtatgatgtgtatgcgagatgtgggcgaacgaactgctttgtaattatcagactaccagttgtgggcttgtgcctgcctgtacagcaatggttgaaaacgattgacagaaactagttcatttggtagcaataaaggtaccatatcagttatatt

SEQ ID NO: 5702 - DNA, 1338 bp, Zea Mays
gccgccgcgggggcgccgtgcgggacgccagtgccgttccccgtgtcattccaccccgcgtactacgcgacgcacgcgtcaatggccacgagtgtgccctacccgactcccgagccggtggcggtggcggaagcgaagatcaagaggaagagctctggcgccctctctggcggttgcacttccggaagtgccggtgggagcgagggctcatcagataaaagagatgctacccatcataaggtattaccttctgtaaggaggagaaagtccagcggcgccaatgtacaaggtgagccatcgcaggctgcgacagctcaacatgctgcagctgagtcacgagtcacagcaaaaaagaggcccgcaacagaactctcggtttcgacacctgagatagctggaacctccaatgtcattgtcaggccgaacttgaacattgggatggacctttggactgattctccagttaaagcagagacctctggacagggtgaaataaatgctgcgacgcattcccatcatggcagcactttgtcgatgatggtatggctatcttacataagggagtatatagtggcaattgtcgctaacaaatagcatttgcattgcatctccaactcagataacatgctgtcttctggcaggatgagcgagaactgaaaagggagagaagaaagcaatctaacagagagtcagctaggagatcaaggctacgcaagcagcaagaatgtgaggaactagcgcagaaggtaactgacctgaccgtcgtcaacggcacgctcagatcagaactcgacgagcttaagaaggcctgtgaagacatggaagcagagaattcacagctaattggtgaactggagcagtccgaggcgcctagcgttgtgacgactctgagcatccagattgacacaacgaaggcgcatcatagaagcagtgaccagcatggtaataaaaacaacactggtagcaatgggtagtggtagttttggagtgtggcatccgtgagctaggctttttacctctaggtgaggcagaaagatgagatgaggtggttaatatttagctgcaccatcgcccatcgtcatcagtccttgttgttctccttggaacatcatctgtgccttctctttacctgctcacaagcaatctgataccaacagagtctacggcctgtgtatattagccatgtatgatgtgtatgcgagatgtgggcgaacgaactgctttgtaattatcagactaccagttgtgggcttgtgcctgcctgtacagcaatggttgaaaacgattgacagaaactagttcatttggtagcaataaaggtaccatatcagttatatt

SEQ ID NO: 5703 - DNA, 1363 bp, Zea Mays
agcagcagcagcacacccaaaggaaataaacacgcaacgcaacccttaaaaaacgagtgtcacaatcagaagacggagcagcctcaaatcacacgaaacaaacaaataaaatcccctcttcctcgtttcaatctcgttctgtcacctgttttatatttgtcgcctcgcctcctccccttccccaaccgcaacaaatcaaaacgagccgcaatcgcagcgcagaggcaaagccgtccatctctctcaacgccgccgccgccgccccgccccgccccagaccctaccctccacctccagtccctcgtcccagcgcgaccgattctcctcgatccagcactgatccggcggcttcccggcccggccatggatttgctggcgtccttggccgccgaggagcggtggctgttcccgttgttcctcgccatgtacgccgccatctactgcgtgggccagctcctcgtgttccggcggtgggcgccgcggcagcggctggacggcgccagctgcctgatctcgctcttccacggcacccccgcggcgctggccgccgcgggggccatcctcgcgctgcccgcggggtcccggtccttcgccgcgcccaacgcgcgcctccaggaccacgtcctcgactacagcgtcgcctacttcaccatggacctgctccactacctcgccttcctgcccggggacgtgctcttcatcgcgcaccacctggccacgctcttcgtcttcctcacctgccgctacctcgtccggcacggcgcatacgcgctcctcgtcctcctcctcctcgccgaggtcaccagcctgctgcagaacgtctggacgctcgcggggatctggcgggaccagtcccccgccgccgcgcgcgtctacggtgccctctcgccgcccttctacgcgctctacacgctcgtcaggggcgtcgccggcccgctcttcctcctcaagatggccgccttctacctgtccggccaggccgtcgacgtcatcccgtggtgggtgcggatctcctggatcctcgttgtcggcaccgccattgccgtcagcaacctgtggatttggaacctctggaaggagctcgtcagggaatggaagcaagccccttccaagtcaaagaaagacacataggctgccacctcattctaaccacagtaccataccatgtacgggtgtacgaaccatatgtagcttcttaatctttccaaatacatccgagccagatgatgcagactgatgatatgctaaaagccaatttcggatgacaattggtggaggatgcttatctgcaggaaatgcatatgctctaatgaaagggaggcccccaccaccaccattgttaagcttgacatgttttctgttc

SEQ ID NO: 5704 - DNA, 629 bp, Zea Mays
tttgcttcggattcggttcccctcgattcctctcccgttgattgcctcacctgggtccggggtcaccggccggcgggggttgattaggtcggcggttatggggaaaggggcgaggaggcgcagccgtgcgtctggcgccgacgggggtggacgcgggagcaagcgcccgtggcgggccgaggaggaggaacaggaggaagaggaaatggaaccgctggtgggggaggactattgcttcggctgcaaggacggcgatgacctccgcgtctgcgatttcaggtttagggaccgtgtggaatgcagcaattttattggaactggaagcggttcaatttcacatggcgaaaaaccctcgcaacaggaagaaaaatcccgcattccaaacaggtcttcaaaactcaggaggtcctcgcgacgttcctgatcccgtcgtcagtggcggtgctctggcctctggtgtttggctgttcgcgcggtgccctctggtgttggcaattggcatacgatgcatctggattctggcctatgggcatctggcggactggctgggcggcacttgcagctgccagctggttgggccttctcgtgtaagcaaagtagcaacaatagctaatggccatgggctttaa

SEQ ID NO: 5705 - DNA, 2679 bp, Zea Mays
aacgtgttggttatttaccccgtttaccactgagtcctccgcaagccattcttcccgacatggcgatacccacggccacgcacgcgtcagagatgaggacgacgacaatcaggatgagggtttgagcacggacgaccccctctccatcgtccgctctaatttcttcctcccccgtcagcaacccttgtagtctctgctaccgtcagcccgtacgcgatcaaagccccgctgcactgcggccaaccgtttctggcaccggcaccggcaccggatccgccgccttcgtcgtccaggatggcgatgatgagccggacgcgggatctgctgatggaggggttcgaggggctggtgcgggatgggtcgttcaagtggggcctcccccgccgcggggacacggccatggacgacggcggcgacgacgacggctccctctccgtgcagcgctcctccatcgctggcctttccttcaaggccaacgccgtcgtcgcccgctgctcccgaatccttggcgtttctaccaatgatctacaaaataactttgataagcaagcatctgattccataaagcagccaaaaagctacgcaagaaattttttggagtactgctgcttcctggcacttgctcagatatcacaagtgacagggtatcttgctgacaagagctttcgccgcttgtcttttgacatgatgttagcttgggaggttccctattcttcaagccagctcactgttaaggctgaggtagatagcacagttagctcagaagcttttacaagaatagcacctgccatcccaaccattgctgatgtagtaacttgtgcaaatctctttgatgtactttcatgttcgagcggaggccgtctttcattttctgtatatgagaagtacctttcagaattggacagagcggttaaaaagatgaagacacaatctgagtcatcacttctatcaaactttcggtctcagagaggagaaaggattctggaagttgatggtacattgacaacacaaccagtacttgaacatgtgggtatttcaacgtggccaggaagattaatactcacagatcatgccctttactttgaagctcttcgggttgttacctatgataagcccaaagtttatgagcttgcagaagatttaaagcaggttgttaaacctgagctgactggtccatgggggtcacgtctctttgacaaagccgttatgtacaaatcaacaaccttaacctgtgatcatagaatttccggagttagctggccattctcgccgagattattggctggccattatatcagaagtactttatgcccatagatttgttaggaagtttgatataagcggaattgacaaagaggaaacaattctgaaagcagtacttggtattatgaggttacaagccattgaagagttacattttgaagttccaaatcgttatgaatctcttttgttgttcagccaatgtgacaaacttcctggaggtgatgttatacttgaaacattagccagttctatagcatcaagaacttcagatcgaactaaccaacctggcacaagtagaggaatgcatgctgtcctgtcaaacctgggcatggtatcaccagttaatagtggtgagcgtttgtttgttggtgagattgttgttggggaaattagtgccttgcagaaggctgttactgattcaatgaacaactataagaaagttgaactggcccaagcgtcggttgatggagtcaaagttgatggtcttgatacaaacttagcagtaatgaaggaattgttatccccggtaagtgagctttggagggttttgctattgctcacatcatgggacgagcctatgaagtccatgttgttttgcttcctattctcttatattatcatcagggggtgggtaatctattttattgtcacggtactattgttttcagcaacttttatgtttctcacaagattaactaatcaaggaaagcaaatgagtgaggtaaaggtggtatccccacctccactgaacacaatggagcagctcctagctgttcaaaatgccatttctaaaattgaggagcttgtccaagatgcaaatattgttcttctgaagataagagctctattgttggcttttccatcccaggcgacggacagggctattctggcattggtactgatggccctgagccttgccatcgttcccacaaaagtgcttctgctgctggtgtttctggaggtatccacgaacaactcaccactacgaagagcaagcacagaaaggtgtaccagaaggttgagagagtggtggttcagcatacctgcagctccagtggtggtggagaaagagaaagaggacaagaaaactagatgatacatccaatgtaatctttatgttgcttggctgatacgttgtgtaacgtatcagccaatgcccacctttgtacaaagaccgcaatatcaacaacgaggggcagtttcaatgaagatttcatctcacttgtaccacctgccctgtttacatggctcttgatgctttgttgcaagttgactagagctgaggccggtgtcaatcgccgctaataacacaaatccctttctctgggttggacatatcgccgtgcggacctgcgccccttcgtttgtaacatgaacagtattgattcttcgatattatgggattgcttctctaat

SEQ ID NO: 5706 - DNA, 2623 bp, Zea Mays
aacgtgttggttatttaccccgtttaccactgagtcctccgcaagccattcttcccgacatggcgatacccacggccacgcacgcgtcagagatgaggacgacgacaatcaggatgagggtttgagcacggacgaccccctctccatcgtccgctctaatttcttcctcccccgtcagcaacccttgtagtctctgctaccgtcagcccgtacgcgatcaaagccccgctgcactgcggccaaccgtttctggcaccggcaccggcaccggatccgccgccttcgtcgtccaggatggcgatgatgagccggacgcgggatctgctgatggaggggttcgaggggctggtgcgggatgggtcgttcaagtggggcctcccccgccgcggggacacggccatggacgacggcggcgacgacgacggctccctctccgtgcagcgctcctccatcgctggcctttccttcaaggccaacgccgtcgtcgcccgctgctcccgaatccttggcgtttctaccaatgatctacaaaataactttgataagcaagcatctgattccataaagcagccaaaaagctacgcaagaaattttttggagtactgctgcttcctggcacttgctcagatatcacaagtgacagggtatcttgctgacaagagctttcgccgcttgtcttttgacatgatgttagcttgggaggttccctattcttcaagccagctcactgttaaggctgaggtagatagcacagttagctcagaagcttttacaagaatagcacctgccatcccaaccattgctgatgtagtaacttgtgcaaatctctttgatgtactttcatgttcgagcggaggccgtctttcattttctgtatatgagaagtacctttcagaattggacagagaggagaaaggattctggaagttgatggtacattgacaacacaaccagtacttgaacatgtgggtatttcaacgtggccaggaagattaatactcacagatcatgccctttactttgaagctcttcgggttgttacctatgataagcccaaagtttatgagcttgcagaagatttaaagcaggttgttaaacctgagctgactggtccatgggggtcacgtctctttgacaaagccgttatgtacaaatcaacaaccttaacagaacctgtgatcatagaatttccggagttagctggccattctcgccgagattattggctggccattatatcagaagtactttatgcccatagatttgttaggaagtttgatataagcggaattgacaaagaggaaacaattctgaaagcagtacttggtattatgaggttacaagccattgaagagttacattttgaagttccaaatcgttatgaatctcttttgttgttcagccaatgtgacaaacttcctggaggtgatgttatacttgaaacattagccagttctatagcatcaagaacttcagatcgaactaaccaacctggcacaagtagaggaatgcatgctgtcctgtcaaacctgggcatggtatcaccagttaatagtggtgagcgtttgtttgttggtgagattgttgttggggaaattagtgccttgcagaaggctgttactgattcaatgaacaactataagaaagttgaactggcccaagcgtcggttgatggagtcaaagttgatggtcttgatacaaacttagcagtaatgaaggaattgttatccccggtaagtgagctttggagggttttgctattgctcacatcatgggacgagcctatgaagtccatgttgttttgcttcctattctcttatattatcatcagggggtgggtaatctattttattgtcacggtactattgttttcagcaacttttatgtttctcacaagattaactaatcaaggaaagcaaatgagtgaggtaaaggtggtatccccacctccactgaacacaatggagcagctcctagctgttcaaaatgccatttctaaaattgaggagcttgtccaagatgcaaatattgttcttctgaagataagagctctattgttggcttttccatcccaggcgacggacagggctattctggcattggtactgatggccctgagccttgccatcgttcccacaaaagtgcttctgctgctggtgtttctggaggtatccacgaacaactcaccactacgaagagcaagcacagaaaggtgtaccagaaggttgagagagtggtggttcagcatacctgcagctccagtggtggtggagaaagagaaagaggacaagaaaactagatgatacatccaatgtaatctttatgttgcttggctgatacgttgtgtaacgtatcagccaatgcccacctttgtacaaagaccgcaatatcaacaacgaggggcagtttcaatgaagatttcatctcacttgtaccacctgccctgtttacatggctcttgatgctttgttgcaagttgactagagctgaggccggtgtcaatcgccgctaataacacaaatccctttctctgggttggacatatcgccgtgcggacctgcgccccttcgtttgtaacatgaacagtattgattcttcgatattatgggattgcttctctaat

SEQ ID NO: 5707 - DNA, 1838 bp, Zea Mays
agcaaagttgtgcctgtacctgggtaagaacgcttgttagttactaatgtgaagtcgtcatgagagcggttaaaaagatgaagacacaatctgagtcatcacttctatcaaactttcggtctcagagaggagaaaggattctggaagttgatggtacattgacaacacaaccagtacttgaacatgtgggtatttcaacgtggccaggaagattaatactcacagatcatgccctttactttgaagctcttcgggttgttacctatgataagcccaaagtttatgagcttgcagaagatttaaagcaggttgttaaacctgagctgactggtccatgggggtcacgtctctttgacaaagccgttatgtacaaatcaacaaccttaacctgtgatcatagaatttccggagttagctggccattctcgccgagattattggctggccattatatcagaagtactttatgcccatagatttgttaggaagtttgatataagcggaattgacaaagaggaaacaattctgaaagcagtacttggtattatgaggttacaagccattgaagagttacattttgaagttccaaatcgttatgaatctcttttgttgttcagccaatgtgacaaacttcctggaggtgatgttatacttgaaacattagccagttctatagcatcaagaacttcagatcgaactaaccaacctggcacaagtagaggaatgcatgctgtcctgtcaaacctgggcatggtatcaccagttaatagtggtgagcgtttgtttgttggtgagattgttgttggggaaattagtgccttgcagaaggctgttactgattcaatgaacaactataagaaagttgaactggcccaagcgtcggttgatggagtcaaagttgatggtcttgatacaaacttagcagtaatgaaggaattgttatccccggtaagtgagctttggagggttttgctattgctcacatcatgggacgagcctatgaagtccatgttgttttgcttcctattctcttatattatcatcagggggtgggtaatctattttattgtcacggtactattgttttcagcaacttttatgtttctcacaagattaactaatcaaggaaagcaaatgagtgaggtaaaggtggtatccccacctccactgaacacaatggagcagctcctagctgttcaaaatgccatttctaaaattgaggagcttgtccaagatgcaaatattgttcttctgaagataagagctctattgttggcttttccatcccaggcgacggacagggctattctggcattggtactgatggccctgagccttgccatcgttcccacaaaagtgcttctgctgctggtgtttctggaggtatccacgaacaactcaccactacgaagagcaagcacagaaaggtgtaccagaaggttgagagagtggtggttcagcatacctgcagctccagtggtggtggagaaagagaaagaggacaagaaaactagatgatacatccaatgtaatctttatgttgcttggctgatacgttgtgtaacgtatcagccaatgcccacctttgtacaaagaccgcaatatcaacaacgaggggcagtttcaatgaagatttcatctcacttgtaccacctgccctgtttacatggctcttgatgctttgttgcaagttgactagagctgaggccggtgtcaatcgccgctaataacacaaatccctttctctgggttggacatatcgccgtgcggacctgcgccccttcgtttgtaacatgaacagtattgattcttcgatattatgggattgcttctctaat

SEQ ID NO: 5708 - DNA, 373 bp, Zea Mays
ggcatacacgctaattgcactcaagaccaaatcacccacaacaagcttgactaaggcaatcctatctacttgcctcctcacatccaccacaccgttcttgagactcttatcaatcaaaagtcctctatttctatttgcagttgtccctgtgtaccaaagcttgaagtcggtattgtccacctccttcgtcttctaacccttccggttagtctcttggacgcataagatatttacacgccttatagtcattgtctcaactaactcccttaacttacctgtaagcgaccctacattccaactacctaaatggattctagttggttcgactagcttccttacccttcgcacccatcggtgatgtgaagacccttgc

SEQ ID NO: 5709 - DNA, 958 bp, Zea Mays
ccggcctctgtttcacgaccccttgcctacaggtagcggcggctagggttctgtcgttctccagcaaatctgccgccctccagccaccgtgccgccctccagccactttttcgccctctagccatcaacctcagggagtcagccagtgtcggcgccatcctcaacacccgccagtggtgtgtcttcgtctatttgcgatggaagcaaacagaacaggctcatgcactagcaccatgcacaagagtgctgatcagaatgaagagaacacagccctagtatatgaattgttcgccgaacaagcgaaggcgcataatcgttatggcacccacttgaataaaatagggtacaaaaatgtgatggacaaattcaaagaaaataccaggttgtcctataccaaaatgcagttcaagaacaaatgggacaatatgaggattgagtacacaaactggaaaagattatcgagataaaccgggttaggatgggacaccgctaaaaacatggagtgcgacgaatgaaaggtggaagaacctgaataagcaatacaaaggaattgttaagtttaaagatgggcctctcttgcacgaggaagaaaacaccatcatgtatgaagatgttaggaacacaggagatgatcattgggctccatctagttgtactacaccgcacattgtggatggtgaaaccagattatatccctactattccagcccgtaataggcgacatgtccctcaatgcatcagacacatctaccatagggtcaagtggcatgaacatgaataggtttcgtgatgtagcgaaggcactttgggagtcaaagtaattagaaaatgtggttcgtgtcataatttggggagagtgccatgctagttttatgcattttatggattgaacatttgagaccattttatgtactaatataatgggaatattatatggtattatttcataaatttgttc

SEQ ID NO: 5710 - DNA, 973 bp, Zea Mays
ccggcctctgtttcacgaccccttgcctacaggtagcggcggctagggttctgtcgttctccagcaaatctgccgccctccagccaccgtgccgccctccagccactttttcgccctctagccatcaacctcagggagtcagccagtgtcggcgccatcctcaacacccgccagtggtgtgtcttcgtctatttgcgatggaagcaaacagaacaggctcatgcactagcaccatgcacaagagcattatgggtgatagtgctgatcagaatgaagagaacacagccctagtatatgaattgttcgccgaacaagcgaaggcgcataatcgttatggcacccacttgaataaaatagggtacaaaaatgtgatggacaaattcaaagaaaataccaggttgtcctataccaaaatgcagttcaagaacaaatgggacaatatgaggattgagtacacaaactggaaaagattatcgagataaaccgggttaggatgggacaccgctaaaaacatggagtgcgacgaatgaaaggtggaagaacctgaataagcaatacaaaggaattgttaagtttaaagatgggcctctcttgcacgaggaagaaaacaccatcatgtatgaagatgttaggaacacaggagatgatcattgggctccatctagttgtactacaccgcacattgtggatggtgaaaccagattatatccctactattccagcccgtaataggcgacatgtccctcaatgcatcagacacatctaccatagggtcaagtggcatgaacatgaataggtttcgtgatgtagcgaaggcactttgggagtcaaagtaattagaaaatgtggttcgtgtcataatttggggagagtgccatgctagttttatgcattttatggattgaacatttgagaccattttatgtactaatataatgggaatattatatggtattatttcataaatttgttc

SEQ ID NO: 5711 - DNA, 933 bp, Zea Mays
gtttcacgaccccttgcctacaggtagcggcggctagggttctgtcgttctccagcaaatctgccgccctccagccaccgtgccgccctccagccactttttcgccctctagccatcaacctcagggagtcagccagtgtcggcgccatcctcaacacccgccagtgttgcgatggaagcaaacagaacaggctcatgcactagcaccatgcacaagagtgctgatcagaatgaagagaacacagccctagtatatgaattgttcgccgaacaagcgaaggcgcataatcgttatggcacccacttgaataaaatagggtacaaaaatgtgatggacaaattcaaagaaaataccaggttgtcctataccaaaatgcagttcaagaacaaatgggacaatatgaggattgagtacacaaactggaaaagattatcgagataaaccgggttaggatgggacaccgctaaaaacatggagtgcgacgaatgaaaggtggaagaacctgaataagcaatacaaaggaattgttaagtttaaagatgggcctctcttgcacgaggaagaaaacaccatcatgtatgaagatgttaggaacacaggagatgatcattgggctccatctagttgtactacaccgcacattgtggatggtgaaaccagattatatccctactattccagcccgtaataggcgacatgtccctcaatgcatcagacacatctaccatagggtcaagtggcatgaacatgaataggtttcgtgatgtagcgaaggcactttgggagtcaaagtaattagaaaatgtggttcgtgtcataatttggggagagtgccatgctagttttatgcattttatggattgaacatttgagaccattttatgtactaatataatgggaatattatatggtattatttcataaatttgttc

SEQ ID NO: 5712 - DNA, 1065 bp, Zea Mays
caaatctgccgccctccagccaccgtgccgccctccagccactttttcgccctctagccatcaacctcagggagtcagccagtgtcggcgccatcctcaacacccgccagtgcagttgcgatggaagcaaacagaacaggctcatgcactagcaccatgcacaagaggtggtttgttcatatgtctgtaacaatagtagcgtacgtgcgagtagagaacccaatgctcactcgtcatccatgaatgcatatgcatcacaacagctgtacatatttgttttaggttttaattttttttacagcatgcatatttgtttgaggtttaatttttttatagcattatgggtgatagtgctgatcagaatgaagagaacacagccctagtatatgaattgttcgccgaacaagcgaaggcgcataatcgttatggcacccacttgaataaaatagggtacaaaaatgtgatggacaaattcaaagaaaataccaggttgtcctataccaaaatgcagttcaagaacaaatgggacaatatgaggattgagtacacaaactggaaaagattatcgagataaaccgggttaggatgggacaccgctaaaaacatggagtgcgacgaatgaaaggtggaagaacctgaataagcaatacaaaggaattgttaagtttaaagatgggcctctcttgcacgaggaagaaaacaccatcatgtatgaagatgttaggaacacaggagatgatcattgggctccatctagttgtactacaccgcacattgtggatggtgaaaccagattatatccctactattccagcccgtaataggcgacatgtccctcaatgcatcagacacatctaccatagggtcaagtggcatgaacatgaataggtttcgtgatgtagcgaaggcactttgggagtcaaagtaattagaaaatgtggttcgtgtcataatttggggagagtgccatgctagttttatgcattttatggattgaacatttgagaccattttatgtactaatataatgggaatattatatggtattatttcataaatttgttc

SEQ ID NO: 5713 - DNA, 3521 bp, Zea Mays
aaaaaacggaggaaacgagaaggccctcctgcctgccccttgcttcctcccgagtcccgtactcccgtggcggcggcggcggctgctcgacccgcccgcccggccgccatgtcgatctgcgggtaccactccccacgcttctccgaggatattacttggctcccgcaatggcttcagccgtatagcacgccggtggttggcgagcaccggaacaacagtaccgccgtttcatcgctttcttgccagaattgtgcgtttgtcgggcacccttcgcaggagcatcaggattgtcagaacgccactgatggttatagcggcttcatcttgcacttgtcaggagatgaggacacggtggttagttcaccggtcagcagcaatgtgctacctttctctttgcgtgtgtcttcagaaagtgccgcacaaccttccctagctgaaggcagtggcaatcctcagataccaaactctggtacgtgcaatggtctatccgagagcctctgtgcagatggtgaagaacaagaggtcaatgctgtctcccagaatcagtttgaggctaacgatcctcaggttgatatgccgacaaaagtggctcgcaaggagatcagtatacaacctgatacaatcagacatagaagacatggtttcaatggtggaaaggttgatgttcgaaagcttcgtaatgttgatgtaaatgatgcgattgaactatcgattgctgcatctgaggccatggttattgcagagatgatacttgatgattctcagcctgataaatcggctgcagctgctatagaagctgctctacacgtgaaagaagcccggaagcaattctactttgaggagccacaacatgcttgtggatcctcagaaggtggtcttgatgagattgattggcttgcagaattggatgagtctgaaatggttgacgcataccaagatgttgctctgtccctcatccacattgcttgctcatctcaagatcataacacaggtgatttgaagcaacaaaattcccatcctacttgtcccccatgtgatgcagacacacacatcttatgggattcttcttctgagaggcaaaataaaaaatggaacagccaaaatgctgatagtgatgaccatgtatctgattcttttccaaacaatcagtcagcaggtgtgccaccaaatgaaccaactccatgctctgcctctgtaaagcaagcagctctatgtaaaacaatttcatgttcaagaaataagaaaactgtcctccaggcgtcaactcaaaacaatgctgcttttcatggaaccttgggagctcttgcaacataccaaaatgttcataagaaagttgcaggagttgctgcacagacgaatgttggtatgaagaagcgtgtaaaaggtttgtttgaggaagaaaatagctacatttctgattcaattagcacagataggcgctgtcctacttctagagcatcatccatggaaattgtcgcctcttcaagggcatctttgtattgcaaagctgaaggtttacttgaagaaaatcatcatcctggaactgaagagttgtgttgccaagtagtatgttctagcttgtcacaagtggatcctttatgttccattgttccatgtagcatatcttgcgatgaaggtcccagtagccaggctcctgtgtgcaaacagagtgaaggccatgaaggtcccagtaaccaggctccttcgtgcaaaaagaacgaaggcaatgaaggtcccacttgcctgacacctgaacgcgaacatagtaaaaaaaaggaggaagaatttatgcataccaaagaatttcctatgatgcaatacctggatgaggaggctggtccatcttgtgtgcctttagttaagccagcagattctaatgttccattccggcgaaggaaatacagttcactaaggccatttagcacaatagcaactaagtcaaacatatttggaagtacatcaaattctaatgctgatgttccagtttgtcagcttgagagattcacacccattgttctaaataagaatgtacagcgtgtgcaagctgccaaggaattcatagaaaatagtgctggggctgaaaatttggaagatttctctgcagttcggaagcagacatattatcctcaggatggcagtgaggatcaaatcagggagctacaggtcccacgggaagtctttccgccaacagagaatttggttgttaaacagcaccttaaaagaaaaagggtccaattttcagaagcaaagcgtagtagcagaagaaccaagaacaatagaaggatcctgactaaatcaagattcagtcgatcagatagcagaacaggagagatgcttgagaccagagagtacactgataacaaagaagacacatttcaaggagtagagtttctgttgactggatttcctaaacagaaggaaaaagaaattgagtccctaatacgaaaatctggtggctatgtactttctaaagtgtcaccctttccacttgataaaagaaagaacatggctgagtttccaagctggaatcctcccatagtactttcgcctaaaaaggtgtcaacagctaagttcttatatggctgtgctatagatgcctggatattgaatcccatttggctcttcgattctcttcaagccggcatcatgctgccacctggaaagtaaggtatttaattcgacaaaggaatgcccagaagcataattcatcattcgaccgcccacttcacccaaaatgtaatacattgatatttgatggagtaggattcttgatccacggcaaaatcagcttctgttcaaaattttccaacattgtcaagcatggagggggccaagtttttatatctcttcagggattagttcaaagcttgaaggatggaagtacatcgcgtggaatcattcttattgcaaacgcggctaagcctaagactgatatctccctaaaactgcctttggcaaagagaggatgcaacttcgcgaaagcctgctggaactcaattggcattactccgcccagaatttctaatcctgaagaggcatcagcgaacctcaaacaccagctcaacgttcccttctctatggagatcattattctcatgacatggagcatctggaaaagccgaaacgagtggctgttttcaaacaaagatccctcggtgctccgctgtacacaggaatttagtagagaaatgcgattgatcattcacagagcgcgggggaaatttgacacctctatcccgaattggctaagcctgtggcaaacatagtattagtgctttatttttctctttcttttattgatcgtaaaagttccaagttctaaccttttcttttcgctttctaataaaatgcgcagtagggttccccctcctgatccttcaaaaaaaagactgatatctccctctcaccctcattctctctcttgcacgtgggccctagatgccaggagcgtttcttgtacccaccacatgcacgaacgctcggcgtgctgctcgtggccaccgtcgtcgtgctgctcatct

SEQ ID NO: 5714 - DNA, 3562 bp, Zea Mays
agaaggccctcctgcctgccccttgcttcctcccgagtcccgtactcccgtggcggcggcggcggctgctcgacccgcccgcccggccgccatgtcgatctgcgggtaccactccccacgcttctccgagaattgtgcgtttgtcgggcacccttcgcaggagcatcaggattgtcagaacgccactgatggttatagcggcttcatcttgcacttgtcaggagatgaggacacggtggttagttcaccggtcagcagcaatgtgctacctttctctttgcgtgtgtcttcagaaagtgccgcacaaccttccctagctgaaggcagtggcaatcctcagataccaaactctggtacgtgcaatggtctatccgagagcctctgtgcagatggtgaagaacaagaggtcaatgctgtctcccagaatcagtttgaggctaacgatcctcaggttgatatgccgacaaaagtggctcgcaaggagatcagtatacaacctgatacaatcagacatagaagacatggtttcaatggtggaaaggttgatgttcgaaagcttcgtaatgttgatgtaaatgatgcgattgaactatcgattgctgcatctgaggccatggttattgcagagatgatacttgatgattctcagcctgataaatcggctgcagctgctatagaagctgctctacacgtgaaagaagcccggaagcaattctactttgaggagccacaacatgcttgtggatcctcagaaggtggtcttgatgagattgattggcttgcagaattggatgagtctgaaatggttgacgcataccaagatgttgctctgtccctcatccacattgcttgctcatctcaagatcataacacaggtgatttgaagcaacaaaattcccatcctacttgtcccccatgtgatgcagacacacacatcttatgggattcttcttctgagaggcaaaataaaaaatggaacagccaaaatgctgatagtgatgaccatgtatctgattcttttccaaacaatcagtcagcaggtgtgccaccaaatgaaccaactccatgctctgcctctgtaaagcaagcagctctatgtaaaacaatttcatgttcaagaaataagaaaactgtcctccaggcgtcaactcaaaacaatgctgcttttcatggaaccttgggagctcttgcaacataccaaaatgttcataagaaagttgcaggagttgctgcacagacgaatgttggtatgaagaagcgtgtaaaaggtttgtttgaggaagaaaatagctacatttctgattcaattagcacagataggcgctgtcctacttctagagcatcatccatggaaattgtcgcctcttcaagggcatctttgtattgcaaagctgaaggtttacttgaagaaaatcatcatcctggaactgaagagttgtgttgccaagtagtatgttctagcttgtcacaagtggatcctttatgttccattgttccatgtagcatatcttgcgatgaaggtcccagtagccaggctcctgtgtgcaaacagagtgaaggccatgaaggtcccagtaaccaggctccttcgtgcaaaaagaacgaaggcaatgaaggtcccacttgcctgacacctgaacgcgaacatagtaaaaaaaaggaggaagaatttatgcataccaaagaatttcctatgatgcaatacctggatgaggaggctggtccatcttgtgtgcctttagttaagccagcagattctaatgttccattccggcgaaggaaatacagttcactaaggccatttagcacaatagcaactaagtcaaacatatttggaagtacatcaaattctaatgctgatgttccagtttgtcagcttgagagattcacacccattgttctaaataagaatgtacagcgtgtgcaagctgccaaggaattcatagaaaatagtgctggggctgaaaatttggaagatttctctgcagttcggaagcagacatattatcctcaggatggcagtgaggatcaaatcagggagctacaggtcccacgggaagtctttccgccaacagagaatttggttgttaaacagcaccttaaaagaaaaagggtccaattttcagaagcaaagcgtagtagcagaagaaccaagaacaatagaaggatcctgactaaatcaagattcagtcgatcagatagcagaacaggagagatgcttgagaccagagagtacactgataacaaagaagacacatttcaaggagtagagtttctgttgactggatttcctaaacagaaggaaaaagaaattgagtccctaatacgaaaatctggtggctatgtactttctaaagtgtcaccctttccacttgataaaagaaagaacatggctgagtttccaagctggaatcctcccatagtactttcgcctaaaaaggtgtcaacagctaagttcttatatggctgtgctatagatgcctggatattgaatcccatttggctcttcgattctcttcaagccggcatcatgctgccacctggaaagtatttaattcgacaaaggaatgcccagaagcataattcatcattcgaccgcccacttcacccaaaatgtaatacattgatatttgatggagtaggattcttgatccacggcaaaatcagcttctgttcaaaattttccaacattgtcaagcatggagggggccaagtttttatatctcttcagggattagttcaaagcttgaaggatggaagtacatcgcgtggaatcattcttattgcaaacgcggctagtgcgtctcgtcatctaacccattgtggtttggagcatgacataaatacagcgacagcaagctggatcatcgctagtttattttctggtaaattgattccattgaagaaagatcgctgtgcttcatttcgccgaatcaagatgccattgttccaacaaaagcaacatgtattttacatgagtcaagagatatgatctctgctgcatcacatagctacaataccatgggaatctcaaatacttctcactgaaacatgactgctatgcattcactctgatgaacctcttttaaaagaagagtttgtcacagcatttttttgtcactcagaaatccctctgttcagcaccaaggtcgtattcttttgtcacttcacaattgaaggggaagctaggaaatagagcattcttcaatcatggatttacggcgccctatcaggctacagctgagaaagggttagttactgctcgaggtgagcaaagtattcatcttccagctacatcattctggaaacttggtttctcaacaacatgacaagtgatccaacaacatgacaagtggatcacggaaggtttgaaggggattgagggggaaatgaactaatttcctcctcaattccctctaattttccgtgatcgctggtcaccaaatcagctctaatcatggcatcataacacaattttgcagtccagaatcaactgtaagcagttccttatatgttgtagattgtagcatgtaaatcgtaaatagaaataccagatgtaatc

SEQ ID NO: 5715 - DNA, 972 bp, Zea Mays
cccatagggcctacatgcgtagaactgcgatggtatagccgcgtagtcggatgagcgattcaagcgagaaatcaaaccgttcgtgattcgtgaaggcctcaactctcctttcctctcgtgggcgatcgactctctcctgcggcggcggcggcgatcaacgtcgacgactacggcccacgattctccttcgaagcgcgaatcatgatacattttgtgctccttatcagcaggcaggggaaggtgaggctgacgaaatggtacactccatacccacagaagcagagatccaagatcatcaaagagattagtacgctcgtcctgacaagaggccccaagctgtgcaattttgtcgactggcaaggttacagagttgtgtacaagaggtatgctagcctttacttctgcatgtgcattgaccccgctgacaatgaactggaaacccttcagatcatccatcactatgttgagatattggaccgctactttggcaatgtctgtgagcttgatctgatattcaattttcataaggcgtactttatattggacgaaattttgattgctggtgagcttcaagaatcaaacaagaaatcggtgctacgtctagtaactacacaggacgctttggtggaagccgcaaaggaggaggcaggctcgttgaggaacataattgcacaggctaccaagtagagcactcgtgtcttctacaatgattactcacacccccacggcatgatagtagcttaatcactaccttacggggcagcagcttttacccctgatttttcctcaatagtttatcccctcttccatctctgcattttgttcagaggtctgttctgttctgtcactctctctctctctatctctcttgttttcccactgtaccacctgtttcgagggaatgtgttgtttctgctcttttgcatgcacaacgttgtatacggaataaaataatgcaatgttttggttccc

SEQ ID NO: 5716 - DNA, 829 bp, Zea Mays
ctcttcactggatggatggagatggagcactcactttctctctcttcgcctttgcttatttattccttctcccagcccatccatccatcgcatcccatctctcctcactgtccgtgtcgctctctctctccccatccatcaaatccgcttcgtcatctcgcttgcagtccaaccaagtcctaggaataacaccacggcgcaacaactcgcaccaccaccgccgcgcagtagctagctaccataccagctgcacgcctcagtgctagcttcgccgggcgggggcggctgggacaccagcagtgcgtgctgcgctgcgctgcgcctctccctgccactcactcgaggagcaaccgtcccagctgcaagggcgacaagaggatcgaccagctgctagtagctagctcgcacatgttcccggtcgaagtgtcggcgctcgcggcgggcggtgcgggagcggggcgtcaggctgccggcgacgccgccgggacgatgctgccgccctttttcatgggctccatctggcccgcgaccgctggcgccgctggctccgaggaggacgaggcggcgacttcctcaaggaagccctgcgggctctggtagagaggccaggcgccgccggagaccggcccaagaggcgacgggtctcggacatgaacatgcaagcggcagcatagctagcacgccgccgcaggaggcgggcagatcatctcgctcgattggtcgtcgtagctcaaatacctaattgcatgcatgctcatgtcgaatatataaaaatggtactacctccatcatctccatgtttagttagatcaaaaaaaaaaaaaaaaaa

SEQ ID NO: 5717 - DNA, 555 bp, Zea Mays
gaaccgcagaagaggcggccaggccaagcattagcaaagcataccccaaaatctccaaaccctaggcgaactcggcacggcggcgatggcagcggcgggcctgcggaaggggaacgcgcgcctcccacccgaggtgaaccgggtgctgtacgtgcggaatctgccgttcaacatctcgagcgaggagatgtacgacatcttcggcaagtacggcgcgattcggcagatccggctgggcaacgccaaggacacgcgcggcaccgcctacgtcgtctacgaggacatatacgacgccaagaacgccgtcgaccacctctccggcttcaacgtcgccaaccgctatctcatcgtgctctactaccagcccgccaagatgtccaagaagtcggatgtcaagaagaaggaggacgagatcactaggctccaggagaagtacggaatagggtccaagacgcccggccctggctccaccgactgagcggccagattgacaggtatgctttccatagcaaaaccatgttcttaaaacatacatttctggacgagtgactggat

SEQ ID NO: 5718 - DNA, 1881 bp, Zea Mays
aaagcgcgcagtcaacagattagtaggaaagtctagtggagtgtggaaattccctacggggtgaagccttgtgtttcttccaagcatccaaagagcccttagcaattccccgcgtcggtgatcgggcccattgccatctgcccatctctaccgacgaccaactgaactgaccgagtgagcgacgccgacctcgggctggtcggggcgatccggttccaggcttccggccatggcgaagccgccgcgggcgccgaggcccaaactgcagacgccgcgggcgccggcccggcggctcctcggcctcggcgggctgggcgtcgcggcggcggcgtacgtgggcgtggactacttgcggcacctctcgccggcgtggcacggccggctgcagccggcgctgtgggcggtgctggcgctcgcggccgccgcgcgcgcgccgttctaccgccactggtccgcggagctgcgcgccgcactgcccttcctgggatccatcgccttcatgctcgccgccttcctctgcgaggccatctctgttcgcttcgtctccgccgtcatgggactgcactggcacagttctgttcgactgcatcaaagctcctggtcttggtattgccacaagatacatgttcactatggcaattggtcgtgtacttcggacgataactttcatcgctaccattcttccatccgcaaggccttggtgcgctgtagcccgttatcaaatacctcaacatcctcatccttgggcacagaaatattatgttccatatgcttctgactcgaatgctattcgcagagtcataacacaggatatggcatatgctgctgttcaagcttacccagatgaatataagcccgattggggacgtatgagcttccttgtagacattttgagaccaactcctggagaagggccttcgtggtaccatcttctgaagaaagctagtggcggctgcaatgaccttatgtacagtggacatatgcttgttgctgtcctgactgcaatggcgtggacggaagcatacgggggctggatctctgtcgcgatatggctcctcgtcctgcacagcgcgcagagggaggtacgcgagcggcaccactacagcgtggactgcgtcgccgcgatctacgttggcgtcctcctgtggaggatgacggggttcatctggtccgccagagacctggcccgagctagacggctagccaagctcgaggaggtccagagcaggctggtccacgccgccaaggacagcgacatcgatgagatcagaggcctgctgaaggaggtggagctatccggccaggagaggcagggcttctcgcagagggcgatcctggccttcgccgcaggaacgatcatcttcaccttgtcttgtgtcctcatcgccttcacagctactagcgacggctgatttgggttctgttgcatgcccctgggtctgaatgttagccactttctcctgggctgcactgttttcttgtagtatgttgactgttgagtgtcgttggttgtggggaaaccatgtttaggactagtttgagaatctcatttttacaagggatttttatttttctttagaaaactagttcattttttcttgagaaaatagaaatcttttttaaaaaaagttctcaaactagcccttaaacggaaacgtaactagatcctagcggtgccagaattcatggacgttttgcagctgcacggggagctggtggctgtcggtaacattttggttgttgtagccaagttttacttaaacagaggttgaggctttcattccttgcaacgcactgtaggccaagttttatttctgttatgtattttgtagtgaggcggttcaaaagtttcagtgtagcggatccttgcaggtccaaaag

SEQ ID NO: 5719 - DNA, 1546 bp, Zea Mays
agaattttgtttccgtgctgtaggtcgtgcgaatctgcacgaaccaaatgttagttgttcatggaaggatggcgtgtcttctccttgcatggaactgccgcaccgcttcctgacactggtcaatggctgcttctatcattgaacgagaagctccctcagagcgtggtcgatctactaagagctcatgttatcactctccaccattatctgatgttgtttatcatgctgggtttctcagttctgttcgactgcatcaaagctcctggtcttggtattgccacaagatacatgttcactatggcaattggtcgtgtacttcggacgataactttcatcgctaccattcttccatccgcaaggccttggtgcgctgtagcccgttatcaaatacctcaacatcctcatccttgggcacagaaatattatgttccatatgcttctgactcgaatgctattcgcagagtcataacacaggatatggcatatgctgctgttcaagcttacccagatgaatataagcccgattggggacgtatgagcttccttgtagacattttgagaccaactcctggagaagggccttcgtggtaccatcttctgaagaaagctagtggcggctgcaatgaccttatgtacagtggacatatgcttgttgctgtcctgactgcaatggcgtggacggaagcatacgggggctggatctctgtcgcgatatggctcctcgtcctgcacagcgcgcagagggaggtacgcgagcggcaccactacagcgtggactgcgtcgccgcgatctacgttggcgtcctcctgtggaggatgacggggttcatctggtccgccagagacctggcccgagctagacggctagccaagctcgaggaggtccagagcaggctggtccacgccgccaaggacagcgacatcgatgagatcagaggcctgctgaaggaggtggagctatccggccaggagaggcagggcttctcgcagagggcgatcctggccttcgccgcaggaacgatcatcttcaccttgtcttgtgtcctcatcgccttcacagctactagcgacggctgatttgggttctgttgcatgcccctgggtctgaatgttagccactttctcctgggctgcactgttttcttgtagtatgttgactgttgagtgtcgttggttgtggggaaaccatgtttaggactagtttgagaatctcatttttacaagggatttttatttttctttagaaaactagttcattttttcttgagaaaatagaaatcttttttaaaaaaagttctcaaactagcccttaaacggaaacgtaactagatcctagcggtgccagaattcatggacgttttgcagctgcacggggagctggtggctgtcggtaacattttggttgttgtagccaagttttacttaaacagaggttgaggctttcattccttgcaacgcactgtaggccaagttttatttctgttatgtattttgtagtgaggcggttcaaaagtttcagtgtagcggatccttgcaggtccaaaag

SEQ ID NO: 5720 - DNA, 567 bp, Zea Mays
tctgggccatctaggacagacccaaaactaggcccaggaataaaccgagcccatcccggtgcactataaaaaaagttggattcttcgcgtcccccgacaccttccccgcacaccggttgcgatccgccgccatcgcttcaagcagcgaaccctagccgccctcagcgacggattgcagatctcccagccatgacgttcaagcggaggaacggcggacgcaacaagcacgggcgcggccacgtcaagtacatacgctgctccaactgcgccaagtgctgtccaaaggataaggctatcaagcggttcttggtgaggaacattgttgagcaggctgctgtgagggacgtgcaggaggcctgtgtgcatgatggatatgttcttcccaaattgtacgcaaaggttcatcactgtgtctcatgcgcaatccatgcgcacattgttcgtgttcgctctcgtgagaacaggaggaaccgtgagcccccgcagcgtttcaggcgccggttacttgggacatgccttgctatgaaagaccacatgtctgggctagtatcaaatgccttacgcctg

SEQ ID NO: 5721 - DNA, 7154 bp, Zea Mays
ggggcctcgtcttcctcgctccgccaccgccacgctgaaaacccacgcgctaagcgcaccccgccaagtctaccagacgctctccggagcggcacgcgcgcgccaatggcggggccttgaggtgctcgtggggtgagggagggaggacggcgctggttagtgagggcgttaagcggcggctcggcgcggcgggcggggaggatgatacggcaccagatacggaacgagtatgggctggcggatccggaggtgtacgcggccccgggggaggaggatgacccggaggcgctcctcgagggcgtcgccatggccggcctcgtcggcgtgctccgccagctcggggatctcgccgagtttgcagctgaaatttttcatgaccttcacgaagaggctatggctactgcttctagaggacatggtttaatgctccggttgcagcagttggaggcagaatttccagcagttgaaaaggctattatatctcagacggagcactcaaattatccacatgatgatggagctgagtggcattctaatgttcaacttaaacagaatgtgatcacacaaggagatatgcctcgtttcattatggattcatatgaagaatgtcgtggtccgccacaattgttcacattggataagtttgatgttgctggtgctggagcctccttaaaacgatattcagacccttctttcttcaagacagaacatgcctccaacatgatagaagcggatgttttaattgaaaataaacctcgtagaattaagaagaaggccatgcgttggaggaaaggggcaactcttgaatcattactcactgcaaactcagagtctcaaattacccccaaggatcgaacttctagaaaagttccacctaggacaacaaagttgaaatccaggcaaccacggagtcctgatcataaaaccactagcagaatcttgagggagcatctgcaagaagtgattttatcgcagaaaaaaatcatctccagatattcggtgaggcattactatgtgaaatttggatcgcctgactcaagtgaaactgcacctccttttggagaaatggacagttttggcgcccttgttcaatcttctggtgataaacggaatctggggaaacaacatgaaccttttcaacaaaatggcatggtccatagctcagaaaagctgccggattgtccatacttggatattggagaaagtaataacagatcacatttgacatgtgaagagaaaccccgattggctgaggttcctgctgatcagaaagatgttgatggccgcaggcctgatgacatcgtgagtgatcaagacaacttcattggtgcttctaatgacacggacatggaaaacaaagaaggtcttcaaatgaaaactgaatgtgatcccagtgccagtgttgaactggttgaattgaaccgtcacaacaaggaaggtgacaaagtattgtatgccgaacctccagaagtaggtcctgcaatagactcgtcattgggattggataatgcaagcagtggtgaagaaccaacctgtgtggacttgccactgtcaagtgattctgctcccacagtgtcagccaccaatggtccaaactctggttcacaatctggcagacaaatgaatggtgttgactggtccacagacgaagagtcttctaacgatgtggatctaattgacgtgagctcatcttctagtgtagtttctgaaaatggtgacgtacaaaacaatgattgtctcgttagttgtctacaacacgaggaagcgattcactctctgagtgatgatcatgctggtgctatccataattctgatgaacagtcaccgaatacgtctagcaactgggatgatatggctattggctgcaacaattacaccgagaaagtacatcatccagtggagcatgtccaggatgttgtactagatgatatttctatgatactgagcaaacctaatgatgtttcagaagacgaagataaaatcagttcagggaatgctgatgatttgtctctccaccctaccaaattgaaccaagaggaaatacaggagttgaagacagaatcggaagaaggcagatctctagaatcaggaagttcacctagcaaagcatcattgccaaataaggatcatgtgtcgatgaatgatgtagaagccgacactgttacaattcctaaagaaactgttgcagatactgcaccaacaggtttggatcctgatggcatcgacgagcgtcaagatggagttgcaccgaaatattcaagcatccacaatagtgtactgtatgaatcatatgatgacaagattgctgaagacacacactctttactagatgatggcctatcaactactttcgatgacgataagcatgttgcagaggatcatcaatttgttgttcttgaacaaaggacttgtccaactagcctcaacacatgcaaggatgattctatgcaaggatgtgccgtggccagggatttcactgatgctgaaaagcttccgggagtcgtttcaggtgtattagcttctcaactggagacagaatctcatgtaggagagacacttgcatccacgtcctatgcattcagtgatgatactgaagcactagagattggtgtccctctagcccctggtacttcctttctacctaacaccagtagttccttggtagaaaaacatgaattgactgaaacagaagaaattgcagaggttggtgaatttgtggttgcaaaagaatcaactactagcgtatttgcagttgatgtggtacctcccaaagagttcattgatgctaacatacatcctgaaaaggtagaggttctggctacaagtttgactgaagaagccactaggctggatttacaactacagtctccttccagggaagttttggaaacaacggaagctattcacagaaattttggggcagtagatgaatcaagagaagatatctctaagaagagtatgttgcagacagacaatagtcctcttattgtagagactacaagtgaaaaatgtagtgacagggatggtgatacacaatttctagtaaaatctgattatcaagaggaattactaaaagagggcagtcataatgctgaagatcgatctctctgcgatttgaacaaggatggtgcagtaaccttgaaaagtaatgcagttgagaaacaaccagtgaatgctggtcaagatttggcgtgggggatgcacgctcaagattctagtagtacaaacccgttcctggatcctgcctacttgatgagccacactcaaatttattcatcttccagtatgagtagccaaccatgtttccctgaagaagaggatttcctttcagagcttgtaatacaacatgacaatatgggagtaactgctgatgccctttgggaacctgcaactccacctgatgatgcgccattaccatcagaaattatgactgaagatgatttcagatccttctgccaagaatatcatgagatagatttttcatctgtcactaactgttctcacagtgaaccagcctcagattctaacaaaattccaaatgcttttctgatcagagagtcagattttccatgttataactctgccttgccagtgaagttagatcaggaagcctgtattcattctaagttctgttctgagtgtgtcgaatattcatgtgctgtggaaagacaaggcactacatcaatggttgtttctggtaaagaagatcgcgtgggcaaggacgagacaccaggagtagatttccatttaaattttctcgagttttccaatgataacagaagtcctgaattaaatatgctctccgttccagtggatttacggcaggaactgcatggcttgcctgaagttgattctcgtgatagttcccctttgctgcataaggagaagactagtgaagaatgctgcttttctttaagcaacaacgttgttgaagtgaaacaagagctggaaatccgtgctgaccttgttccacattcttctattaatgaaaaagtagatggattagatgaggctgtaccggtggaaccagaggcccatgcctgtgccttggatgaatatgacaaccaagatgtcccacacatttcaactagtgagaagaatgaaacccttactttgggcaaacctgttttagtccaggggccagaagtttgtgcctttggtggatttgaatgtgatcctccaatcattccatcaccttcagttgatgagactaaggacaatctagaagtcagaatgaatatgatcctccaatcattccatcattctttgaggacttcttttcaagcagaacagaagtcagaatgctacacctcaggtgaacatgattctcaaaccgttccatttcctttgcatgatgagaatatcaatgaactggatgatcctcctttgagcaatgctgacgaactggaccgggaatcaaaagcttgtgttccacatgaatgtgatgctcaaatcgctccatgttcaactgatgaggatatacatgaattggatcaccctcctttgagcagtcccgctttagtggatcttgaatcagaagaccatgtctcggatgaccgtgattccgaagtcaccccatgtttggttaaagataagattgatgaatctgtagatgctcaaccaaacctgcttcctggggagctagagcaggaaactcatgcaccccctgaattagactttcgagttgctccacaatcagcgaaagaatctgattgctcaactgaatttgattcccaggccgcaccatgttcttcaaatataccagtactagctaacacaacagtgtcgacttgtatttctgccatgcctagcagtgaggaaacgtatcagttgtctcctgttccaccacctactgtacaatttcaaaatgattcctacaaagatcctcaagctctactcgctgattcctacaaagatcctcaagcgccaccccctctccctcctctccagtggaggcttggaaagcctcggctaggacttctgagtagaaaaggctgtatgactgaacctgcaagggtaatagatcctgttttgcagatatcaagccaagagatggatattaggccaggtttgcttgatccaacggatagatctatagaaccagtatcctgtcaagaaatcaaagaagatagatgtgagagttctttgatagatcataatgatcaaaatgtggattttgatagattatcgaccagggttgcagtaactgatgttgcaaggactgaacacaggctatccttagagacttcagaggacattaagcaacaggggcatatttcttcatcggcaacaggagttggggaacacctggatgctgggttcacatcaacaatggcagatgaggaacatctggatgattctgggatgacacatggaacagctctatacttatcagaccctctgtttccattacctacatatgaactgcaggaccctcaaccagatactcgagaaaatagcgagcatcccagtcaaacacatggagctgcatctggggatgataagtcaatggatgctgttggcagcatggaaagcaccctaacaaaaggacatgtttctggaaataggtgctaccagcaacctcagcatggtgaatcgtcctcagagacttcagaccataaagagcatattacaaatgcatcagaggatggtgttaagcatcagtcaggtacaagtgaggcaccttcagacacagcaaagcattctgcaccaggcacgctgttgaaagggaatgtccaagagagtcaaattttacaggaacataatgtggggagttccgaggacgatcaaccaggaggcctgttgtacagcttagaaccagtggcacctcaaggggaaaacaaaaaccaggttaacaacccaggcctgttactggaatggcctggagatacaagtgagttggtcactggccttgaaaaaagttgctatgcgcatgctgagcagccacctgtgatgggatggactgttggacctcagatgcttcatcctaaatatggtattttagaagaagagagccaatttgagcctaatatcgccgacaatcatttaatcaggaagcctatttcgataaaaaacatcccaaggaatccactggttgatgctgttgctgctcatgatagaagctcgatgagaaaggtttcagagcttgcaccaccgactgacaagccgaagcctaacgagagaaacatgttgctagaacagataagaaacaagaccttcagcttgaaacctgttgctccagctcagcaaacagcaatgagatcccctgctagaaccagtactagaaacttgaaggttgccgctatcatagaaaaggcaaatgccatacgacaggcagtgggaagtgacgacgaagacgcagatagttggagtgatacataaatcccccaccgtttgccctaccctcttggtgcttctttccatggcagaaaggtaccgattcatcaagagcattggggacaggatggggatgcacaaccatgtcatcgtttttgtttgccctaccctcttggtgcttctttccatggcagaaaggtaccgattcatcaagagcattggggacaggatggggatgcacaaccatgtcatcgtttttgttagtaatataatgctagtcttgtgtatagtatacgcccataatccttttcattttttgtatgtgtattctttcgaccgattgtttgtatacctgcctctctctcccacagcagcaaaggctgttgcggttggcatgatcctaggatagcatgcatggtctatgtaaattaaacagtagtagttaagtaaagaattgttccatcttttctggaaaaaaaggtgagataatggcatcatcgattccacacagcaagcatagcagaccttgaattgcaaaaatatgaaaaccaatacacccgcttagacgaatttgttgatccatggcaggtcaaactaacaaactaactattggaggcaataactaaacttaacaccaagatttagtttcaacagtagccgccgcggcggaggcggccgacgagggtcgagcagatgaagccggttgcgcccgtctcccccgccatctcctcgcgtccttcccgtgagctgactagctgagctgggtctcgcgtcactccgagtgtgctgcggctgtgcgagtggctacgtagctgaca

SEQ ID NO: 5722 - DNA, 7041 bp, Zea Mays
cctcgctccgccaccgccacgctgaaaacccacgcgctaagcgcaccccgccaagtctaccagacgctctccggagcggcacgcgcgcgccaatggcggggccttgaggtgctcgtggggtgagggagggaggacggcgctggttagtgagggcgttaagcggcggctcggcgcggcgggcggggaggatgatacggcaccagatacggaacgagtatgggctggcggatccggaggtgtacgcggccccgggggaggaggatgacccggaggcgctcctcgagggcgtcgccatggccggcctcgtcggcgtgctccgccagctcggggatctcgccgagtttgcagctgaaatttttcatgaccttcacgaagaggctatggctactgcttctagaggacatggtttaatgctccggttgcagcagttggaggcagaatttccagcagttgaaaaggctattatatctcagacggagcactcaaattatccacatgatgatggagctgagtggcattctaatgttcaacttaaacagaatgtgatcacacaaggagatatgcctcgtttcattatggattcatatgaagaatgtcgtggtccgccacaattgttcacattggataagtatggagctgttgtcttttgtgaacatctactatgtgcgaaagggcatctagctgagttggttaggtggcctgagtagcactcctcaggtcctcagttcgaaagttcgaatcccagtgggaacgaatttcaggaccttctttggccggggctccgattgagcttcttcttaataataatacctataataccgcgggggcggtcttatcccctatcggccgagttttttgaacatttacgcaaccgagtttttttttgaacattttctgcaatgacacactaggattattcttcaggtttgatgttgctggtgctggagcctccttaaaacgatattcagacccttctttcttcaagacagaacatgcctccaacatgatagaagcggatgttttaattgaaaataaacctcgtagaattaagaagaaggccatgcgttggaggaaaggggcaactcttgaatcattactcactgcaaactcagagtctcaaattacccccaaggatcgaacttctagaaaagttccacctaggacaacaaagttgaaatccaggcaaccacggagtcctgatcataaaaccactagcagaatcttgagggagcatctgcaagaagtgattttatcgcagaaaaaaatcatctccagatattcggtgaggcattactatgtgaaatttggatcgcctgactcaagtgaaactgcacctccttttggagaaatggacagttttggcgcccttgttcaatcttctggtaaattggatctgacaaaagttgttccagtaaacgaatctgatgctgtggatactaaatctgaacccattgatggatcggcttatttggagctaggtgataaacggaatctggggaaacaacatgaaccttttcaacaaaatggcatggtccatagctcagaaaagctgccggattgtccatacttggatattggagaaagtaataacagatcacatttgacatgtgaagagaaaccccgattggctgaggttcctgctgatcagaaagatgttgatggccgcaggcctgatgacatcgtgagtgatcaagacaacttcattggtgcttctaatgacacggacatggaaaacaaagaaggtcttcaaatgaaaactgaatgtgatcccagtgccagtgttgaactggttgaattgaaccgtcacaacaaggaaggtgacaaagtattgtatgccgaacctccagaagtaggtcctgcaatagactcgtcattgggattggataatgcaagcagtggtgaagaaccaacctgtgtggacttgccactgtcaagtgattctgctcccacagtgtcagccaccaatggtccaaactctggttcacaatctggcagacaaatgaatggtgttgactggtccacagacgaagagtcttctaacgatgtggatctaattgacgtgagctcatcttctagtgtagtttctgaaaatggtgacgtacaaaacaatgattgtctcgttagttgtctacaacacgaggaagcgattcactctctgagtgatgatcatgctggtgctatccataattctgatgaacagtcaccgaatacgtctagcaactgggatgatatggctattggctgcaacaattacaccgagaaagtacatcatccagtggagcatgtccaggatgttgtactagatgatatttctatgatactgagcaaacctaatgatgtttcagaagacgaagataaaatcagttcagggaatgctgatgatttgtctctccaccctaccaaattgaaccaagaggaaatacaggagttgaagacagaatcggaagaaggcagatctctagaatcaggaagttcacctagcaaagcatcattgccaaataaggatcatgtgtcgatgaatgatgtagaagccgacactgttacaattcctaaagaaactgttgcagatactgcaccaacaggtttggatcctgatggcatcgacgagcgtcaagatggagttgcaccgaaatattcaagcatccacaatagtgtactgtatgaatcatatgatgacaagattgctgaagacacacactctttactagatgatggcctatcaactactttcgatgacgataagcatgttgcagaggatcatcaatttgttgttcttgaacaaaggacttgtccaactagcctcaacacatgcaaggatgattctatgcaaggatgtgccgtggccagggatttcactgatgctgaaaagcttccgggagtcgtttcaggtgtattagcttctcaactggagacagaatctcatgtaggagagacacttgcatccacgtcctatgcattcagtgatgatactgaagcactagagattggtgtccctctagcccctggtacttcctttctacctaacaccagtagttccttggtagaaaaacatgaattgactgaaacagaagaaattgcagaggttggtgaatttgtggttgcaaaagaatcaactactagcgtatttgcagttgatgtggtacctcccaaagagttcattgatgctaacatacatcctgaaaaggtagaggttctggctacaagtttgactgaagaagccactaggctggatttacaactacagtctccttccagggaagttttggaaacaacggaagctattcacagaaattttggggcagtagatgaatcaagagaagatatctctaagaagagtatgttgcagacagacaatagtcctcttattgtagagactacaagtgaaaaatgtagtgacagggatggtgatacacaatttctagtaaaatctgattatcaagaggaattactaaaagagggcagtcataatgctgaagatcgatctctctgcgatttgaacaaggatggtgcagtaaccttgaaaagtaatgcagttgagaaacaaccagtgaatgctggtcaagatttggcgtgggggatgcacgctcaagattctagtagtacaaacccgttcctggatcctgcctacttgatgagccacactcaaatttattcatcttccagtatgagtagccaaccatgtttccctgaagaagaggatttcctttcagagcttgtaatacaacatgacaatatgggagtaactgctgatgccctttgggaacctgcaactccacctgatgatgcgccattaccatcagaaattatgactgaagatgatttcagatccttctgccaagaatatcatgagatagatttttcatctgtcactaactgttctcacagtgaaccagcctcagattctaacaaaattccaaatgcttttctgatcagagagtcagattttccatgttataactctgccttgccagtgaagttagatcaggaagcctgtattcattctaagttctgttctgagtgtgtcgaatattcatgtgctgtggaaagacaaggcactacatcaatggttgtttctggtaaagaagatcgcgtgggcaaggacgagacaccaggagtagatttccatttaaattttctcgagttttccaatgataacagaagtcctgaattaaatatgctctccgttccagtggatttacggcaggaactgcatggcttgcctgaagttgattctcgtgatagttcccctttgctgcataaggagaagactagtgaagaatgctgcttttctttaagcaacaacgttgttgaagtgaaacaagagctggaaatccgtgctgaccttgttccacattcttctattaatgaaaaagtagatggattagatgaggctgtaccggtggaaccagaggcccatgcctgtgccttggatgaatatgacaaccaagatgtcccacacatttcaactagtgagaagaatgaaacccttactttgggcaaacctgttttagtccaggggccagaagtttgtgcctttggtggatttgaatgtgatcctccaatcattccatcaccttcagttgatgagactaaggacaatctagaagtcagaatgaatatgatcctccaatcattccatcattctttgaggacttcttttcaagcagaacagaagtcagaatgctacacctcaggtgaacatgattctcaaaccgttccatttcctttgcatgatgagaatatcaatgaactggatgatcctcctttgagcaatgctgacgaactggaccgggaatcaaaagcttgtgttccacatgaatgtgatgctcaaatcgctccatgttcaactgatgaggatatacatgaattggatcaccctcctttgagcagtcccgctttagtggatcttgaatcagaagaccatgtctcggatgaccgtgattccgaagtcaccccatgtttggttaaagataagattgatgaatctgtagatgctcaaccaaacctgcttcctggggagctagagcaggaaactcatgcaccccctgaattagactttcgagttgctccacaatcagcgaaagaatctgattgctcaactgaatttgattcccaggccgcaccatgttcttcaaatataccagtactagctaacacaacagtgtcgacttgtatttctgccatgcctagcagtgaggaaacgtatcagttgtctcctgttccaccacctactgtacaatttcaaaatgattcctacaaagatcctcaagctctactcgctgattcctacaaagatcctcaagcgccaccccctctccctcctctccagtggaggcttggaaagcctcggctaggacttctgagtagaaaaggctgtatgactgaacctgcaagggtaatagatcctgttttgcagatatcaagccaagagatggatattaggccaggtttgcttgatccaacggatagatctatagaaccagtatcctgtcaagaaatcaaagaagatagatgtgagagttctttgatagatcataatgatcaaaatgtggattttgatagattatcgaccagggttgcagtaactgatgttgcaaggactgaacacaggctatccttagagacttcagaggacattaagcaacaggggcatatttcttcatcggcaacaggagttggggaacacctggatgctgggttcacatcaacaatggcagatgaggaacatctggatgattctgggatgacacatggaacagctctatacttatcagaccctctgtttccattacctacatatgaactgcaggaccctcaaccagatactcgagaaaatagcgagcatcccagtcaaacacatggagctgcatctggggatgataagtcaatggatgctgttggcagcatggaaagcaccctaacaaaaggacatgtttctggaaataggtgctaccagcaacctcagcatggtgaatcgtcctcagagacttcagaccataaagagcatattacaaatgcatcagaggatggtgttaagcatcagtcaggtacaagtgaggcaccttcagacacagcaaagcattctgcaccaggcacgctgttgaaagggaatgtccaagagagtcaaattttacaggaacataatgtggggagttccgaggacgatcaaccaggaggcctgttgtacagcttagaaccagtggcacctcaaggggaaaacaaaaaccaggttaacaacccaggcctgttactggaatggcctggagatacaagtgagttggtcactggccttgaaaaaagttgctatgcgcatgctgagcagccacctgtgatgggatggactgttggacctcagatgcttcatcctaaatatggtattttagaagaagagagccaatttgagcctaatatcgccgacaatcatttaatcaggaagcctatttcgataaaaaacatcccaaggaatccactggttgatgctgttgctgctcatgatagaagctcgatgagaaaggtttcagagcttgcaccaccgactgacaagccgaagcctaacgagagaaacatgttgctagaacagataagaaacaagaccttcagcttgaaacctgttgctccagctcagcaaacagcaatgagatcccctgctagaaccagtactagaaacttgaaggttgccgctatcatagaaaaggcaaatgccatacgacaggcagtgggaagtgacgacgaagacgcagatagttggagtgatacataaatcccccaccgtttgccctaccctcttggtgcttctttccatggcagaaaggtcaaactaacaaactaactattggaggcaataactaaacttaacaccaagatttagtttcaacagtagccgccgcggcggaggcggccgacgagggtcgagcagatgaagccggttgcgcccgtctcccccgccatctcctcgcgtccttcccgtgagctgactagctgagctgggtctcgcgtcactccgagtgtgctgcggctgtgcgagtggctacgtagctgaca

SEQ ID NO: 5723 - DNA, 7028 bp, Zea Mays
ccaatggcggggccttgaggtgctcgtggggtgagggagggaggacggcgctggttagtgagggcgttaagcggcggctcggcgcggcgggcggggaggatgatacggcaccagatacggaacgagtatgggctggcggatccggaggtgtacgcggccccgggggaggaggatgacccggaggcgctcctcgagggcgtcgccatggccggcctcgtcggcgtgctccgccagctcggggatctcgccgagtttgcagctgaaatttttcatgaccttcacgaagaggctatggctactgcttctagaggacatggtttaatgctccggttgcagcagttggaggcagaatttccagcagttgaaaaggctattatatctcagacggagcactcaaattatccacatgatgatggagctgagtggcattctaatgttcaacttaaacagaatgtgatcacacaaggagatatgcctcgtttcattatggattcatatgaagaatgtcgtggtccgccacaattgttcacattggataagtttgatgttgctggtgctggagcctccttaaaacgatattcagacccttctttcttcaagacagaacatgcctccaacatgatagaagcggatgttttaattgaaaataaacctcgtagaattaagaagaaggccatgcgttggaggaaaggggcaactcttgaatcattactcactgcaaactcagagtctcaaattacccccaaggatcgaacttctagaaaagttccacctaggacaacaaagttgaaatccaggcaaccacggagtcctgatcataaaaccactagcagaatcttgagggagcatctgcaagaagtgattttatcgcagaaaaaaatcatctccagatattcggtgaggcattactatgtgaaatttggatcgcctgactcaagtgaaactgcacctccttttggagaaatggacagttttggcgcccttgttcaatcttctggtaaattggatctgacaaaagttgttccagtaaacgaatctgatgctgtggatactaaatctgaacccattgatggatcggcttatttggagctaggtgataaacggaatctggggaaacaacatgaaccttttcaacaaaatggcatggtccatagctcagaaaagctgccggattgtccatacttggatattggagaaagtaataacagatcacatttgacatgtgaagagaaaccccgattggctgaggttcctgctgatcagaaagatgttgatggccgcaggcctgatgacatcgtgagtgatcaagacaacttcattggtgcttctaatgacacggacatggaaaacaaagaaggtcttcaaatgaaaactgaatgtgatcccagtgccagtgttgaactggttgaattgaaccgtcacaacaaggaaggtgacaaagtattgtatgccgaacctccagaagtaggtcctgcaatagactcgtcattgggattggataatgcaagcagtggtgaagaaccaacctgtgtggacttgccactgtcaagtgattctgctcccacagtgtcagccaccaatggtccaaactctggttcacaatctggcagacaaatgaatggtgttgactggtccacagacgaagagtcttctaacgatgtggatctaattgacgtgagctcatcttctagtgtagtttctgaaaatggtgacgtacaaaacaatgattgtctcgttagttgtctacaacacgaggaagcgattcactctctgagtgatgatcatgctggtgctatccataattctgatgaacagtcaccgaatacgtctagcaactgggatgacgaagataaaatcagttcagggaatgctgatgatttgtctctccaccctaccaaattgaaccaagaggaaatacaggagttgaagacagaatcggaagaaggcagatctctagaatcaggaagttcacctagcaaagcatcattgccaaataaggatcatgtgtcgatgaatgatgtagaagccgacactgttacaattcctaaagaaactgttgcagatactgcaccaacaggtttggatcctgatggcatcgacgagcgtcaagatggagttgcaccgaaatattcaagcatccacaatagtgtactgtatgaatcatatgatgacaagattgctgaagacacacactctttactagatgatggcctatcaactactttcgatgacgataagcatgttgcagaggatcatcaatttgttgttcttgaacaaaggacttgtccaactagcctcaacacatgcaaggatgattctatgcaaggatgtgccgtggccagggatttcactgatgctgaaaagcttccgggagtcgtttcaggtgtattagcttctcaactggagacagaatctcatgtaggagagacacttgcatccacgtcctatgcattcagtgatgatactgaagcactagagattggtgtccctctagcccctggtacttcctttctacctaacaccagtagttccttggtagaaaaacatgaattgactgaaacagaagaaattgcagaggttggtgaatttgtggttgcaaaagaatcaactactagcgtatttgcagttgatgtggtacctcccaaagagttcattgatgctaacatacatcctgaaaaggtagaggttctggctacaagtttgactgaagaagccactaggctggatttacaactacagtctccttccagggaagttttggaaacaacggaagctattcacagaaattttggggcagtagatgaatcaagagaagatatctctaagaagagtatgttgcagacagacaatagtcctcttattgtagagactacaagtgaaaaatgtagtgacagggatggtgatacacaatttctagtaaaatctgattatcaagaggaattactaaaagagggcagtcataatgctgaagatcgatctctctgcgatttgaacaaggatggtgcagtaaccttgaaaagtaatgcagttgagaaacaaccagtgaatgctggtcaagatttggcgtgggggatgcacgctcaagattctagtagtacaaacccgttcctggatcctgcctacttgatgagccacactcaaatttattcatcttccagtatgagtagccaaccatgtttccctgaagaagaggatttcctttcagagcttgtaatacaacatgacaatatgggagtaactgctgatgccctttgggaacctgcaactccacctgatgatgcgccattaccatcagaaattatgactgaagatgatttcagatccttctgccaagaatatcatgagatagatttttcatctgtcactaactgttctcacagtgaaccagcctcagattctaacaaaattccaaatgcttttctgatcagagagtcagattttccatgttataactctgccttgccagtgaagttagatcaggaagcctgtattcattctaagttctgttctgagtgtgtcgaatattcatgtgctgtggaaagacaaggcactacatcaatggttgtttctggtaaagaagatcgcgtgggcaaggacgagacaccaggagtagatttccatttaaattttctcgagttttccaatgataacagaagtcctgaattaaatatgctctccgttccagtggatttacggcaggaactgcatggcttgcctgaagttgattctcgtgatagttcccctttgctgcataaggagaagactagtgaagaatgctgcttttctttaagcaacaacgttgttgaagtgaaacaagagctggaaatccgtgctgaccttgttccacattcttctattaatgaaaaagtagatggattagatgaggctgtaccggtggaaccagaggcccatgcctgtgccttggatgaatatgacaaccaagatgtcccacacatttcaactagtgagaagaatgaaacccttactttgggcaaacctgttttagtccaggggccagaagtttgtgcctttggtggatttgaatgtgatcctccaatcattccatcaccttcagttgatgagactaaggacaatctagaagtcagaatgaatatgatcctccaatcattccatcattctttgaggacttcttttcaagcagaacagaagtcagaatgctacacctcaggtgaacatgattctcaaaccgttccatttcctttgcatgatgagaatatcaatgaactggatgatcctcctttgagcaatgctgacgaactggaccgggaatcaaaagcttgtgttccacatgaatgtgatgctcaaatcgctccatgttcaactgatgaggatatacatgaattggatcaccctcctttgagcagtcccgctttagtggatcttgaatcagaagaccatgtctcggatgaccgtgattccgaagtcaccccatgtttggttaaagataagattgatgaatctgtagatgctcaaccaaacctgcttcctggggagctagagcaggaaactcatgcaccccctgaattagactttcgagttgctccacaatcagcgaaagaatctgattgctcaactgaatttgattcccaggccgcaccatgttcttcaaatataccagtactagctaacacaacagtgtcgacttgtatttctgccatgcctagcagtgaggaaacgtatcagttgtctcctgttccaccacctactgtacaatttcaaaatgattcctacaaagatcctcaagctctactcgctgattcctacaaagatcctcaagcgccaccccctctccctcctctccagtggaggcttggaaagcctcggctaggacttctgagtagaaaaggctgtatgactgaacctgcaagggtaatagatcctgttttgcagatatcaagccaagagatggatattaggccaggtttgcttgatccaacggatagatctatagaaccagtatcctgtcaagaaatcaaagaagatagatgtgagagttctttgatagatcataatgatcaaaatgtggattttgatagattatcgaccagggttgcagtaactgatgttgcaaggactgaacacaggctatccttagagacttcagaggacattaagcaacaggggcatatttcttcatcggcaacaggagttggggaacacctggatgctgggttcacatcaacaatggcagatgaggaacatctggatgattctgggatgacacatggaacagctctatacttatcagaccctctgtttccattacctacatatgaactgcaggaccctcaaccagatactcgagaaaatagcgagcatcccagtcaaacacatggagctgcatctggggatgataagtcaatggatgctgttggcagcatggaaagcaccctaacaaaaggacatgtttctggaaataggtgctaccagcaacctcagcatggtgaatcgtcctcagagacttcagaccataaagagcatattacaaatgcatcagaggatggtgttaagcatcagtcaggtacaagtgaggcaccttcagacacagcaaagcattctgcaccaggcacgctgttgaaagggaatgtccaagagagtcaaattttacaggaacataatgtggggagttccgaggacgatcaaccaggaggcctgttgtacagcttagaaccagtggcacctcaaggggaaaacaaaaaccaggttaacaacccaggcctgttactggaatggcctggagatacaagtgagttggtcactggccttgaaaaaagttgctatgcgcatgctgagcagccacctgtgatgggatggactgttggacctcagatgcttcatcctaaatatggtattttagaagaagagagccaatttgagcctaatatcgccgacaatcatttaatcaggaagcctatttcgataaaaaacatcccaaggaatccactggttgatgctgttgctgctcatgatagaagctcgatgagaaaggtttcagagcttgcaccaccgactgacaagccgaagcctaacgagagaaacatgttgctagaacagataagaaacaagaccttcagcttgaaacctgttgctccagctcagcaaacagcaatgagatcccctgctagaaccagtactagaaacttgaaggttgccgctatcatagaaaaggcaaatgccatacgacaggcagtgggaagtgacgacgaagacgcagatagttggagtgatacataaatcccccaccgtttgccctaccctcttggtgcttctttccatggcagaaaggtaccgattcatcaagagcattggggacaggatggggatgcacaaccatgtcatcgtttttgtttgccctaccctcttggtgcttctttccatggcagaaaggtaccgattcatcaagagcattggggacaggatggggatgcacaaccatgtcatcgtttttgttagtaatataatgctagtcttgtgtatagtatacgcccataatccttttcattttttgtatgtgtattctttcgaccgattgtttgtatacctgcctctctctcccacagcagcaaaggctgttgcggttggcatgatcctaggatagcatgcatggtctatgtaaattaaacagtagtagttaagtaaagaattgttccatcttttctggaaaaaaaggtgagataatggcatcatcgattccacacagcaagcatagcagaccttgaattgcaaaaatatgaaaaccaatacacccgcttagacgaatttgttgatccatggcaggtcaaactaacaaactaactattggaggcaataactaaacttaacaccaagatttagtttcaacagtagccgccgcggcggaggcggccgacgagggtcgagcagatgaagccggttgcgcccgtctcccccgccatctcctcgcgtccttcccgtgagctgactagctgagctgggtctcgcgtcactccgagtgtgctgcggctgtgcgagtggctacgtagctgaca

SEQ ID NO: 5724 - DNA, 6922 bp, Zea Mays
atgatacggcaccagatacggaacgagtatgggctggcggatccggaggtgtacgcggccccgggggaggaggatgacccggaggcgctcctcgagggcgtcgccatggccggcctcgtcggcgtgctccgccagctcggggatctcgccgagtttgcagctgaaatttttcatgaccttcacgaagaggctatggctactgcttctagaggacatggtttaatgctccggttgcagcagttggaggcagaatttccagcagttgaaaaggctattatatctcagacggagcactcaaattatccacatgatgatggagctgagtggcattctaatgttcaacttaaacagaatgtgatcacacaaggagatatgcctcgtttcattatggattcatatgaagaatgtcgtggtccgccacaattgttcacattggataaaagaaggccatgcgttggaggaaaggggcaactcttgaatcattactcactgcaaactcagagtctcaaattacccccaaggatcgaacttctagaaaagttccacctaggacaacaaagttgaaatccaggcaaccacggagtcctgatcataaaaccactagcagaatcttgagggagcatctgcaagaagtgattttatcgcagaaaaaaatcatctccagatattcggtgaggcattactatgtgaaatttggatcgcctgactcaagtgaaactgcacctccttttggagaaatggacagttttggcgcccttgttcaatcttctggtaaattggatctgacaaaagttgttccagtaaacgaatctgatgctgtggatactaaatctgaacccattgatggatcggcttatttggagctaggtgataaacggaatctggggaaacaacatgaaccttttcaacaaaatggcatggtccatagctcagaaaagctgccggattgtccatacttggatattggagaaagtaataacagatcacatttgacatgtgaagagaaaccccgattggctgaggttcctgctgatcagaaagatgttgatggccgcaggcctgatgacatcgtgagtgatcaagacaacttcattggtgcttctaatgacacggacatggaaaacaaagaaggtcttcaaatgaaaactgaatgtgatcccagtgccagtgttgaactggttgaattgaaccgtcacaacaaggaaggtgacaaagtattgtatgccgaacctccagaagtaggtcctgcaatagactcgtcattgggattggataatgcaagcagtggtgaagaaccaacctgtgtggacttgccactgtcaagtgattctgctcccacagtgtcagccaccaatggtccaaactctggttcacaatctggcagacaaatgaatggtgttgactggtccacagacgaagagtcttctaacgatgtggatctaattgacgtgagctcatcttctagtgtagtttctgaaaatggtgacgtacaaaacaatgattgtctcgttagttgtctacaacacgaggaagcgattcactctctgagtgatgatcatgctggtgctatccataattctgatgaacagtcaccgaatacgtctagcaactgggatgatatggctattggctgcaacaattacaccgagaaagtacatcatccagtggagcatgtccaggatgttgtactagatgatatttctatgatactgagcaaacctaatgatgtttcagaagacgaagataaaatcagttcagggaatgctgatgatttgtctctccaccctaccaaattgaaccaagaggaaatacaggagttgaagacagaatcggaagaaggcagatctctagaatcaggaagttcacctagcaaagcatcattgccaaataaggatcatgtgtcgatgaatgatgtagaagccgacactgttacaattcctaaagaaactgttgcagatactgcaccaacaggtttggatcctgatggcatcgacgagcgtcaagatggagttgcaccgaaatattcaagcatccacaatagtgtactgtatgaatcatatgatgacaagattgctgaagacacacactctttactagatgatggcctatcaactactttcgatgacgataagcatgttgcagaggatcatcaatttgttgttcttgaacaaaggacttgtccaactagcctcaacacatgcaaggatgattctatgcaaggatgtgccgtggccagggatttcactgatgctgaaaagcttccgggagtcgtttcaggtgtattagcttctcaactggagacagaatctcatgtaggagagacacttgcatccacgtcctatgcattcagtgatgatactgaagcactagagattggtgtccctctagcccctggtacttcctttctacctaacaccagtagttccttggtagaaaaacatgaattgactgaaacagaagaaattgcagaggttggtgaatttgtggttgcaaaagaatcaactactagcgtatttgcagttgatgtggtacctcccaaagagttcattgatgctaacatacatcctgaaaaggtagaggttctggctacaagtttgactgaagaagccactaggctggatttacaactacagtctccttccagggaagttttggaaacaacggaagctattcacagaaattttggggcagtagatgaatcaagagaagatatctctaagaagagtatgttgcagacagacaatagtcctcttattgtagagactacaagtgaaaaatgtagtgacagggatggtgatacacaatttctagtaaaatctgattatcaagaggaattactaaaagagggcagtcataatgctgaagatcgatctctctgcgatttgaacaaggatggtgcagtaaccttgaaaagtaatgcagttgagaaacaaccagtgaatgctggtcaagatttggcgtgggggatgcacgctcaagattctagtagtacaaacccgttcctggatcctgcctacttgatgagccacactcaaatttattcatcttccagtatgagtagccaaccatgtttccctgaagaagaggatttcctttcagagcttgtaatacaacatgacaatatgggagtaactgctgatgccctttgggaacctgcaactccacctgatgatgcgccattaccatcagaaattatgactgaagatgatttcagatccttctgccaagaatatcatgagatagatttttcatctgtcactaactgttctcacagtgaaccagcctcagattctaacaaaattccaaatgcttttctgatcagagagtcagattttccatgttataactctgccttgccagtgaagttagatcaggaagcctgtattcattctaagttctgttctgagtgtgtcgaatattcatgtgctgtggaaagacaaggcactacatcaatggttgtttctggtaaagaagatcgcgtgggcaaggacgagacaccaggagtagatttccatttaaattttctcgagttttccaatgataacagaagtcctgaattaaatatgctctccgttccagtggatttacggcaggaactgcatggcttgcctgaagttgattctcgtgatagttcccctttgctgcataaggagaagactagtgaagaatgctgcttttctttaagcaacaacgttgttgaagtgaaacaagagctggaaatccgtgctgaccttgttccacattcttctattaatgaaaaagtagatggattagatgaggctgtaccggtggaaccagaggcccatgcctgtgccttggatgaatatgacaaccaagatgtcccacacatttcaactagtgagaagaatgaaacccttactttgggcaaacctgttttagtccaggggccagaagtttgtgcctttggtggatttgaatgtgatcctccaatcattccatcaccttcagttgatgagactaaggacaatctagaagtcagaatgaatatgatcctccaatcattccatcattctttgaggacttcttttcaagcagaacagaagtcagaatgctacacctcaggtgaacatgattctcaaaccgttccatttcctttgcatgatgagaatatcaatgaactggatgatcctcctttgagcaatgctgacgaactggaccgggaatcaaaagcttgtgttccacatgaatgtgatgctcaaatcgctccatgttcaactgatgaggatatacatgaattggatcaccctcctttgagcagtcccgctttagtggatcttgaatcagaagaccatgtctcggatgaccgtgattccgaagtcaccccatgtttggttaaagataagattgatgaatctgtagatgctcaaccaaacctgcttcctggggagctagagcaggaaactcatgcaccccctgaattagactttcgagttgctccacaatcagcgaaagaatctgattgctcaactgaatttgattcccaggccgcaccatgttcttcaaatataccagtactagctaacacaacagtgtcgacttgtatttctgccatgcctagcagtgaggaaacgtatcagttgtctcctgttccaccacctactgtacaatttcaaaatgattcctacaaagatcctcaagctctactcgctgattcctacaaagatcctcaagcgccaccccctctccctcctctccagtggaggcttggaaagcctcggctaggacttctgagtagaaaaggctgtatgactgaacctgcaagggtaatagatcctgttttgcagatatcaagccaagagatggatattaggccaggtttgcttgatccaacggatagatctatagaaccagtatcctgtcaagaaatcaaagaagatagatgtgagagttctttgatagatcataatgatcaaaatgtggattttgatagattatcgaccagggttgcagtaactgatgttgcaaggactgaacacaggctatccttagagacttcagaggacattaagcaacaggggcatatttcttcatcggcaacaggagttggggaacacctggatgctgggttcacatcaacaatggcagatgaggaacatctggatgattctgggatgacacatggaacagctctatacttatcagaccctctgtttccattacctacatatgaactgcaggaccctcaaccagatactcgagaaaatagcgagcatcccagtcaaacacatggagctgcatctggggatgataagtcaatggatgctgttggcagcatggaaagcaccctaacaaaaggacatgtttctggaaataggtgctaccagcaacctcagcatggtgaatcgtcctcagagacttcagaccataaagagcatattacaaatgcatcagaggatggtgttaagcatcagtcaggtacaagtgaggcaccttcagacacagcaaagcattctgcaccaggcacgctgttgaaagggaatgtccaagagagtcaaattttacaggaacataatgtggggagttccgaggacgatcaaccaggaggcctgttgtacagcttagaaccagtggcacctcaaggggaaaacaaaaaccaggttaacaacccaggcctgttactggaatggcctggagatacaagtgagttggtcactggccttgaaaaaagttgctatgcgcatgctgagcagccacctgtgatgggatggactgttggacctcagatgcttcatcctaaatatggtattttagaagaagagagccaatttgagcctaatatcgccgacaatcatttaatcaggaagcctatttcgataaaaaacatcccaaggaatccactggttgatgctgttgctgctcatgatagaagctcgatgagaaaggtttcagagcttgcaccaccgactgacaagccgaagcctaacgagagaaacatgttgctagaacagataagaaacaagaccttcagcttgaaacctgttgctccagctcagcaaacagcaatgagatcccctgctagaaccagtactagaaacttgaaggttgccgctatcatagaaaaggcaaatgccatacgacaggcagtgggaagtgacgacgaagacgcagatagttggagtgatacataaatcccccaccgtttgccctaccctcttggtgcttctttccatggcagaaaggtaccgattcatcaagagcattggggacaggatggggatgcacaaccatgtcatcgtttttgtttgccctaccctcttggtgcttctttccatggcagaaaggtaccgattcatcaagagcattggggacaggatggggatgcacaaccatgtcatcgtttttgttagtaatataatgctagtcttgtgtatagtatacgcccataatccttttcattttttgtatgtgtattctttcgaccgattgtttgtatacctgcctctctctcccacagcagcaaaggctgttgcggttggcatgatcctaggatagcatgcatggtctatgtaaattaaacagtagtagttaagtaaagaattgttccatcttttctggaaaaaaaggtgagataatggcatcatcgattccacacagcaagcatagcagaccttgaattgcaaaaatatgaaaaccaatacacccgcttagacgaatttgttgatccatggcaggtcaaactaacaaactaactattggaggcaataactaaacttaacaccaagatttagtttcaacagtagccgccgcggcggaggcggccgacgagggtcgagcagatgaagccggttgcgcccgtctcccccgccatctcctcgcgtccttcccgtgagctgactagctgagctgggtctcgcgtcactccgagtgtgctgcggctgtgcgagtggctacgtagctgaca

SEQ ID NO: 5725 - DNA, 6557 bp, Zea Mays
atgatacggcaccagatacggaacgagtatgggctggcggatccggaggtgtacgcggccccgggggaggaggatgacccggaggcgctcctcgagggcgtcgccatggccggcctcgtcggcgtgctccgccagctcggggatctcgccgagtttgcagctgaaatttttcatgaccttcacgaagaggctatggctactgcttctagaggacatggtttaatgctccggttgcagcagttggaggcagaatttccagcagttgaaaaggctattatatctcagacggagcactcaaattatccacatgatgatggagctgagtggcattctaatgttcaacttaaacagaatgtgatcacacaaggagatatgcctcgtttcattatggattcatatgaagaatgtcgtggtccgccacaattgttcacattggataagtttgatgttgctggtgctggagcctccttaaaacgatattcagacccttctttcttcaagacagaacatgcctccaacatgatagaagcggatgttttaattgaaaataaacctcgtagaattaagaagaaggccatgcgttggaggaaaggggcaactcttgaatcattactcactgcaaactcagagtctcaaattacccccaaggatcgaacttctagaaaagttccacctaggacaacaaagttgaaatccaggcaaccacggagtcctgatcataaaaccactagcagaatcttgagggagcatctgcaagaagtgattttatcgcagaaaaaaatcatctccagatattcggtgaggcattactatgtgaaatttggatcgcctgactcaagtgaaactgcacctccttttggagaaatggacagttttggcgcccttgttcaatcttctggtaaattggatctgacaaaagttgttccagtaaacgaatctgatgctgtggatactaaatctgaacccattgatggatcggcttatttggagctaggtgataaacggaatctggggaaacaacatgaaccttttcaacaaaatggcatggtccatagctcagaaaagctgccggattgtccatacttggatattggagaaagtaataacagatcacatttgacatgtgaagagaaaccccgattggctgaggttcctgctgatcagaaagatgttgatggccgcaggcctgatgacatcgtgagtgatcaagacaacttcattggtgcttctaatgacacggacatggaaaacaaagaaggtcttcaaatgaaaactgaatgtgatcccagtgccagtgttgaactggttgaattgaaccgtcacaacaaggaaggtgacaaagtattgtatgccgaacctccagaagtaggtcctgcaatagactcgtcattgggattggataatgcaagcagtggtgaagaaccaacctgtgtggacttgccactgtcaagtgattctgctcccacagtgtcagccaccaatggtccaaactctggttcacaatctggcagacaaatgaatggtgttgactggtccacagacgaagagtcttctaacgatgtggatctaattgacgtgagctcatcttctagtgtagtttctgaaaatggtgacgtacaaaacaatgattgtctcgttagttgtctacaacacgaggaagcgattcactctctgagtgatgatcatgctggtgctatccataattctgatgaacagtcaccgaatacgtctagcaactgggatgatatggctattggctgcaacaattacaccgagaaagtacatcatccagtggagcatgtccaggatgttgtactagatgatatttctatgatactgagcaaacctaatgatgtttcagaagacgaagataaaatcagttcagggaatgctgatgatttgtctctccaccctaccaaattgaaccaagaggaaatacaggagttgaagacagaatcggaagaaggcagatctctagaatcaggaagttcacctagcaaagcatcattgccaaataaggatcatgtgtcgatgaatgatgtagaagccgacactgttacaattcctaaagaaactgttgcagatactgcaccaacaggtttggatcctgatggcatcgacgagcgtcaagatggagttgcaccgaaatattcaagcatccacaatagtgtactgtatgaatcatatgatgacaagattgctgaagacacacactctttactagatgatggcctatcaactactttcgatgacgataagcatgttgcagaggatcatcaatttgttgttcttgaacaaaggacttgtccaactagcctcaacacatgcaaggatgattctatgcaaggatgtgccgtggccagggatttcactgatgctgaaaagcttccgggagtcgtttcaggtgtattagcttctcaactggagacagaatctcatgtaggagagacacttgcatccacgtcctatgcattcagtgatgatactgaagcactagagattggtgtccctctagcccctggtacttcctttctacctaacaccagtagttccttggtagaaaaacatgaattgactgaaacagaagaaattgcagaggttggtgaatttgtggttgcaaaagaatcaactactagcgtatttgcagttgatgtggtacctcccaaagagttcattgatgctaacatacatcctgaaaaggtagaggttctggctacaagtttgactgaagaagccactaggctggatttacaactacagtctccttccagggaagttttggaaacaacggaagctattcacagaaattttggggcagtagatgaatcaagagaagatatctctaagaagagtatgttgcagacagacaatagtcctcttattgtagagactacaagtgaaaaatgtagtgacagggatggtgatacacaatttctagtaaaatctgattatcaagaggaattactaaaagagggcagtcataatgctgaagatcgatctctctgcgatttgaacaaggatggtgcagtaaccttgaaaagtaatgcagttgagaaacaaccagtgaatgctggtcaagatttggcgtgggggatgcacgctcaagattctagtagtacaaacccgttcctggatcctgcctacttgatgagccacactcaaatttattcatcttccagtatgagtagccaaccatgtttccctgaagaagaggatttcctttcagagcttgtaatacaacatgacaatatgggagtaactgctgatgccctttgggaacctgcaactccacctgatgatgcgccattaccatcagaaattatgactgaagatgatttcagatccttctgccaagaatatcatgagatagatttttcatctgtcactaactgttctcacagtgaaccagcctcagattctaacaaaattccaaatgcttttctgatcagagagtcagattttccatgttataactctgccttgccagtgaagttagatcaggaagcctgtattcattctaagttctgttctgagtgtgtcgaatattcatgtgctgtggaaagacaaggcactacatcaatggttgtttctggtaaagaagatcgcgtgggcaaggacgagacaccaggagtagatttccatttaaattttctcgagttttccaatgataacagaagtcctgaattaaatatgctctccgttccagtggatttacggcaggaactgcatggcttgcctgaagttgattctcgtgatagttcccctttgctgcataaggagaagactagtgaagaatgctgcttttctttaagcaacaacgttgttgaagtgaaacaagagctggaaatccgtgctgaccttgttccacattcttctattaatgaaaaagtagatggattagatgaggctgtaccggtggaaccagaggcccatgcctgtgccttggatgaatatgacaaccaagatgtcccacacatttcaactagtgagaagaatgaaacccttactttgggcaaacctgttttagtccaggggccagaagtttgtgcctttggtggatttgaatgtgatcctccaatcattccatcaccttcagttgatgagactaaggacaatctagaagtcagaatgaatatgatcctccaatcattccatcattctttgaggacttcttttcaagcagaacagaagtcagaatgctacacctcaggtgaacatgattctcaaaccgttccatttcctttgcatgatgagaatatcaatgaactggatgatcctcctttgagcaatgctgacgaactggaccgggaatcaaaagcttgtgttccacatgaatgtgatgctcaaatcgctccatgttcaactgatgaggatatacatgaattggatcaccctcctttgagcagtcccgctttagtggatcttgaatcagaagaccatgtctcggatgaccgtgattccgaagtcaccccatgtttggttaaagataagattgatgaatctgtagatgctcaaccaaacctgcttcctggggagctagagcaggaaactcatgcaccccctgaattagactttcgagttgctccacaatcagcgaaagaatctgattgctcaactgaatttgattcccaggccgcaccatgttcttcaaatataccagtactagctaacacaacagtgtcgacttgtatttctgccatgcctagcagtgaggaaacgtatcagttgtctcctgttccaccacctactgtacaatttcaaaatgattcctacaaagatcctcaagctctactcgctgattcctacaaagatcctcaagcgccaccccctctccctcctctccagtggaggcttggaaagcctcggctaggacttctgagtagaaaaggctgtatgactgaacctgcaagggtaatagatcctgttttgcagatatcaagccaagagatggatattaggccaggtttgcttgatccaacggatagatctatagaaccagtatcctgtcaagaaatcaaagaagatagatgtgagagttctttgatagatcataatgatcaaaatgtggattttgatagattatcgaccagggttgcagtaactgatgttgcaaggactgaacacaggctatccttagagacttcagaggacattaagcaacaggggcatatttcttcatcggcaacaggagttggggaacacctggatgctgggttcacatcaacaatggcagatgaggaacatctggatgattctgggatgacacatggaacagctctatacttatcagaccctctgtttccattacctacatatgaactgcaggaccctcaaccagatactcgagaaaatagcgagcatcccagtcaaacacatggagctgcatctggggatgataagtcaatggatgctgttggcagcatggaaagcaccctaacaaaaggacatgtttctggaaataggtgctaccagcaacctcagcatggtgaatcgtcctcagagacttcagaccataaagagcatattacaaatgcatcagaggatggtgttaagcatcagtcaggtacaagtgaggcaccttcagacacagcaaagcattctgcaccaggcacgctgttgaaagggaatgtccaagagagtcaaattttacaggaacataatgtggggagttccgaggacgatcaaccaggaggcctgttgtacagcttagaaccagtggcacctcaaggggaaaacaaaaaccaggttaacaacccaggcctgttactggaatggcctggagatacaagtgagttggtcactggccttgaaaaaagttgctatgcgcatgctgagcagccacctgtgatgggatggactgttggacctcagatgcttcatcctaaatatggtattttagaagaagagagccaatttgagcctaatatcgccgacaatcatttaatcaggaagcctatttcgataaaaaacatcccaaggaatccactggttgatgctgttgctgctcatgatagaagctcgatgagaaaggtttcagagcttgcaccaccgactgacaagccgaagcctaacgagagaaacatgttgctagaacagataagaaacaagaccttcagcttgaaacctgttgctccagctcagcaaacagcaatgagatcccctgctagaaccagtactagaaacttgaaggttgccgctatcatagaaaaggcaaatgccatacgacaggcagtgggaagtgacgacgaagacgcagatagttggagtgatacataaatcccccaccgtttgccctaccctcttggtgcttctttccatggcagaaaggtcaaactaacaaactaactattggaggcaataactaaacttaacaccaagatttagtttcaacagtagccgccgcggcggaggcggccgacgagggtcgagcagatgaagccggttgcgcccgtctcccccgccatctcctcgcgtccttcccgtgagctgactagctgagctgggtctcgcgtcactccgagtgtgctgcggctgtgcgagtggctacgtagctgaca

SEQ ID NO: 5726 - DNA, 7345 bp, Zea Mays
atgatacggcaccagatacggaacgagtatgggctggcggatccggaggtgtacgcggccccgggggaggaggatgacccggaggcgctcctcgagggcgtcgccatggccggcctcgtcggcgtgctccgccagctcggggatctcgccgagtttgcagctgaaatttttcatgaccttcacgaagaggctatggctactgcttctagaggacatggtttaatgctccggttgcagcagttggaggcagaatttccagcagttgaaaaggctattatatctcagacggagcactcaaattatccacatgatgatggagctgagtggcattctaatgttcaacttaaacagaatgtgatcacacaaggagatatgcctcgtttcattatggattcatatgaagaatgtcgtggtccgccacaattgttcacattggataagtatggagctgttgtcttttgtgaacatctactatgtgcgaaagggcatctagctgagttggttaggtggcctgagtagcactcctcaggtcctcagttcgaaagttcgaatcccagtgggaacgaatttcaggaccttctttggccggggctccgattgagcttcttcttaataataatacctataataccgcgggggcggtcttatcccctatcggccgagttttttgaacatttacgcaaccgagtttttttttgaacattttctgcaatgacacactaggattattcttcaggtttgatgttgctggtgctggagcctccttaaaacgatattcagacccttctttcttcaagacagaacatgcctccaacatgatagaagcggatgttttaattgaaaataaacctcgtagaattaagaagaaggccatgcgttggaggaaaggggcaactcttgaatcattactcactgcaaactcagagtctcaaattacccccaaggatcgaacttctagaaaagttccacctaggacaacaaagttgaaatccaggcaaccacggagtcctgatcataaaaccactagcagaatcttgagggagcatctgcaagaagtgattttatcgcagaaaaaaatcatctccagatattcggtgaggcattactatgtgaaatttggatcgcctgactcaagtgaaactgcacctccttttggagaaatggacagttttggcgcccttgttcaatcttctggtaaattggatctgacaaaagttgttccagtaaacgaatctgatgctgtggatactaaatctgaacccattgatggatcggcttatttggagctaggtgataaacggaatctggggaaacaacatgaaccttttcaacaaaatggcatggtccatagctcagaaaagctgccggattgtccatacttggatattggagaaagtaataacagatcacatttgacatgtgaagagaaaccccgattggctgaggttcctgctgatcagaaagatgttgatggccgcaggcctgatgacatcgtgagtgatcaagacaacttcattggtgcttctaatgacacggacatggaaaacaaagaaggtcttcaaatgaaaactgaatgtgatcccagtgccagtgttgaactggttgaattgaaccgtcacaacaaggaaggtgacaaagtattgtatgccgaacctccagaagtaggtcctgcaatagactcgtcattgggattggataatgcaagcagtggtgaagaaccaacctgtgtggacttgccactgtcaagtgattctgctcccacagtgtcagccaccaatggtccaaactctggttcacaatctggcagacaaatgaatggtgttgactggtccacagacgaagagtcttctaacgatgtggatctaattgacgtgagctcatcttctagtgtagtttctgaaaatggtgacgtacaaaacaatgattgtctcgttagttgtctacaacacgaggaagcgattcactctctgagtgatgatcatgctggtgctatccataattctgatgaacagtcaccgaatacgtctagcaactgggatgatatggctattggctgcaacaattacaccgagaaagtacatcatccagtggagcatgtccaggatgttgtactagatgatatttctatgatactgagcaaacctaatgatgtttcagaagacgaagataaaatcagttcagggaatgctgatgatttgtctctccaccctaccaaattgaaccaagaggaaatacaggagttgaagacagaatcggaagaaggcagatctctagaatcaggaagttcacctagcaaagcatcattgccaaataaggatcatgtgtcgatgaatgatgtagaagccgacactgttacaattcctaaagaaactgttgcagatactgcaccaacaggtttggatcctgatggcatcgacgagcgtcaagatggagttgcaccgaaatattcaagcatccacaatagtgtactgtatgaatcatatgatgacaagattgctgaagacacacactctttactagatgatggcctatcaactactttcgatgacgataagcatgttgcagaggatcatcaatttgttgttcttgaacaaaggacttgtccaactagcctcaacacatgcaaggatgattctatgcaaggatgtgccgtggccagggatttcactgatgctgaaaagcttccgggagtcgtttcaggtgtattagcttctcaactggagacagaatctcatgtaggagagacacttgcatccacgtcctatgcattcagtgatgatactgaagcactagagattggtgtccctctagcccctggtacttcctttctacctaacaccagtagttccttggtagaaaaacatgaattgactgaaacagaagaaattgcagaggttggtgaatttgtggttgcaaaagaatcaactactagcgtatttgcagttgatgtggtacctcccaaagagttcattgatgctaacatacatcctgaaaaggtagaggttctggctacaagtttgactgaagaagccactaggctggatttacaactacagtctccttccagggaagttttggaaacaacggaagctattcacagaaattttggggcagtagatgaatcaagagaagatatctctaagaagagtatgttgcagacagacaatagtcctcttattgtagagactacaagtgaaaaatgtagtgacagggatggtgatacacaatttctagtaaaatctgattatcaagaggaattactaaaagagggcagtcataatgctgaagatcgatctctctgcgatttgaacaaggatggtgcagtaaccttgaaaagtaatgcagttgagaaacaaccagtgaatgctggtcaagatttggcgtgggggatgcacgctcaagattctagtagtacaaacccgttcctggatcctgcctacttgatgagccacactcaaatttattcatcttccagtatgagtagccaaccatgtttccctgaagaagaggatttcctttcagagcttgtaatacaacatgacaatatgggagtaactgctgatgccctttgggaacctgcaactccacctgatgatgcgccattaccatcagaaattatgactgaagatgatttcagatccttctgccaagaatatcatgagatagatttttcatctgtcactaactgttctcacagtgaaccagcctcagattctaacaaaattccaaatgcttttctgatcagagagtcagattttccatgttataactctgccttgccagtgaagttagatcaggaagcctgtattcattctaagttctgttctgagtgtgtcgaatattcatgtgctgtggaaagacaaggcactacatcaatggttgtttctggtaaagaagatcgcgtgggcaaggacgagacaccaggagtagatttccatttaaattttctcgagttttccaatgataacagaagtcctgaattaaatatgctctccgttccagtggatttacggcaggaactgcatggcttgcctgaagttgattctcgtgatagttcccctttgctgcataaggagaagactagtgaagaatgctgcttttctttaagcaacaacgttgttgaagtgaaacaagagctggaaatccgtgctgaccttgttccacattcttctattaatgaaaaagtagatggattagatgaggctgtaccggtggaaccagaggcccatgcctgtgccttggatgaatatgacaaccaagatgtcccacacatttcaactagtgagaagaatgaaacccttactttgggcaaacctgttttagtccaggggccagaagtttgtgcctttggtggatttgaatgtgatcctccaatcattccatcaccttcagttgatgagactaaggacaatctagaagtcagaatgaatatgatcctccaatcattccatcattctttgaggacttcttttcaagcagaacagaagtcagaatgctacacctcaggtgaacatgattctcaaaccgttccatttcctttgcatgatgagaatatcaatgaactggatgatcctcctttgagcaatgctgacgaactggaccgggaatcaaaagcttgtgttccacatgaatgtgatgctcaaatcgctccatgttcaactgatgaggatatacatgaattggatcaccctcctttgagcagtcccgctttagtggatcttgaatcagaagaccatgtctcggatgaccgtgattccgaagtcaccccatgtttggttaaagataagattgatgaatctgtagatgctcaaccaaacctgcttcctggggagctagagcaggaaactcatgcaccccctgaattagactttcgagttgctccacaatcagcgaaagaatctgattgctcaactgaatttgattcccaggccgcaccatgttcttcaaatataccagtactagctaacacaacagtgtcgacttgtatttctgccatgcctagcagtgaggaaacgtatcagttgtctcctgttccaccacctactgtacaatttcaaaatgattcctacaaagatcctcaagctctactcgctgattcctacaaagatcctcaagcgccaccccctctccctcctctccagtggaggcttggaaagcctcggctaggacttctgagtagaaaaggctgtatgactgaacctgcaagggtaatagatcctgttttgcagatatcaagccaagagatggatattaggccaggtttgcttgatccaacggatagatctatagaaccagtatcctgtcaagaaatcaaagaagatagatgtgagagttctttgatagatcataatgatcaaaatgtggattttgatagattatcgaccagggttgcagtaactgatgttgcaaggactgaacacaggctatccttagagacttcagaggacattaagcaacaggggcatatttcttcatcggcaacaggagttggggaacacctggatgctgggttcacatcaacaatggcagatgaggaacatctggatgattctgggatgacacatggaacagctctatacttatcagaccctctgtttccattacctacatatgaactgcaggaccctcaaccagatactcgagaaaatagcgagcatcccagtcaaacacatggagctgcatctggggatgataagtcaatggatgctgttggcagcatggaaagcaccctaacaaaaggacatgtttctggaaataggtgctaccagcaacctcagcatggtgaatcgtcctcagagacttcagaccataaagagcatattacaaatgcatcagaggatggtgttaagcatcagtcaggtacaagtgaggcaccttcagacacagcaaagcattctgcaccaggcacgctgttgaaagggaatgtccaagagagtcaaattttacaggaacataatgtggggagttccgaggacgatcaaccaggaggcctgttgtacagcttagaaccagtggcacctcaaggggaaaacaaaaaccaggttaacaacccaggcctgttactggaatggcctggagatacaagtgagttggtcactggccttgaaaaaagttgctatgcgcatgctgagcagccacctgtgatgggatggactgttggacctcagatgcttcatcctaaatatggtattttagaagaagagagccaatttgagcctaatatcgccgacaatcatttaatcaggaagcctatttcgataaaaaacatcccaaggaatccactggttgatgctgttgctgctcatgatagaagctcgatgagaaaggtttcagagcttgcaccaccgactgacaagccgaagcctaacgagagaaacatgttgctagaacagataagaaacaagaccttcagcttgaaacctgttgctccagctcagcaaacagcaatgagatcccctgctagaaccagtactagaaacttgaaggttgccgctatcatagaaaaggcaaatgccatacgacaggcagtgggaagtgacgacgaagacgcagatagttggagtgatacataaatcccccaccgtttgccctaccctcttggtgcttctttccatggcagaaaggtaccgattcatcaagagcattggggacaggatggggatgcacaaccatgtcatcgtttttgtttgccctaccctcttggtgcttctttccatggcagaaaggtaccgattcatcaagagcattggggacaggatggggatgcacaaccatgtcatcgtttttgttagtaatataatgctagtcttgtgtatagtatacgcccataatccttttcattttttgtatgtgtattctttcgaccgattgtttgtatacctgcctctctctcccacagcagcaaaggctgttgcggttggcatgatcctaggatagcatgcatggtctatgtaaattaaacagtagtagttaagtaaagaattgttccatcttttctggaaaaaaaggtgagataatggcatcatcgattccacacagcaagcatagcagaccttgaattgcaaaaatatgaaaaccaatacacccgcttagacgaatttgttgatccatggcaggtcaaactaacaaactaactattggaggcaataactaaacttaacaccaagatttagtttcaacagtagccgccgcggcggaggcggccgacgagggtcgagcagatgaagccggttgcgcccgtctcccccgccatctcctcgcgtccttcccgtgagctgactagctgagctgggtctcgcgtcactccgagtgtgctgcggctgtgcgagtggctacgtagctgaca

SEQ ID NO: 5727 - DNA, 953 bp, Zea Mays
aaatggacggagtggccaagtacagtacacgtcaactatcagaacgttcagtgtgcctctctaggcgacaaggatccaatccaattcggtgcctgaaactttcatgaatcgaatgatcatgaatacaactcagaaagctaatttggtggaacaagatgctaaggtttttgtgaaacaagccccacagttcaaaaggtgggggcgaaaacatccatttgttcggtatgggttaccactcatttccttgacagtgtttggtgcagtgggacttgctcaccttatacagggcagcaaagaagtgaccaaggaaaaggaggatatggaatgggaggttgtagagacaacaaaagctctaagtcgaacagggccagtggaaggagcctataagcctaagaaactctctctagaggacgaactgaaggctttgcagcagaaggttgacataaacagctacgactacaagcccatcccaagacccagtgagaaataagtgaagatgaagaccgtttgctagtgcgtcgagtggatgtttgtttcttgatactttcgtcgtctcgtcttgtcacaagttttgtatgaatgtacggagctgattcaagtttgaaattagaatatgaataggaataagtgaagctgtagagaactggtacgaggatccttgaaccgtttgcatatgtttgtttccccccccccccccccccccccccttttttgggttagtaaattctgatgtgtctgatcagttttctagtgtttatttacagaggaaaaaatataaaggtacagtgcatcgtgttgatctagtttttttgtcgtattattaccagcttgtgtttcattttttttgctcttcatttgttttttattacacatttgtatggttctggcagacaaagaggtaataattcattttttactcacagtgcacataagcaaccggttgtgaatctaag

SEQ ID NO: 5728 - DNA, 1231 bp, Zea Mays
acaatagacgtattataaactacggtttcgaggcccaaaccctctctgggtcgctgtctgctcccgtactcccccgtatctgccgtctgccgagcgagcggccgacgccgcacctgcccagctccgtcgctccgtgccccagccctgtccgcggccgccgagttgccggagcgtctggagaacgcccagccaagctctgtccccgccgctaccagcccaacgccctgttccacgtctgccccgccgccgaggacgaggcggccaactcgggcggtccggcccacgtccgccctccggatccggtcctgcgctcagccgccgaggcaggccgagctcttcctcgcccccgccctatcgagctccgcctacaccagaatccagattccaggttccagatgatcatgaatacaactcagaaagctaatttggtggaacaagatgctaaggtttttgtgaaacaagccccacagttcaaaaggtgggggcgaaaacatccatttgttcggtatgggttaccactcatttccttgacagtgtttggtgcagtgggacttgctcaccttatacagggcagaagtgaccaaggaaaaggaggatatggaatgggaggttgtagagacaacaaaagctctaagtcgaacagggccagtggaaggagcctataagcctaagaaactctctctagaggacgaactgaaggctttgcagcagaaggttgacataaacagctacgactacaagcccatcccaagacccagtgagaaataagtgaagatgaagaccgtttgctagtgcgtcgagtggatgtttgtttcttgatactttcgtcgtctcgtcttgtcacaagttttgtatgaatgtacggagctgattcaagtttgaaattagaatatgaataggaataagtgaagctgtagagaactggtacgaggatccttgaaccgtttgcatatgtttgtttccccccccccccccccccccccccttttttgggttagtaaattctgatgtgtctgatcagttttctagtgtttatttacagaggaaaaaatataaaggtacagtgcatcgtgttgatctagtttttttgtcgtattattaccagcttgtgtttcattttttttgctcttcatttgttttttattacacatttgtatggttctggcagacaaagaggtaataattcattttttactcacagtgcacataagcaaccggttgtgaatctaag

SEQ ID NO: 5729 - DNA, 917 bp, Zea Mays
aggaaacattgaagacttcgtcaagaggcccaagatagacaacaatgttattaaaacgacaaaacgttcatggatgatgatcatgaatacaactcagaaagctaatttggtggaacaagatgctaaggtttttgtgaaacaagccccacagttcaaaaggtgggggcgaaaacatccatttgttcggtatgggttaccactcatttccttgacagtgtttggtgcagtgggacttgctcaccttatacagggcagcaaagaagtgaccaaggaaaaggaggatatggaatgggaggttgtagagacaacaaaagctctaagtcgaacagggccagtggaaggagcctataagcctaagaaactctctctagaggacgaactgaaggctttgcagcagaaggttgacataaacagctacgactacaagcccatcccaagacccagtgagaaataagtgaagatgaagaccgtttgctagtgcgtcgagtggatgtttgtttcttgatactttcgtcgtctcgtcttgtcacaagttttgtatgaatgtacggagctgattcaagtttgaaattagaatatgaataggaataagtgaagctgtagagaactggtacgaggatccttgaaccgtttgcatatgtttgtttccccccccccccccccccccccccttttttgggttagtaaattctgatgtgtctgatcagttttctagtgtttatttacagaggaaaaaatataaaggtacagtgcatcgtgttgatctagtttttttgtcgtattattaccagcttgtgtttcattttttttgctcttcatttgttttttattacacatttgtatggttctggcagacaaagaggtaataattcattttttactcacagtgcacataagcaaccggttgtgaatctaag

SEQ ID NO: 5730 - DNA, 1239 bp, Zea Mays
ttctcactataaatagggcaaggcacttgaggccattccagcagtagctagctcactccatcgtctggccaaccttctggccatgacatacacgcatggttaattagatctcgaacccttgtattcattcccatccgttcctgcttttggtcttgttcatccacagaccacagagagcccagccactacgtagatagatagatagatacatacatactcaacgaactggcggcgaggatctgaggagaattaggaaaaaagaagggtatggaacaacccttgaagctcaggagggatagcgcctaggaaaacacatagatcggagccggccgcgaggagaaagaaagagccaagagatatgtgtgatgaataatctacatggatcttggctagcttttgtgttctcctctggaggcgtggttctgtctatcaatctgaagcgctatctatcctgagctccacggcttgttcttaccacacgccggcggctggccggccggccggccgatcgatcgatcgatggagctccatcctcgctcccatatatgaataatgacctcttgccgtcgtctgcctcctgttcctgtacttgttgttcttgtgatatatgcagcatgcaggtgagcgtgcgtgagaggtcgtacgtagtctctcgtcaggtacacgcgcggacatgtcctcctagctagctttgcttgaggaagtacatacatgaacatccccagcactccagcagtacgtgggcattgctgcagtgtcctgctcctgcggccgaggcaggcgagcggcgcgcgggtttccagaggcaatgcaatgcaagagccctcgcgcgcccaccaccaccagctttccagtccggttgacgtgccttgatgactgccatttcaggacatgtaggtaggtaggtaggtaggtagggccccagagccgagccggatcttctacgccgccggacagccatacacccccgcgctgcccaagtgcccatgccgcccagttgctcacaatcgcaagctctcattgatggtggccagaaacaatacactgatctcgttcttctcgtgagagttttcaatgtctttctactagtactctaccacgtactgctgctagagcacaagtactgccgggtgatattaataagaatattactaatattaattgaaatccaatgtaccctgcccccaaaatcttcaatgttctgtagtactcggctggcagaggagcatttgctccccc

SEQ ID NO: 5731 - DNA, 1766 bp, Zea Mays
ttctcactataaatagggcaaggcacttgaggccattccagcagtagctagctcactccatcgtctggccaaccttctggccatgacatacacgcatggttaattagatctcgaacccttgtattcattcccatccgttcctgcttttggtcttgttcatccacagaccacagagagcccagccactacgtagatagatagatagatacatacatactcaacgaactggcggcgaggatctgaggagaattaggaaaaaagaagggtatggaacaacccttgaagctcaggagggatagcgcctaggaaaacacatagatcggagccggccgcgaggagaaagaaagagccaagagatatgtgtgatgaataatctacatggatcttggctagcttttgtgttctcctctggaggcgtggttctgtctatcaatctgaagcgctatctatcctgagctccacggcttgttcttaccacacgccggcggctggccggccggccggccgatcgatcgatcgatggagctccatcctcgctcccatatatgaataatgacctcttgccgtcgtctgcctcctgttcctgtacttgttgttcttgtgatatatgcagcatgcaggtgagcgtgcgtgagaggtcgtacgtagtctctcgtcaggtacacgcgcggacatgtcctcctagctagctttgcttgaggaagtacatacatgaacatccccagcactccagcagtacgtgggcattgctgcagtgtcctgctcctgcggccgaggtatctatctatctatctcctcctccgtccgatccctgctgctggtgctggctccgtccatgacttgtttactgtactctatgcccgtgcaagcgatgaggtgaggtctgcccgcgctcattcatgaatgcatgcatgcagagccgagcctctgccaaacaagcagtcatgggcacgccccgggtttcacttgctactgtagtacagagcttgcatgagtaaatgctgtgacccgtaaccgattctttcaagagcatgcgtggtacggtgcccatcgtcatctctactcatctgggagtatagtaaattaattcattcgttcatgaatgtaactgactgactaaaccacctactttagctgctcttgttgtgtgagaaaaatcgaaatggtctatctctgttgttgaaactactgccatatatatagattcattcattcaagctcgagtgcccattattccaaaactacaacaacaaagtaaccgactaaaactttttttttcttttctgttcttttgagcgcgcaggcaggcgagcggcgcgcgggtttccagaggcaatgcaatgcaagagccctcgcgcgcccaccaccaccagctttccagtccggttgacgtgccttgatgactgccatttcaggacatgtaggtaggtaggtaggtaggtagggccccagagccgagccggatcttctacgccgccggacagccatacacccccgcgctgcccaagtgcccatgccgcccagttgctcacaatcgcaagctctcattgatggtggccagaaacaatacactgatctcgttcttctcgtgagagttttcaatgtctttctactagtactctaccacgtactgctgctagagcacaagtactgccgggtgatattaataagaatattactaatattaattgaaatccaatgtaccctgcccccaaaatcttcaatgttctgtagtactcggctggcagaggagcatttgctccccc

SEQ ID NO: 5732 - DNA, 2146 bp, Zea Mays
ccttcaccctcctcgacgtcgcatctccctttccttttctcccactgcactgctgctccgctgccgctaccctttccctctcccttctcgtcctcggtcctccccaacccatggccacggccaccaccacccactgccccttctcccaccacgctatttatcgcggctgcacgactcctgcccatcaggcgccatagagacgcgtgggaccgaagccgccgatcaagcgctgctcggggcggagcagcggccggcggtggtgagtgctggcagacaggccggcaggtcaggcagagtgaccagctggtgagtcgaagcttgagcggggagctggactttggcgggttccggcgggctccggagcggagatggtgctggatctcaatgtagcgtcgccggcggactcgggcacgtcgagctcgtccgtcctcaactccgcggacggcggcttccggttcggcctgctcgggagccccgtcgacgacgacgactgctccggtgagatggcgcctggcgcgtccacggggttcatgacgcggcagctcttcccgtccccgaccccgccggccgagccggagccggagccggtggcggcgccggtgccggtgtggcagccgcagcgcgccgaggatctcggcatggcccagaggccggtggcgccagcgaagaagaccaggcgcgggcctaggtcgcggagctcgcagtacaggggcgtcaccttctacaggaggacgggccgctgggaatcgcacatctgggattgcgggaagcaagtctacctaggtggttttgacactgcgcacgcagccgcgagggcatacgatcgagctgcgatcaagttccgcggcctcgacgctgacatcaacttcagtctgagcgactacgaggatgatttgaagcagatgaggaattggaccaaggaggagttcgtgcacatactccggcgccagagcacggggttcgcgaggggaagctccaagtaccgtggcgtgacgctgcacaagtgcggccgctgggaagctaggatggggcaacttcttggcaagaagtacatctatcttgggctctttgacagcgaagttgaggcggcaagggcttatgacagggctgcccttcgcttcaatgggagggaagctgttactaactttgagcctagctcctacaatgcaggagataataacctgcgtgacaccgaaaccgaggcaattgatgatggtgatgccattgatttggatttgcggatttcacagcctaatgtgcaagaccccaaaagggacaataccttagctggcctccagccaacatgtgattcccctgaatcttcaaatacgatggcttctcagtgtttgctcctttcacctgctgctgctgtagccaatgagctcatcatccccttggcccgggtatcaccaaaacccagcagtgtcatttcaccatcagcgcttgtactcgtcagcttgtcatggcttctttccgaaccaccaggtccaggaaaggccggtggagcgaaggcctgagctgggcgcccagccattcccctcatgggcatggcaagcgcagggctcccctcacgtgccgttgcaccactctgcagcatcatcaggattctctaccgccgccggggccaacggcggcatgcccctgccgtctcacccgccggcgcagttcccgactactacaaacccgttcttcttcccctagaccgcttttgacatgacagcttgctgttccggctcagctctcggcgtctgggatggcagctggtcttgcgtgtggcgtctagcagctctggtgatggaagaaagtgattgtgttttgtgtgtgtgtgtgtgagagagagagagagccataataagaagcgacatggctggtctccctctggtatgtgcctgttaggatatgggatatctccatgcatggattgtttccgagacagtagtagtattttgttgtagtcgaccatgcgtgtacatcagtataactggatctttgaagagctgagattttatgactcaacaagcattgacataatggcatgcactccaggaccactgaagcaaaaggccaatttgacatcattgctgcgtttcagatggtagcagtagaagcaacaaatatcggtttcagattgtacaggaaaactgtg

SEQ ID NO: 5733 - DNA, 1089 bp, Zea Mays
caacaagctggtgctcgctggggtacatctatcttgggctctttgacagcgaagttgaggcggcaagggcttatgacagggctgcccttcgcttcaatgggagggaagctgttactaactttgagcctagctcctacaatgcaggagataataacctgcgtgacaccgaaaccgaggcaattgatgatggtgatgccattgatttggatttgcggatttcacagcctaatgtgcaagaccccaaaagggacaataccttagctggcctccagccaacatgtgattcccctgaatcttcaaatacgatggcttctcagccaatgagctcatcatccccttggcccgggtatcaccaaaacccagcagtgtcatttcaccatcagcgcttgtactcgtcagcttgtcatggcttctttccgaaccaccaggtccaggaaaggccggtggagcgaaggcctgagctgggcgcccagccattcccctcatgggcatggcaagcgcagggctcccctcacgtgccgttgcaccactctgcagcatcatcaggattctctaccgccgccggggccaacggcggcatgcccctgccgtctcacccgccggcgcagttcccgactactacaaacccgttcttcttcccctagaccgcttttgacatgacagcttgctgttccggctcagctctcggcgtctgggatggcagctggtcttgcgtgtggcgtctagcagctctggtgatggaagaaagtgattgtgttttgtgtgtgtgtgtgtgagagagagagagagccataataagaagcgacatggctggtctccctctggtatgtgcctgttaggatatgggatatctccatgcatggattgtttccgagacagtagtagtattttgttgtagtcgaccatgcgtgtacatcagtataactggatctttgaagagctgagattttatgactcaacaagcattgacataatggcatgcactccaggaccactgaagcaaaaggccaatttgacatcattgctgcgtttcagatggtagcagtagaagcaacaaatatcggtttcagattgtacaggaaaactgtg

SEQ ID NO: 5734 - DNA, 2325 bp, Zea Mays
agttccttccaagaagagctcaaaaagctttgtctgctcaacctggacgcctcggcctcggcgatccaccggcacggcaccgaaacacctcgtctcgatttcgaaccaaaccctccagtgtccagccccgtctcgttcgccgcggcaggagcgagcgagcgaccgagcgagcagccatggcgccggtcgatccccactcctacaccgacggcgcgcacccggtggtctcgcgcgcggcgctcgccttctacctcgacttcgccgcctccaccatacacgcctccgcggtgctcaccctctccgcgccgcactccggcgacctcctcctcgacacccgcgctctcgccgtccactccgcctccaccgacgccgacccgccggagcccatccccttctccctcgccgcggcgcccgacccggtcctcggcacggcgctgaccctcgccctgccccgcgacaccgcctccttccggctcaccttctcaacctcccccgccgcctccgcgctgcagtggctggccccgccgcagaccgcctccgcgcagcccttcgtcttctcgcagtgccagtccatccacgcccgctccgtcttcccctgccacgacacccccgccgcgcgcatcaccttctcgctcctcctcaacgtccccgagcagctctccgccgtcgccgccgcgcgccacgtcgcgcgccgggacccgctgccctccgaccaccgcggggcgtgcgacgacgggctctggtgcgcgcccggccgcatcgtcgaggagttccagatggaccagtccgtgccgccctacctcttcgcgttcgccgccggcagcatcgggttcagggacctcggcccgaggacgcgggtgtacgcggagggaggggacacggtgttggacgaggcggccagggagttcgcgggggtggaggagatggtcaaggttggggaggggctctttgggccgtatgaatgggagaggttcgatctgctcgtgctgccaccgagcttcccctatggaggtatggagaaccccaggatggtgttcctcactcccacggtcatcaaaggggatgctgcaggggctcaggttgtggcccatgagctcgcacatagctggactggcaatctgattactaacaaaaccaatgaagatttctggctaaacgagggattcacaacatatgctgagaggaggattgttgaggttgtgcaaggggaggagcgggcagccttaaacatggggattggatggaggggattgaacaggatgatggagaggtttaaggataacatggagttcaccaagttgaagccgaagatggcagggattgaccctgatgatgtttactctgaagtgccctatgagaaaggtttccagttcctttggagaattgagcgtgagattggcaggcctgctttcgacgagtttttaaagaagtacattgcaaccttcaagttccaatcgatagatacagagacatttcttgaattcctcaaaaccaatgtacctgggatagaaaacaaaattgaccttcacctgtgggttgaggggactggtatccctcctgatgccatggaaccagattcagctacttacaaaaagatctgctccttagctgcagaattcaaatctggaaaacttccaagtgaagatgaggtagcaaagtggagtgggcaagaatgggaactttacttagaaaatctaccagcagatgttgaagcctcacaggtctatcatgggctgttgtgcactgcagactgttgcatcgcctgttccagtgaatcagaatccctccattcatagcatctgttttctatctattccaattgagtcactgctctcgacgagcggtacaagctatctgaaagccgtgactacgaggtcaaagtggcgttcctccagctggcgatccccaccgggtgcaagtgctacttcaacgaggttgagaaatgcttgaagcaggtgggaaggatgaagtacctccgcccgctctacagctcgctggccaagtgctccagcgaggagaagatgctggcccagaggatattctcggaggctcaagagttctaccacccaatagctcgaagtgttgcggaggccattttgtcgaagcatagctaagcaagccaagactcttgcttggcgattcacgcttgatctggtgactgctgctcagtttgcttctttcgcataaaattatcgtctgctctggaaaagaaacttaggaaaaacttgaggcttgtattgcatctttgataacataatattatattatatgtagagactcagaaaccgtagcaaaaaaaaaaaaaaaccccaaacaaacaaaaaa

SEQ ID NO: 5735 - DNA, 1295 bp, Zea Mays
caccaccctaccggagcgcgtccacccccttcctcctccgatcgagccagggccaggcaacctggtgctccgcccctcgccgttaccgcgacgcttcggcctctggctccaccgcctgcctccctggctctgtgaccgtgacgagacacgtcgccgagaggccaccccgcttgggattgtgaggtaaagcgtgatggcagcgccaccggcgagggcccgagccgactacgactacctcatcaaactgctcctcatcggtgacagcggagttggaaaaagttgtctcctgttacggttctcagatggatcattcaccactagctttattaccactattggcattgacttcaagataaggactgtcgagttggatggcaaacggattaagttgcagatctgggacactgcaggccaagaacgtttccgcacgattactactgcttactacaggggagcaatgggcatcttgcttgtacataagaaattggatcagaaacattgagcaacatgcttcggataacgtgaacaaaattctggtggggaataaagctgatatggatgaaagcaaacgggctgtgcccacttcgaaggggcaagctctcgctgacgaatacgggataaagttttttgaaacgagtgcaaagacaaacctgaatgtcgagcaggttttcttttccatagcaagggacatcaaacagagactttcggagaccgattccaagcctgaggatcgaactatcaagatcaaggctgaaggggaagctgaggcagcggcggcggcgcagaattcagcttgctgtggctcctgagcacttgtcaccgcaagatagtggcgttctcgcgcatgtaattttcatcgtttcattctttgccagcgactctctccttgtgcttcttgagctatcgcagttgctgtggcctggacaaatgggtgttaactgttaagtcagagcagttacttgctgtattgtgggaactctacccatggtaaggcgtgcataatggctgtgcaaagtacctttttacactatcgatcgactacactgtttatatggtagagtttaaaatgagaggtgggctgtttgatctcgaggaggctgctactgctatagagatgacgttgggattgcgggaattttcaatgcgtacaagcggtaacatttgcttgcagcactggataatctttgcttcacagatttgctgtatggattaggaaaataagctgtacctcataacatgtgtcgaaacagagagattttgtttctgttatatggtagagattttgtttctgttat

SEQ ID NO: 5736 - DNA, 1065 bp, Zea Mays
gagcgcgtccacccccttcctcctccgatcgagccagggccaggcaacctggtgctccgcccctcgccgttaccgcgacgcttcggcctctggctccaccgcctgcctccctggctctgtgaccgtgacgagacacgtcgccgagaggccaccccgcttgggattgtgaggtaaagcgtgatggcagcgccaccggcgagggcccgagccgactacgactacctcatcaaactgctcctcatcggtgacagcggagttggaaaaagttgtctcctgttacggttctcagatggatcattcaccactagctttattaccactattggcattgacttcaagataaggactgtcgagttggatggcaaacggattaagttgcagatctgggacactgcaggccaagaacgtttccgcacgattactactgcttactacaggggagcaatgggcatcttgcttgtgtacgatgtcacagacgagtcatctttcaataacataagaaattggatcagaaacattgagcaacatgcttcggataacgtgaacaaaattctggtggggaataaagctgatatggatgaaagcaaacgggctgtgcccacttcgaaggggcaagctctcgctgacgaatacgggataaagttttttgaaacgagtgcaaagacaaacctgaatgtcgagcaggttttcttttccatagcaagggacatcaaacagagactttcggagaccgattccaagcctgaggatcgaactatcaagatcaaggctgaaggggaagctgaggcagcggcggcggcgcagaattcagcttgctgtggctcctgagcacttgtcaccgcaagatagtggcgttctcgcgcatgtaattttcatcgtttcattctttgccagcgactctctccttgtgcttcttgagctatcgcagttgctgtggcctggacaaatgggtgttaactgttaagtcagagcagttacttgctgtattgtgggaactctacccatgtacaacgacctcaggcgagtgaactgctgcgcctgcacgcttccgtttccatctccccc

SEQ ID NO: 5737 - DNA, 870 bp, Zea Mays
gagcgcgtccacccccttcctcctccgatcgagccagggccaggcaacctggtgctccgcccctcgccgttaccgcgacgcttcggcctctggctccaccgcctgcctccctggctctgtgaccgtgacgagacacgtcgccgagaggccaccccgcttgggattgtgaggtaaagcgtgatggcagcgccaccggcgagggcccgagccgactacgactacctcatcaaactgctcctcatcggtgacagcgcattgacttcaagataaggactgtcgagttggatggcaaacggattaagttgcagatctgggacactgcaggccaagaacgtttccgcacgattactactgcttactacaggggagcaatgggcatcttgcttgtgtacgatgtcacagacgagtcatctttcaataacataagaaattggatcagaaacattgagcaacatgcttcggataacgtgaacaaaattctggtggggaataaagctgatatggatgaaagcaaacgggctgtgcccacttcgaaggggcaagctctcgctgacgaatacgggataaagttttttgaaacgagtgcaaagacaaacctgaatgtcgagcaggttttcttttccatagcaagggacatcaaacagagactttcggagaccgattccaagcctgaggatcgaactatcaagatcaaggctgaaggggaagctgaggcagcggcggcggcgcagaattcagcttgctgtggctcctgagcacttgtcaccgcaagatagtggcgttctcgcgcatgtaattttcatcgtttcattctttgccagcgactctctccttgtgcttcttgagctatcgcagttgctgtggcctgat

SEQ ID NO: 5738 - DNA, 2177 bp, Zea Mays
gagcgcgtccacccccttcctcctccgatcgagccagggccaggcaacctggtgctccgcccctcgccgttaccgcgacgcttcggcctctggctccaccgcctgcctccctggctctgtgaccgtgacgagacacgtcgccgagaggccaccccgcttgggattgtgaggtaaagcgtgatggcagcgccaccggcgagggcccgagccgactacgactacctcatcaaactgctcctcatcggtgacagcggagttggaaaaagttgtctcctgttacggttctcagatggatcattcaccactagctttattaccactattggcattgacttcaagataaggactgtcgagttggatggcaaacggattaagttgcagatctgggacactgcaggccaagaacgtttccgcacgattactactgcttactacaggggagcaatgggcatcttgcttgtgtacgatgtcacagacgagtcatctttcaataacataagaaattggatcagaaacattgagcaacatgcttcggataacgtgaacaaaattctggtggggaataaagctgatatggatgaaagcaaacgggctgtgcccacttcgaaggggcaagctctcgctgacgaatacgggataaagttttttgaaacgagtgcaaagacaaacctgaatgtcgagcaggttttcttttccatagcaagggacatcaaacagagactttcggagaccgattccaagcctgaggatcgaactatcaagatcaaggctgaaggggaagctgaggcagcggcggcggcgcagaattcagcttgctgtggctcctgagcacttgtcaccgcaagatagtggcgttctcgcgcatgtaattttcatcgtttcattctttgccagcgactctctccttgtgcttcttgagctatcgcagttgctgtggcctgatatgacttcccttactgagtattatgtaagcctacaaaagatttaccaagctaaggcagaatttgactgtcttgccctggagcatcatgtaaaggaaatcttaaagaggattggtagagatccggattcaatttcaagagcatatatcaaaacattttgtaaaaattctagaaaactaagggtttctaggtatcgtagttttgaggaggaatttagctctccgtttgtccctgagattcagaggtatttcaccgatgaagactacagttacgcaacgaacttctatattctactacgtgctgttgatcgattggctgccaattatagcagattgcctggaatcttcgacagtgagattgatgaggatatccctaggctgaagactgttgcggcttcagtggcaagtgagatgggtttgaatggagcatccttatccgaagacctgataaccgagatgtgccggttcgggggtgcggagattcatccagtggctgcttttgtcggtggagttgcttcccaagaagtgattaagctggtcaccaagcagtttgtgccgttgccgggaacattcatatttaatggaatcgacctcaaatctcaagttttgatgctataacatggatgtggaacgttgtctgtgtggactggatttgagttggcccagattttgtgccagggcacaacgctgcaaatggaatctgtttgcccaacgcgtagccaaatatgtgttgcatgatattttagagcctgtttgtttcctcgcaggattatataatccagcttagtttatatagattatataatccaatttatataattttattagagatggctgtttatacaaattattagtgggtacaaagctaaacaataatataaaataagcacctaatgatatgcttatgaattatcataatctaggtacctagattgtacttcctccgacttttttatttgtcgttgtttagttaaaaataaactagcgaacaacagatattccactttagttttgtttatttgcttcttaacttatgtaagttagattatataatctacacattaaacaaacagccaaacagggcttgcgtcgtatgattgtcattctcgccaagcaccttcccgccacccccacccacccacacgaatcagagaaaagtggttcattgagagttgtcactctgctgtaatttatcaatacttgtcgtatgatttatgcaagcgcttcctagctcacg

SEQ ID NO: 5739 - DNA, 1200 bp, Zea Mays
cagcctgggtggctttggtagtcaatattaattttgaccaactcatattgacaattgaactgctgcaatgtaataagcatctcaagatagggcattggattagtccagcaatccatatagaagaggcttgacagtcaaggagttggaaaaagttgtctcctgttacggttctcagatggatcattcaccactagctttattaccactattggcattgacttcaagataaggactgtcgagttggatggcaaacggattaagttgcagatctgggacactgcaggccaagaacgtttccgcacgattactactgcttactacaggggagcaatgggcatcttgcttgtgtacgatgtcacagacgagtcatctttcaataacataagaaattggatcagaaacattgagcaacatgcttcggataacgtgaacaaaattctggtggggaataaagctgatatggatgaaagcaaacgggctgtgcccacttcgaaggggcaagctctcgctgacgaatacgggataaagttttttgaaacgagtgcaaagacaaacctgaatgtcgagcaggttttcttttccatagcaagggacatcaaacagagactttcggagaccgattccaagcctgaggatcgaactatcaagatcaaggctgaaggggaagctgaggcagcggcggcggcgcagaattcagcttgctgtggctcctgagcacttgtcaccgcaagatagtggcgttctcgcgcatgtaattttcatcgtttcattctttgccagcgactctctccttgtgcttcttgagctatcgcagttgctgtggcctggacaaatgggtgttaactgttaagtcagagcagttacttgctgtattgtgggaactctacccatggtaaggcgtgcataatggctgtgcaaagtacctttttacactatcgatcgactacactgtttatatggtagagtttaaaatgagaggtgggctgtttgatctcgaggaggctgctactgctatagagatgacgttgggattgcgggaattttcaatgcgtacaagcggtaacatttgcttgcagcactggataatctttgcttcacagatttgctgtatggattaggaaaataagctgtacctcataacatgtgtcgaaacagagagattttgtttctgttatatggtagagattttgtttctgttat

SEQ ID NO: 5740 - DNA, 2276 bp, Zea Mays
actacctcgttctgctccgtcgctatattcctcgccggagtgtagcggggcgaagccatccgaactccgaaaagccccccagcggcctcccctccgccccgcagccatggccgccaccggcgtggtcgccgagccgaagaccaagtacgatcgccagctcaggatatggggtgatcaaggccaggctgcactggagaaggctagcatatgcttgcttaactgtggtcctaccggaaccgaagcattgaagaatctcgtgcttggaggcataggaagtgtgactgttgttgatggctccaaagttgaatcatctgacctggggaacaattttctgttggatgaaggatgtttggggcaaccaagagctaaatctatatgttctttcctacaagagcttaatgacgctgttaaggccaagtttgttgaggagtctccagcgcatttgatagatactaatccttcattcttttcccagtttactgttgttattgctacccagcttccagagagttttttactgaagctagattatatctgcaggaaagcagatatcgttttggttgctgcacgttcatatggtctaaccggtttggtcagggttagcgtaaaggagcattgtgttatagaatcaaaaccagaccacttcttggatgatttgcgacttcacaacccatggactgaactaaagcagtttgcaaaatcaattgacataaacgataaagatcctgttgtccacaaaaatactccatacattgttatccttgtgaggcttgcagaaaaatgggcagatgcacatgatggtaacttgccttcaactaggcaagaaaaaaaggaatttaaggatctaattcgagcccatatgcttaatgtagatgaagaaaattacaaagaagctgtggactcttcatataaagtatcagtcactccaggaatcaataatgagattcgtcagataattgatgatgactctgcggaagtcaattcctcatcgtcagatttttggattttagtggctgctttaaaggagggcaacggtgagctacctctggagggaacaatacctgatatgacttcccttactgagtattatgtaagcctacaaaagatttaccaagctaaggcagaatttgactgtcttgccctggagcatcatgtaaaggaaatcttaaagaggattggtagagatccggattcaatttcaagagcatatatcaaaacattttgtaaaaattctagaaaactaagggtttctaggtatcgtagttttgaggaggaatttagctctccgtttgtccctgagattcagaggtatttcaccgatgaagactacagttacgcaacgaacttctatattctactacgtgctgttgatcgattggctgccaattatagcagattgcctggaatcttcgacaggctgaagactgttgcggcttcagtggcaagtgagatgggtttgaatggagcatccttatccgaagacctgataaccgagatgtgccggttcgggggtgcggagattcatccagtggctgcttttgtcggtggagttgcttcccaagaagtgattaagctggtcaccaagcagtttgtgccgttgccgggaacattcatatttaatggaatcgacctcaaatctcaagttttgatgctataacatggatgtggaacgttgtctgtgtggactggatttgagttggcccagattttgtgccagggcacaacgctgcaaatggaatctgtttgcccaacgcgtagccaaatatgtgttgcatgatattttagagcctgtttgtttcctcgcaggattatataatccagcttagtttatatagattatataatccaatttatataattttattagagatggctgtttatacaaattattagtgggtacaaagctaaacaataatataaaataagcacctaatgatatgcttatgaattatcataatctaggtacctagattgtacttcctccgacttttttatttgtcgttgtttagttaaaaataaactagcgaacaacagatattccactttagttttgtttatttgcttcttaacttatgtaagttagattatataatctacacattaaacaaacagccaaacagggcttgcgtcgtatgattgtcattctcgccaagcaccttcccgccacccccacccacccacacgaatcagagaaaagtggttcattgagagttgtcactctgctgtaatttatcaatacttgtcgtatgatttatgcaagcgcttcctagctcacg

SEQ ID NO: 5741 - DNA, 2274 bp, Zea Mays
actacctcgttctgctccgtcgctatattcctcgccggagtgtagcggggcgaagccatccgaactccgaaaagccccccagcggcctcccctccgccccgcagccatggccgccaccggcgtggtcgccgagccgaagaccaagtacgatcgccagctcaggatatggggtgatcaaggccaggctgcactggagaaggctagcatatgcttgcttaactgtggtcctaccggaaccgaagcattgaagaatctcgtgcttggaggcataggaagtgtgactgttgttgatggctccaaagttgaatcatctgacctggggaacaattttctgttggatgaaggatgtttggggcaaccaagagctaaatctatatgttctttcctacaagagcttaatgacgctgttaaggccaagtttgttgaggagtctccagcgcatttgatagatactaatccttcattcttttcccagtttactgttgttattgctacccaggaaagcagatatcgttttggttgctgcacgttcatatggtctaaccggtttggtcagggttagcgtaaaggagcattgtgttatagaatcaaaaccagaccacttcttggatgatttgcgacttcacaacccatggactgaactaaagcagtttgcaaaatcaattgacataaacgataaagatcctgttgtccacaaaaatactccatacattgttatccttgtgaggcttgcagaaaaatgggcagatgcacatgatggtaacttgccttcaactaggcaagaaaaaaaggaatttaaggatctaattcgagcccatatgcttaatgtagatgaagaaaattacaaagaagctgtggactcttcatataaagtatcagtcactccaggaatcaataatgagattcgtcagataattgatgatgactctgcggaagtcaattcctcatcgtcagatttttggattttagtggctgctttaaaggagtttattgcaaaggagggcaacggtgagctacctctggagggaacaatacctgatatgacttcccttactgagtattatgtaagcctacaaaagatttaccaagctaaggcagaatttgactgtcttgccctggagcatcatgtaaaggaaatcttaaagaggattggtagagatccggattcaatttcaagagcatatatcaaaacattttgtaaaaattctagaaaactaagggtttctaggtatcgtagttttgaggaggaatttagctctccgtttgtccctgagattcagaggtatttcaccgatgaagactacagttacgcaacgaacttctatattctactacgtgctgttgatcgattggctgccaattatagcagattgcctggaatcttcgacagtgagattgatgaggatatccctaggctgaagactgttgcggcttcagtggcaagtgagatgggtttgaatggagcatccttatccgaagacctgataaccgagatgtgccggttcgggggtgcggagattcatccagtggctgcttttgtcggtggagttgcttcccaagaagtgattaagctggtcaccaagcagtttgtgccgttgccgggaacattcatatttaatggaatcgacctcaaatctcaagttttgatgctataacatggatgtggaacgttgtctgtgtggactggatttgagttggcccagattttgtgccagggcacaacgctgcaaatggaatctgtttgcccaacgcgtagccaaatatgtgttgcatgatattttagagcctgtttgtttcctcgcaggattatataatccagcttagtttatatagattatataatccaatttatataattttattagagatggctgtttatacaaattattagtgggtacaaagctaaacaataatataaaataagcacctaatgatatgcttatgaattatcataatctaggtacctagattgtacttcctccgacttttttatttgtcgttgtttagttaaaaataaactagcgaacaacagatattccactttagttttgtttatttgcttcttaacttatgtaagttagattatataatctacacattaaacaaacagccaaacagggcttgcgtcgtatgattgtcattctcgccaagcaccttcccgccacccccacccacccacacgaatcagagaaaagtggttcattgagagttgtcactctgctgtaatttatcaatacttgtcgtatgatttatgcaagcgcttcctagctcacg

SEQ ID NO: 5742 - DNA, 2307 bp, Zea Mays
actacctcgttctgctccgtcgctatattcctcgccggagtgtagcggggcgaagccatccgaactccgaaaagccccccagcggcctcccctccgccccgcagccatggccgccaccggcgtggtcgccgagccgaagaccaagtacgatcgccagctcaggatatggggtgatcaaggccaggctgcactggagaaggctagcatatgcttgcttaactgtggtcctaccggaaccgaagcattgaagaatctcgtgcttggaggcataggaagtgtgactgttgttgatggctccaaagttgaatcatctgacctggggaacaattttctgttggatgaaggatgtttggggcaaccaagagctaaatctatatgttctttcctacaagagcttaatgacgctgttaaggccaagtttgttgaggagtctccagcgcatttgatagatactaatccttcattcttttcccagtttactgttgttattgctacccagcttccagagagttttttactgaagctagattatatctgcaggaaagcagatatcgttttggttgctgcacgttcatatggtctaaccggtttggtcagggttagcgtaaaggagcattgtgttatagaatcaaaaccagaccacttcttggatgatttgcgacttcacaacccatggactgaactaaagcagtttgcaaaatcaattgacataaacgataaagatcctgttgtccacaaaaatactccatacattgttatccttgtgaggcttgcagaaaaatgggcagatgcacatgatggtaacttgccttcaactaggcaagaaaaaaaggaatttaaggatctaattcgagcccatatgcttaatgtagatgaagaaaattacaaagaagctgtggactcttcatataaagtatcagtcactccaggaatcaataatgagattcgtcagataattgatgatgactctgcggaagtcaattcctcatcgtcagatttttggattttagtggctgctttaaaggagtttattgcaaaggagggcaacggtgagctacctctggagggaacaatacctgatatgacttcccttactgagtattatgtaagcctacaaaagatttaccaagctaaggcagaatttgactgtcttgccctggagcatcatgtaaaggaaatcttaaagaggattggtagagatccggattcaatttcaagagcatatatcaaaacattttgtaaaaattctagaaaactaagggtatcgtagttttgaggaggaatttagctctccgtttgtccctgagattcagaggtatttcaccgatgaagactacagttacgcaacgaacttctatattctactacgtgctgttgatcgattggctgccaattatagcagattgcctggaatcttcgacagtgagattgatgaggatatccctaggctgaagactgttgcggcttcagtggcaagtgagatgggtttgaatggagcatccttatccgaagacctgataaccgagatgtgccggttcgggggtgcggagattcatccagtggctgcttttgtcggtggagttgcttcccaagaagtgattaagctggtcaccaagcagtttgtgccgttgccgggaacattcatatttaatggaatcgacctcaaatctcaagttttgatgctataacatggatgtggaacgttgtctgtgtggactggatttgagttggcccagattttgtgccagggcacaacgctgcaaatggaatctgtttgcccaacgcgtagccaaatatgtgttgcatgatattttagagcctgtttgtttcctcgcaggattatataatccagcttagtttatatagattatataatccaatttatataattttattagagatggctgtttatacaaattattagtgggtacaaagctaaacaataatataaaataagcacctaatgatatgcttatgaattatcataatctaggtacctagattgtacttcctccgacttttttatttgtcgttgtttagttaaaaataaactagcgaacaacagatattccactttagttttgtttatttgcttcttaacttatgtaagttagattatataatctacacattaaacaaacagccaaacagggcttgcgtcgtatgattgtcattctcgccaagcaccttcccgccacccccacccacccacacgaatcagagaaaagtggttcattgagagttgtcactctgctgtaatttatcaatacttgtcgtatgatttatgcaagcgcttcctagctcacg

SEQ ID NO: 5743 - DNA, 2284 bp, Zea Mays
actacctcgttctgctccgtcgctatattcctcgccggagtgtagcggggcgaagccatccgaactccgaaaagccccccagcggcctcccctccgccccgcagccatggccgccaccggcgtggtcgccgagccgaagaccaagtacgatcgccagctcaggatatggggtgatcaaggccaggctgcactggagaaggctagcatatgcttgcttaactgtggtcctaccggaaccgaagcattgaagaatctcgtgcttggaggcataggaagtgtgactgttgttgatggctccaaagttgaatcatctgacctggggaacaattttctgttggatgaaggatgtttggggcaaccaagagctaaatctatatgttctttcctacaagagcttaatgacgctgttaaggccaagtttgttgaggagtctccagcgcatttgatagatactaatccttcattcttttcccagtttactgttgttattgctacccagcttccagagagttttttactgaagctagattatatctgcaggaaagcagatatcgttttggttgctgcacgttcatatggtctaaccggtttggtcagggttagcgtaaaggagcattgtgttatagaatcaaaaccagaccacttcttggatgatttgcgacttcacaacccatggactgaactaaagcagtttgcaaaatcaattgacataaacgataaagatcctgttgtccacaaaaatactccatacattgttatccttgtgaggcttgcagaaaaatgggcagatgcacatgatggtaacttgccttcaactaggcaagaaaaaaaggaatttaaggatctaattcgagcccatatgcttaatgtagatgaagaaaattacaaagaagctgtggactcttcatataaagtatcagtcactccaggaatcaataatgagattcgtcagataattgatgatgactctgcggaagtcaattcctcatcgtcagatttttggattttagtggctgctttaaaggagtttattgcaaaggagggcaacggtgagctacctctggagggaacaatacctgatatgacttcccttactgagtattatgtaagcctacaaaagatttaccaagctaaggcagaatttgactgtcttgccctggagcatcatgtaaaggaaatcttaaagaggattggtagagatccggattcaatttcaagagcatatatcaaaacattttgtaaaaattctagaaaactaagggtttctaggtatcgtagttttgaggaggaatttagctctccgtttgtccctgagattcagaggtatttcaccgatgaagactacagttacgcaacgaacttctatattctactacgtgctgttgatcgattggctgccaattatagcagattgcctggaatcttcgacagactgttgcggcttcagtggcaagtgagatgggtttgaatggagcatccttatccgaagacctgataaccgagatgtgccggttcgggggtgcggagattcatccagtggctgcttttgtcggtggagttgcttcccaagaagtgattaagctggtcaccaagcagtttgtgccgttgccgggaacattcatatttaatggaatcgacctcaaatctcaagttttgatgctataacatggatgtggaacgttgtctgtgtggactggatttgagttggcccagattttgtgccagggcacaacgctgcaaatggaatctgtttgcccaacgcgtagccaaatatgtgttgcatgatattttagagcctgtttgtttcctcgcaggattatataatccagcttagtttatatagattatataatccaatttatataattttattagagatggctgtttatacaaattattagtgggtacaaagctaaacaataatataaaataagcacctaatgatatgcttatgaattatcataatctaggtacctagattgtacttcctccgacttttttatttgtcgttgtttagttaaaaataaactagcgaacaacagatattccactttagttttgtttatttgcttcttaacttatgtaagttagattatataatctacacattaaacaaacagccaaacagggcttgcgtcgtatgattgtcattctcgccaagcaccttcccgccacccccacccacccacacgaatcagagaaaagtggttcattgagagttgtcactctgctgtaatttatcaatacttgtcgtatgatttatgcaagcgcttcctagctcacg

SEQ ID NO: 5744 - DNA, 2298 bp, Zea Mays
actacctcgttctgctccgtcgctatattcctcgccggagtgtagcggggcgaagccatccgaactccgaaaagccccccagcggcctcccctccgccccgcagccatggccgccaccggcgtggtcgccgagccgaagaccaagtacgatcgccagctcaggccaggctgcactggagaaggctagcatatgcttgcttaactgtggtcctaccggaaccgaagcattgaagaatctcgtgcttggaggcataggaagtgtgactgttgttgatggctccaaagttgaatcatctgacctggggaacaattttctgttggatgaaggatgtttggggcaaccaagagctaaatctatatgttctttcctacaagagcttaatgacgctgttaaggccaagtttgttgaggagtctccagcgcatttgatagatactaatccttcattcttttcccagtttactgttgttattgctacccagcttccagagagttttttactgaagctagattatatctgcaggaaagcagatatcgttttggttgctgcacgttcatatggtctaaccggtttggtcagggttagcgtaaaggagcattgtgttatagaatcaaaaccagaccacttcttggatgatttgcgacttcacaacccatggactgaactaaagcagtttgcaaaatcaattgacataaacgataaagatcctgttgtccacaaaaatactccatacattgttatccttgtgaggcttgcagaaaaatgggcagatgcacatgatggtaacttgccttcaactaggcaagaaaaaaaggaatttaaggatctaattcgagcccatatgcttaatgtagatgaagaaaattacaaagaagctgtggactcttcatataaagtatcagtcactccaggaatcaataatgagattcgtcagataattgatgatgactctgcggaagtcaattcctcatcgtcagatttttggattttagtggctgctttaaaggagtttattgcaaaggagggcaacggtgagctacctctggagggaacaatacctgatatgacttcccttactgagtattatgtaagcctacaaaagatttaccaagctaaggcagaatttgactgtcttgccctggagcatcatgtaaaggaaatcttaaagaggattggtagagatccggattcaatttcaagagcatatatcaaaacattttgtaaaaattctagaaaactaagggtttctaggtatcgtagttttgaggaggaatttagctctccgtttgtccctgagattcagaggtatttcaccgatgaagactacagttacgcaacgaacttctatattctactacgtgctgttgatcgattggctgccaattatagcagattgcctggaatcttcgacagtgagattgatgaggatatccctaggctgaagactgttgcggcttcagtggcaagtgagatgggtttgaatggagcatccttatccgaagacctgataaccgagatgtgccggttcgggggtgcggagattcatccagtggctgcttttgtcggtggagttgcttcccaagaagtgattaagctggtcaccaagcagtttgtgccgttgccgggaacattcatatttaatggaatcgacctcaaatctcaagttttgatgctataacatggatgtggaacgttgtctgtgtggactggatttgagttggcccagattttgtgccagggcacaacgctgcaaatggaatctgtttgcccaacgcgtagccaaatatgtgttgcatgatattttagagcctgtttgtttcctcgcaggattatataatccagcttagtttatatagattatataatccaatttatataattttattagagatggctgtttatacaaattattagtgggtacaaagctaaacaataatataaaataagcacctaatgatatgcttatgaattatcataatctaggtacctagattgtacttcctccgacttttttatttgtcgttgtttagttaaaaataaactagcgaacaacagatattccactttagttttgtttatttgcttcttaacttatgtaagttagattatataatctacacattaaacaaacagccaaacagggcttgcgtcgtatgattgtcattctcgccaagcaccttcccgccacccccacccacccacacgaatcagagaaaagtggttcattgagagttgtcactctgctgtaatttatcaatacttgtcgtatgatttatgcaagcgcttcctagctcacg

SEQ ID NO: 5745 - DNA, 2284 bp, Zea Mays
actacctcgttctgctccgtcgctatattcctcgccggagtgtagcggggcgaagccatccgaactccgaaaagccccccagcggcctcccctccgccccgcagccatggccgccaccggcgtggtcgccgagccgaagaccaagtacgatcgccagctcaggatatggggtgatcaaggccaggctgcactggagaaggctagcatatgcttgcttaactgtggtcctaccggaaccgaagcattgaagaatctcgtgcttggaggcataggaagtgtgactgttgttgatggctccaaagttgaatcatctgacctggggaacaattttctgttggatgaaggatgtttggggcaaccaagagctaaatctatatgttctttcctacaagagcttaatgacgctgttaaggccaagtttgttgaggagtctccagcgcatttgatagatactaatccttcattcttttcccagtttactgttgttattgctacccagcttccagagagttttttactgaagctagattatatctgcaggaaagcagatatcgttttggttgctgcacgttcatatggtctaaccggtttggtcagggttagcgtaaaggagcattgtgttatagaatcaaaaccagaccacttcttggatgatttgcgacttcacaacccatggactgaactaaagcagtttgcaaaatcaattgacataaacgataaagatcctgttgtccacaaaaatactccatacattgttatccttgtgaggcttgcagaaaaatgggcagatgcacatgatggtaacttgccttcaactaggcaagaaaaaaaggaatttaagatgaagaaaattacaaagaagctgtggactcttcatataaagtatcagtcactccaggaatcaataatgagattcgtcagataattgatgatgactctgcggaagtcaattcctcatcgtcagatttttggattttagtggctgctttaaaggagtttattgcaaaggagggcaacggtgagctacctctggagggaacaatacctgatatgacttcccttactgagtattatgtaagcctacaaaagatttaccaagctaaggcagaatttgactgtcttgccctggagcatcatgtaaaggaaatcttaaagaggattggtagagatccggattcaatttcaagagcatatatcaaaacattttgtaaaaattctagaaaactaagggtttctaggtatcgtagttttgaggaggaatttagctctccgtttgtccctgagattcagaggtatttcaccgatgaagactacagttacgcaacgaacttctatattctactacgtgctgttgatcgattggctgccaattatagcagattgcctggaatcttcgacagtgagattgatgaggatatccctaggctgaagactgttgcggcttcagtggcaagtgagatgggtttgaatggagcatccttatccgaagacctgataaccgagatgtgccggttcgggggtgcggagattcatccagtggctgcttttgtcggtggagttgcttcccaagaagtgattaagctggtcaccaagcagtttgtgccgttgccgggaacattcatatttaatggaatcgacctcaaatctcaagttttgatgctataacatggatgtggaacgttgtctgtgtggactggatttgagttggcccagattttgtgccagggcacaacgctgcaaatggaatctgtttgcccaacgcgtagccaaatatgtgttgcatgatattttagagcctgtttgtttcctcgcaggattatataatccagcttagtttatatagattatataatccaatttatataattttattagagatggctgtttatacaaattattagtgggtacaaagctaaacaataatataaaataagcacctaatgatatgcttatgaattatcataatctaggtacctagattgtacttcctccgacttttttatttgtcgttgtttagttaaaaataaactagcgaacaacagatattccactttagttttgtttatttgcttcttaacttatgtaagttagattatataatctacacattaaacaaacagccaaacagggcttgcgtcgtatgattgtcattctcgccaagcaccttcccgccacccccacccacccacacgaatcagagaaaagtggttcattgagagttgtcactctgctgtaatttatcaatacttgtcgtatgatttatgcaagcgcttcctagctcacg

SEQ ID NO: 5746 - DNA, 2192 bp, Zea Mays
actacctcgttctgctccgtcgctatattcctcgccggagtgtagcggggcgaagccatccgaactccgaaaagccccccagcggcctcccctccgccccgcagccatggccgccaccggcgtggtcgccgagccgaagaccaagtacgatcgccagctcaggatatggggtgatcaaggccaggctgcactggagaaggctagcatatgcttgcttaactgtggtcctaccggaaccgaagcattgaagaatctcgtgcttggaggcataggaagtgtgactgttgttgatggctccaaagttgaatcatctgacctggggaacaattttctgttggatgaaggatgtttggggcaaccaagagctaaatctatatgttctttcctacaagagcttaatgacgctgttaaggccaagaaagcagatatcgttttggttgctgcacgttcatatggtctaaccggtttggtcagggttagcgtaaaggagcattgtgttatagaatcaaaaccagaccacttcttggatgatttgcgacttcacaacccatggactgaactaaagcagtttgcaaaatcaattgacataaacgataaagatcctgttgtccacaaaaatactccatacattgttatccttgtgaggcttgcagaaaaatgggcagatgcacatgatggtaacttgccttcaactaggcaagaaaaaaaggaatttaaggatctaattcgagcccatatgcttaatgtagatgaagaaaattacaaagaagctgtggactcttcatataaagtatcagtcactccaggaatcaataatgagattcgtcagataattgatgatgactctgcggaagtcaattcctcatcgtcagatttttggattttagtggctgctttaaaggagtttattgcaaaggagggcaacggtgagctacctctggagggaacaatacctgatatgacttcccttactgagtattatgtaagcctacaaaagatttaccaagctaaggcagaatttgactgtcttgccctggagcatcatgtaaaggaaatcttaaagaggattggtagagatccggattcaatttcaagagcatatatcaaaacattttgtaaaaattctagaaaactaagggtttctaggtatcgtagttttgaggaggaatttagctctccgtttgtccctgagattcagaggtatttcaccgatgaagactacagttacgcaacgaacttctatattctactacgtgctgttgatcgattggctgccaattatagcagattgcctggaatcttcgacagtgagattgatgaggatatccctaggctgaagactgttgcggcttcagtggcaagtgagatgggtttgaatggagcatccttatccgaagacctgataaccgagatgtgccggttcgggggtgcggagattcatccagtggctgcttttgtcggtggagttgcttcccaagaagtgattaagctggtcaccaagcagtttgtgccgttgccgggaacattcatatttaatggaatcgacctcaaatctcaagttttgatgctataacatggatgtggaacgttgtctgtgtggactggatttgagttggcccagattttgtgccagggcacaacgctgcaaatggaatctgtttgcccaacgcgtagccaaatatgtgttgcatgatattttagagcctgtttgtttcctcgcaggattatataatccagcttagtttatatagattatataatccaatttatataattttattagagatggctgtttatacaaattattagtgggtacaaagctaaacaataatataaaataagcacctaatgatatgcttatgaattatcataatctaggtacctagattgtacttcctccgacttttttatttgtcgttgtttagttaaaaataaactagcgaacaacagatattccactttagttttgtttatttgcttcttaacttatgtaagttagattatataatctacacattaaacaaacagccaaacagggcttgcgtcgtatgattgtcattctcgccaagcaccttcccgccacccccacccacccacacgaatcagagaaaagtggttcattgagagttgtcactctgctgtaatttatcaatacttgtcgtatgatttatgcaagcgcttcctagctcacg

SEQ ID NO: 5747 - DNA, 1073 bp, Zea Mays
ccccaagacacaagggaacaagaatagcatgccaaaattgcctggcaaaactgcaagtacacagaagatgttgcactgtttcctgctcttggtcacaaagaacacaaacaaccgggtgttgcagccctattacgcaacgaacttctatattctactacgtgctgttgatcgattggctgccaattatagcagattgcctggaatcttcgacaggctgaagactgttgcggcttcagtggcaagtgagatgggtttgaatggagcatccttatccgaagacctgataaccgagatgtgccggttcgggggtgcggagattcatccagtggctgcttttgtcggtggagttgcttcccaagaagtgattaagctggtcaccaagcagtttgtgccgttgccgggaacattcatatttaatggaatcgacctcaaatctcaagttttgatgctataacatggatgtggaacgttgtctgtgtggactggatttgagttggcccagattttgtgccagggcacaacgctgcaaatggaatctgtttgcccaacgcgtagccaaatatgtgttgcatgatattttagagcctgtttgtttcctcgcaggattatataatccagcttagtttatatagattatataatccaatttatataattttattagagatggctgtttatacaaattattagtgggtacaaagctaaacaataatataaaataagcacctaatgatatgcttatgaattatcataatctaggtacctagattgtacttcctccgacttttttatttgtcgttgtttagttaaaaataaactagcgaacaacagatattccactttagttttgtttatttgcttcttaacttatgtaagttagattatataatctacacattaaacaaacagccaaacagggcttgcgtcgtatgattgtcattctcgccaagcaccttcccgccacccccacccacccacacgaatcagagaaaagtggttcattgagagttgtcactctgctgtaatttatcaatacttgtcgtatgatttatgcaagcgcttcctagctcacg

SEQ ID NO: 5748 - DNA, 1066 bp, Zea Mays
ccccaagacacaagggaacaagaatagcatgccaaaattgcctggcaaaactgcaagtacacagaagatgttgcactgtttcctgctcttggtcacaaagaacacaaacaaccgggtgttgcagccctattacgcaacgaacttctatattctactacgtgctgttgatcgattggctgccaattatagcagattgcctggaatcttcgacagactgttgcggcttcagtggcaagtgagatgggtttgaatggagcatccttatccgaagacctgataaccgagatgtgccggttcgggggtgcggagattcatccagtggctgcttttgtcggtggagttgcttcccaagaagtgattaagctggtcaccaagcagtttgtgccgttgccgggaacattcatatttaatggaatcgacctcaaatctcaagttttgatgctataacatggatgtggaacgttgtctgtgtggactggatttgagttggcccagattttgtgccagggcacaacgctgcaaatggaatctgtttgcccaacgcgtagccaaatatgtgttgcatgatattttagagcctgtttgtttcctcgcaggattatataatccagcttagtttatatagattatataatccaatttatataattttattagagatggctgtttatacaaattattagtgggtacaaagctaaacaataatataaaataagcacctaatgatatgcttatgaattatcataatctaggtacctagattgtacttcctccgacttttttatttgtcgttgtttagttaaaaataaactagcgaacaacagatattccactttagttttgtttatttgcttcttaacttatgtaagttagattatataatctacacattaaacaaacagccaaacagggcttgcgtcgtatgattgtcattctcgccaagcaccttcccgccacccccacccacccacacgaatcagagaaaagtggttcattgagagttgtcactctgctgtaatttatcaatacttgtcgtatgatttatgcaagcgcttcctagctcacg

SEQ ID NO: 5749 - DNA, 2797 bp, Zea Mays
ccatggtcaatttgagaaactgatttgaaaaaaaatagtgagatagtagccacttttcttgcaaacaattagaggaagcgacaggtgaaaacaaatctgcagtaagtaaagtaggggacaggagagcataacaaaagcaatatgctagcgtgctagtgcccattttgttattcgagttacagggatctttatcgattggagtttcaacagttacagtaagacgtcggttcatggaaatgttttcaaatttcaactaacttcaaaccaaaaaagaaacaaagagaaggatatgttttgaaaagcattataatgctaaaccgagcctaagagttccacaacttccactgatagaagatatgttggtagcagaaagatctgttgaaagaagcagaataatgcaagcaggaaaaacattgccaaccctacatgtgactttgactgcccagctctaaactttgaggccataatgacaatatcacatagagaacgataatcataaaaaagagcagactgtcacaaggccaggtgtgagcccagggccgagaaggaccaagtggcaatacaagcccaagtgcccaacatgtctgtgtttgggccggactggactcagtaactggagagcatttagtcctctggttagctgagttgaggatggcgtggagagttttggcttggagaagactttggccagctgtgtcccgacctggagtgcatcgagagatttttccttccactttctgctatagaattctataatccgtgaacttcgtgagagggagtgtcgggagcggtgctcgacgtaatacaaaatcccagtgttgattacaattggtatcagattcttgtcgcgatcctggcggatcgtatctcctccgcccgcagtacaagacttgactgcaacgtgacgttcaagccatggagaagagcgttggtgatcttactgcgctcctgcaagctatgcaacttcaaaatgagtccatcaagcaggccttggatgcaaataccgcagtggtgagagatctctcatcatggaagccgcagatcgaaactgaagtgttgaatctacgacaagatgtgggatctctgtctgacaaactggatgaattgatggctattaaggatcaacaccacactgccccgaaggtgttcgatcgggagcctctggagcctgggttttctccgtcgacttctctgggattatctctacatcaggcaactcatggacattctgatcatcaccatgcaccccttcaccagagcaatggacttggggtggtgaccaccctgactccacctccggaagaactgtcgacatctagtggaaatgctactacagctcttaagcaaccaagccgatctctgattactgggaattcttcatcagtggtggctcagtcagatggtcagcgtaaacagcaaccaatggtagccaacagtttgggaggactgaccaaatctgggactgatgagcgtaaagcttcggttctgatggcttaccgtaaagctaaaggtctttgctacaagtgtggtcttcattggggtccaacacacaaatgcagtgacacagttccattacatatcgtggaaaagttgtggcagctgttggatcagcctgtctctccagataactcacatgtcagtcaagaggattcgggaaatgacttaatggtgttatcctttcatgctgtacatggcactgaagctcctcagaccataaaactgatggcaactttgttttccaagaaagtattgatgcctcggggagctcttcctccttcatcagtcaacccttagtcgccttgggtcctccattgattcctctcactaattcagttcaagtcaaggtggccaatggacagttgctgtcttgtacccattatctaccccaatgcaaagtgagtttgtctggccatgttttttttctatcaaccttaaggttcttcctttgcaatgctacaatgttatattgggtatggattgattatcttcacatagtcctatggagattcattggcaagataagtggttagcctttactcatgaacagcagagagtggttcttcatggccagttgtctgatacttcaatggtggagcagatctcagtatgccagctgtatcacttagacaaattggatgaactttggtgcacaattgagttacaacagatttctgaccaacaatcccataccagtctaccacacgagattcaaagtcttattcaagaatttgcctcattgtttgaccaacccaataggttgccacctcctaggtgccattgtcatacaattcccttgattcaggagcaacacctttttcggttaaggccttacagatacaacccagctcagaaagatgagattgaacgccaaattgcagatttgcttcacaaaggaatgattcagccgagctgcagcccatttgtttcaccaattattctagctcgaaagaagaccggcgattcgaggctctgtgttgactgtcgtcgtttaaatgccctcactataaaaaataagtatccttttccagtttctgctatagaattctgtaatctgtgaacttcgtgagggagagtaccgggagcagtgctcgacgtaatacaaaaccccagtgttgattacaaaaacctaatggtggaggctcccacatgagtgggcaagcaccctccccggcaaatacgaagaggctgcttcgaacccacaacctgaagactcagtgggacaactctcatcactgcaccaggtctgcccttctataaagaataataatcatcacgaacatagacaaaattagacaca

SEQ ID NO: 5750 - DNA, 729 bp, Zea Mays
cctctctcccctttttttctctctccaacactttactattctctgttcaagcggtggagctctgagggctgggcggccaggcgctcgagcagcgaggcagcggcgctcgcgcacggcggcgcccacgcgctcacgcttggcagtagccgggtggcggtggttgctcacccgtgctcggcagcaacaaggtggtgcccgctcggcagcagcaaggcggtcgtagccgctcgcccgcgcgccttcgtgcggtagcggcgagacgacggcgctcgctcgcccacactcgtcagcagtgagacggtggcccccactcgctcgtgcaccttcgtgaggcagcggaaaataaacgtatgtatcacacatgattgatcgacgtgtgtgtcggcgatttaaagtcagcggcaatcatgtgtgcaccccatcgacttcgtgtcggcgataaaatctgctaagagatgcatgctttaggtatttgtgctaaaaaaacagaactccaatacacagatcataaaatatatgaattcagcaccttttacattacctttgctcgatcttcgttttagagccacgtgcgtgataactgataacgtgttaagaaccccttgctaccgagtgtagtccaagggctccttaactgaataatagtagaacacaaggagacaatagtgtagagagggactgattctttattactgtatgatgctgctgtctaaggttacatgatatggg

SEQ ID NO: 5751 - DNA, 200 bp, Zea Mays
ctcgaatagatgaacaattcaccagcatgcatatgtagctagctagaaacatgctagctctttgatcaccctgcaccatgaacacatcgcacaccaattaaagcttgtaagtaaacctaacctagcaacatgcgtgcgttagaagtttacatatcatggacctaaaatataatggacaacaatatagaaaaatacacccg

SEQ ID NO: 5752 - DNA, 228 bp, Zea Mays
atgatgctggcggcgctgccgctgccaccggtcgcggtggacgaggtggacgacgacgtcccacccgcgctggaagcggaggcggctgacgacgagttggacttggacgacttggtgcgcttgttgcggcggcacccgccgccaacggggacgttccggagcgtgccgccgcgcgtccagtaccggcgacacgtcttgcagaagtggcgcggctgggagagcgagtag

SEQ ID NO: 5753 - DNA, 1766 bp, Zea Mays
gcgaaacccgcggcgccttgcgcacacgcctcccttgcccgccattaactgcctctccctcgctcctctcgctcgctcggctcactccctctccaaagcggcagcctcacgcagtcacgcgctccaccacgccacctccctccacccctcactatatactcactcctgctgttttccgtccatccgcccaccggttcgcagcccgcgcctcaaaaccctagccccgggcggatcgcggggcgcctccgcggtgccagcgacgcggctcgtttgatccgattgttggtcgagccccgccctcgctgccgcgcttcgctccggctgtgcaggtgcagcggcgtgagcaccgagcacactcgcgaatggggaactgctggggtgcgcggatcaaggatgggagccctcaccctggcgcctcaggaatgttctcaaagagtagtggtaaggatgggagtaggcttagcggctgtagtagtcgagcctcttcagcttctatgccaccaagtgcgaagactgaatgtgaaatcctgcgatccgccaatgcctggcactgggattgctgttgctgtgaaaagactcaaccatgagggtttgcaagggcaccgagagtggttggcggaagttaattacctaggtcagttctgtcatcccaaccttgtcaagctgattggatactgcttagaggatgagcaccgactgctagtatacgagttcatgccccgtgggaacatggaaaaccatctgtttaggagaggctcatacttccaacctctgtcatggaaccttagaatgaaggttgcactgggagcagcaaaaggactagcttaccttcatagtgcagaggcaaaagttatttaccgagattttaagacttcgaacatcctccttgacacagattattctgcgaagctttctgattttggattggctaaggatggtcctgtcggtgagaagagccatgtgtccacaagagttatgggaacatatggttatgcagctcctgagtatctttcaacaggtcacctaactgcaaagagcgacatctatagctttggggtagtgcttctggagatgctgtcaggccgccgcgccatcgacaagaaccgcccccagggtgagcacaatctcgtggagtgggctcggccttacctcacacataagcgcaagatattccggatcctggatacgaggctggaaggtcaatacaatctgaacggtgcacaaacaattgctgcccttgctctcgaatgcctatcctacgaagctaagatgaggccgactatggacgctgtggttgctattctagaagagctccagggctctggtgaagccgagaagaagcttcaagaacccaaggccggaaccaaacaggcacctgctgctgtgagtgctagcatgagcagcagccgcaagcctcgccggaaaagtctgggagacacaaaggagactgttggtgttccagatcccaaaccattggcccattctcgttagcaaggaaaagcattgcctggtcaagtcgttagctagactgtagctcgcttgtgaatatgctatggtctgtgtatgtatgttcagagggtaatcgggcttttggcaacagtcttttcgtctttatcatgagctgctcggttcagcctgactggaacctgtatgccgaaacccatggcatcagagagagggggagagagctcatgttccgagtctttaacttatgtcttcgctacacaggctgcatttgttccaggtcatataggatgttcagtagg

SEQ ID NO: 5754 - DNA, 1167 bp, Zea Mays
cagtaaaacactatggttggtactgccactactactacaacacaagcaggtcgttgatattgcgtactactatacggctggggcagaacgggagatgccacgttcctgtgcgtgcgggtgtctgcctgccggtgtgccccccgacggccaaagtgtgaaaaaaggtcaagagcctgcgctgccctaccagtaccagcgtgctgtcgtctactgttcctaccactgccaccaccaccaaggtagtagggtgccttttttgaggcttctctgggcgtttttccctgtggcccggtcgtctttcttttctcgaaaccccgtgctccactatgcaccacgcggtttctttttttttttttaacgtaaaggtgaaagtgccctctgcgcactgtgactcacgggtcaggacggtctgtgcagatgtcatgacgctgatgaagcggcaggctcgggcaatgtcgccacaggaacgaggattctctgtgatactgtcagacatgtgccccccagtttcagggatcacgactaaagatggagctatatcttgtgagttgggcatgcgcgctctctcgttggcagtagggaagataaagttaaaagattctaattacagtgataccctagagaagtatctgagctccactgagcctgagtctgacgaggatggcgttcttcgacgtggaggcaacctggtagtgaagtttcttgagaatgaggacatatcagggtttggcaaattctgcaaggtgaagttcaagaaagtatcgttgttgagacccaaggcgactcgacctagctcgagggagatctacatgatctgcgaaggtttgcggtagaaaggagggctcttcagaaggcaagcgaagactccaagaagctaggtcagttgagttgccctgaactgggcgctgttagttctagctgctggtgcaggtgctggctgattggcaatgtgatacagctgtttgatgctgatagcctcccagagcaagttaccacaaagctttgtgtgattgaaccatgctagtagttcgtctagatgttacctgtaataattttgttgaactgtgatactagttcgtctaggagaaacaagcatttgacttgagccctttctgagaacctgaaacacccttgctttttatgttgcaaatttccattatttcggcc

SEQ ID NO: 5755 - DNA, 2177 bp, Zea Mays
gcggtctttgcgcaggcagggtagagccggagatcagagatcttgatgcagacaagtccttcggcgtgcagggaagcggaaggtttcgcgatgtggtcacaagtagtctgcctcgtgaaatggtgcgggagggtttagttggtgctgctcataagggtcagaagaacccgcgtgacgaggacatggagatggaggggaggaagagcaaacagtcggcactgtgtgacgaagagactgtccgggagatgtttgacaaggtgctgttgtgtaccgacaagaactgtgagttccactcaccaatgccagccgatgcacagatcagcgggggatatgtgaaaggatctagaaataagcgagggcgaaggaaggggagatcaggttctggtgcagaggaggagccagttgatctcacaaccctactcatacattgtgctcaggccgcggctatcgacgaccacaggaactcaagcgagctgctgaaacagatcaggaagcattcctctgctactggagatgctggccagagattggcacactacttcgccgatgggctggaggctcgcctagctggctctggcagcagcatctaccgttcgcttgctgcaaagagaacttccactggtgatatactgaaggcgttcagtttgtatgtcaaagcatgtccgtttaggatactatcacactatgtcgcaaacacgaccatcttaaacgctacgaagagcgccacaaggctgcacatcatagactacgggataatgtatggtttccagtggccagtcctcatgcagcggctctcaaagagacctggtggccccccgtaccttcggatcactggtatagactttcccctgtcaggattccgccctgcagagcgtgttgaggcgacagggcggcggttgcatgagtatgcccgtatgttcaatgtcccatttgaataccaagccattgctgccaagtgggatactatccaagttaaagatctcaacatgaagagcgatgagttcgtcgtcgttaactgcctctaccggatgaggaacatgatggacgagacggtgacggatgacagcccgagaacgcgggttttgaacacaatcagaaagctgaatccccatctgttcgttcatgggatcgtcaatggtacttacaatgcacccttcttcgtgacgcggtttaaggaggctatgttcttcttctcttcgatctttgatatgctcgaagcgaatgccttacggatggatgagcataggctgctgatagagagagagttctttggccgggaagctgtcaatgtgattgcctgtgagggcacagagaggattgaaaggccagagacctacaaacaatggcagatgagaaacctcagggcaggcttccggcagttagctctggacagggagataatgaagagagcaaggtacaaggtaagcaagagctatcagggggatttcctcgtggacgaagataacaagtggatgctacaaggttggaagggtcgtatcatatatgcactttcagcatggactagctagacttgtaaatattagtgagctactgagctgcttagctgacctcttccattaatttcttgattaatcaccatttcattttgctgtattatgtttacgttgttgaatctagccctcttttagaaaccaaagttttgtatgtttgaattggctgcaataatagaatcttgtccgtgtctgcctgacatatttgtgttaatagtgtaagaggtgtttctctatctttgttcctgtctttggaaagaagacactgttttgttcgttgaatcagtagcaccatatcttgagtaaaagaagttgaggctcagctgaaaactcttacaaactcataaactgctttgccatttaatcttttgtggtgaaagggtctctagcttggtgggtaaggtttctgagtatcacctccaagttcgggtttgattccttttaggggcgaatttttcggtttggttaaaaaaaatcctcttgtgcttcatccgctctcgggttacgatgtcctgtacgccacaatttggttggaccgttgcagagtggatggttaacgtcggtccattagtgatgagaggtcagagttcgaggattttctcggtcaggaccaatgttttgttctctttttagccatcagtgaattgtatgcatccttgagtgcca

SEQ ID NO: 5756 - DNA, 2817 bp, Zea Mays
cggagatcagagatcttgatgcagacaagtccttcggcgtgcaggttctctctaagcggaatccttgtgttcttgagagagagagagagagagagagagagagagagagagagagagagagactcagaaaggtagcgcagaggtgagatttgtaacctgtaataagtgacttgtggcgctgaagatcgaaagtcagagaaatcttgtggatacaagctccacctccaaggaatgataatggaccctcgtcctcgtgacgatcccaacctcggtgctcgattgcccaccccaaatccacccgcacctcacatgattagcttctccctccagcagccacagcttcagttcttcccttcgtatggattccacggccacagccacagctctcctgtcagctcgcatccatctccaccctcggccatgcctggctgcaccacgccaagcccggcatcgacaaccacaaccgagccagacagcgtcgaggatttttccgagactgttgctgacgacgcggtcctagcatacatcaaccagttccttcttgaagacgaggacgaggaatcctatcctattaccagcgcgcctgtggaggattcagcactcctcgccgccgtcgagaaaccattcgtcgacatcctcgagtctgccaagcctatcgcagcacagggctatgaagtaaagtcttggatcactgatgactgtgattctacaggaagcggaaggtttcgcgatgtggtcacaagtagtctgcctcgtgaaatggtgcgggagggtttagttggtgctgctcataagggtcagaagaacccgcgtgacgaggacatggagatggaggggaggaagagcaaacagtcggcactgtgtgacgaagagactgtccgggagatgtttgacaaggtgctgttgtgtaccgacaagaactgtgagttccactcaccaatgccagccgatgcacagatcagcgggggatatgtgaaaggatctagaaataagcgagggcgaaggaaggggagatcaggttctggtgcagaggaggagccagttgatctcacaaccctactcatacattgtgctcaggccgcggctatcgacgaccacaggaactcaagcgagctgctgaaacagatcaggaagcattcctctgctactggagatgctggccagagattggcacactacttcgccgatgggctggaggctcgcctagctggctctggcagcagcatctaccgttcgcttgctgcaaagagaacttccactggtgatatactgaaggcgttcagtttgtatgtcaaagcatgtccgtttaggatactatcacactatgtcgcaaacacgaccatcttaaacgctacgaagagcgccacaaggctgcacatcatagactacgggataatgtatggtttccagtggccagtcctcatgcagcggctctcaaagagacctggtggccccccgtaccttcggatcactggtatagactttcccctgtcaggattccgccctgcagagcgtgttgaggcgacagggcggcggttgcatgagtatgcccgtatgttcaatgtcccatttgaataccaagccattgctgccaagtgggatactatccaagttaaagatctcaacatgaagagcgatgagttcgtcgtcgttaactgcctctaccggatgaggaacatgatggacgagacggtgacggatgacagcccgagaacgcgggttttgaacacaatcagaaagctgaatccccatctgttcgttcatgggatcgtcaatggtacttacaatgcacccttcttcgtgacgcggtttaaggaggctatgttcttcttctcttcgatctttgatatgctcgaagcgaatgccttacggatggatgagcataggctgctgatagagagagagttctttggccgggaagctgtcaatgtgattgcctgtgagggcacagagaggattgaaaggccagagacctacaaacaatggcagatgagaaacctcagggcaggcttccggcagttagctctggacagggagataatgaagagagcaaggtacaaggtaagcaagagctatcagggggatttcctcgtggacgaagataacaagtggatgctacaaggttggaagggtcgtatcatatatgcactttcagcatggactagctagacttgtaaatattagtgagctactgagctgcttagctgacctcttccattaatttcttgattaatcaccatttcattttgctgtattatgtttacgttgttgaatctagccctcttttagaaaccaaagttttgtatgtttgaattggctgcaataatagaatcttgtccgtgtctgcctgacatatttgtgttaatagtgtaagaggtgtttctctatctttgttcctgtctttggaaagaagacactgttttgttcgttgaatcagtagcaccatatcttgagtaaaagaagttgaggctcagctgaaaactcttacaaactcataaactgctttgccatttaatcttttgtggtgaaagggtctctagcttggtgggtaaggtttctgagtatcacctccaagttcgggtttgattccttttaggggcgaatttttcggtttggttaaaaaaaatcctcttgtgcttcatccgctctcgggttacgatgtcctgtacgccacaatttggttggaccgttgcagagtggatggttaacgtcggtccattagtgatgagaggtcagagttcgaggattttctcggtcaggaccaatgttttgttctctttttagccatcagtgaattgtatgcatccttgagtgcca

SEQ ID NO: 5757 - DNA, 669 bp, Zea Mays
ggagatcagagatcttgatgcagacaagtccttcggcgtgcagggaacgaggattctctgtgatactgtcagacatgtgccccccagtttcagggatcacgactaaagatggagctatatcttagaagtatctgagctccactgagcctgagtctgacgaggatggcgttcttcgacgtggaggcaacctggtagtgaagtttcttgagaatgaggacatatcagggtttggcaaattctgcaaggtgaagttcaagaaagtatcgttgttgagacccaaggcgactcgacctagctcgagggagatctacatgatctgcgaaggtttgcggtagaaaggagggctcttcagaaggcaagcgaagactccaagaagctaggtcagttgagttgccctgaactgggcgctgttagttctagctgctggtgcaggtgctggctgattggcaatgtgatacagctgtttgatgctgatagcctcccagagcaagttaccacaaagctttgtgtgattgaaccatgctagtagttcgtctagatgttacctgtaataattttgttgaactgtgatactagttcgtctaggagaaacaagcatttgacttgagccctttctgagaacctgaaacacccttgctttttatgttgcaaatttccattatttcggcc

SEQ ID NO: 5758 - DNA, 1076 bp, Zea Mays
gcccagcccatgcaaggcccgcgctgcgctaaactcagagacgggaaacgggaaaagaaaagagggctaaaaacctagcaatcccctcctcgccgtagctgtcggacgaggtaaccatggccgcggggggcaccgccgacttcttctaccgcgagtcgcagcgtctgggctacgtcgcccgctctgcgtttaagctgatccagatgcagaagcagcacaagctcatcgcgccgggcgccgctgtactcgacctcggctgcgcccccggcgcgtggcttcaggtggcttgtcagaacctgggtcccctcgagaagggtggcattgtcgtcggcgtcgatgttaagagcagaaggtgaaagtgccctctgcgcactgtgactcacgggtcaggacggtctgtgcagatgtcatgacgctgatgaagcggcaggctcgggcaatgtcgccacaggaacgaggattctctgtgatactgtcagacatgtgccccccagtttcagggatcacgactaaagatggagctatatcttagaagtatctgagctccactgagcctgagtctgacgaggatggcgttcttcgacgtggaggcaacctggtagtgaagtttcttgagaatgaggacatatcagggtttggcaaattctgcaaggtgaagttcaagaaagtatcgttgttgagacccaaggcgactcgacctagctcgagggagatctacatgatctgcgaaggtttgcggtagaaaggagggctcttcagaaggcaagcgaagactccaagaagctaggtcagttgagttgccctgaactgggcgctgttagttctagctgctggtgcaggtgctggctgattggcaatgtgatacagctgtttgatgctgatagcctcccagagcaagttaccacaaagctttgtgtgattgaaccatgctagtagttcgtctagatgttacctgtaataattttgttgaactgtgatactagttcgtctaggagaaacaagcatttgacttgagccctttctgagaacctgaaacacccttgctttttatgttgcaaatttccattatttcggcc

SEQ ID NO: 5759 - DNA, 1071 bp, Zea Mays
gcccagcccatgcaaggcccgcgctgcgctaaactcagagacgggaaacgggaaaagaaaagagggctaaaaacctagcaatcccctcctcgccgtagctgtcggacgaggtaaccatggccgcggggggcaccgccgacttcttctaccgcgagtcgcagcgtctgggctacgtcgcccgctctgcgtttaagctgatccagatgcagaagcagcacaagctcatcgcgccgggcgccgctgtactcgacctcggctgcgcccccggcgcgtggcttcaggtggcttgtcagaacctgggtcccctcgagaagggtggcattgtcgtcggcgtcgatgttaagaaggtgaaagtgccctctgcgcactgtgactcacgggtcaggacggtctgtgcagatgtcatgacgctgatgaagcggcaggctcgggcaatgtcgccacaggaacgaggattctctgtgatactgtcagacatgtgccccccagtttcagggatcacgactaaagatggagctatatcttagaagtatctgagctccactgagcctgagtctgacgaggatggcgttcttcgacgtggaggcaacctggtagtgaagtttcttgagaatgaggacatatcagggtttggcaaattctgcaaggtgaagttcaagaaagtatcgttgttgagacccaaggcgactcgacctagctcgagggagatctacatgatctgcgaaggtttgcggtagaaaggagggctcttcagaaggcaagcgaagactccaagaagctaggtcagttgagttgccctgaactgggcgctgttagttctagctgctggtgcaggtgctggctgattggcaatgtgatacagctgtttgatgctgatagcctcccagagcaagttaccacaaagctttgtgtgattgaaccatgctagtagttcgtctagatgttacctgtaataattttgttgaactgtgatactagttcgtctaggagaaacaagcatttgacttgagccctttctgagaacctgaaacacccttgctttttatgttgcaaatttccattatttcggcc

SEQ ID NO: 5760 - DNA, 1016 bp, Zea Mays
ggaaaagaaaagagggctaaaaacctagcaatcccctcctcgccgtagctgtcggacgaggtaaccatggccgcggggggcaccgccgacttcttctaccgcgagtcgcagcgtctgggctacgtcgcccgctctgcgtttaagctgatccagatgcagaagcagcacaagctcatcgcgccgggcgccgctgtactcgacctcggctgcgcccccggcgcgtggcttcaggtggcttgtcagaacctgggtcccctcgagaagggtggcattgtcgtcggcgtcgatgttaagaaggtgaaagtgccctctgcgcactgtgactcacgggtcaggacggtctgtgcagatgtcatgacgctgatgaagcggcaggctcgggcaatgtcgccacaggaacgaggattctctgtgatactgtcagacatgtgccccccagtttcagggatcacgactaaagatggagctatatctttatctgagctccactgagcctgagtctgacgaggatggcgttcttcgacgtggaggcaacctggtagtgaagtttcttgagaatgaggacatatcagggtttggcaaattctgcaaggtgaagttcaagaaagtatcgttgttgagacccaaggcgactcgacctagctcgagggagatctacatgatctgcgaaggtttgcggtagaaaggagggctcttcagaaggcaagcgaagactccaagaagctaggtcagttgagttgccctgaactgggcgctgttagttctagctgctggtgcaggtgctggctgattggcaatgtgatacagctgtttgatgctgatagcctcccagagcaagttaccacaaagctttgtgtgattgaaccatgctagtagttcgtctagatgttacctgtaataattttgttgaactgtgatactagttcgtctaggagaaacaagcatttgacttgagccctttctgagaacctgaaacacccttgctttttatgttgcaaatttccattatttcggcc

SEQ ID NO: 5761 - DNA, 1061 bp, Zea Mays
ggaaaagaaaagagggctaaaaacctagcaatcccctcctcgccgtagctgtcggacgaggtaaccatggccgcggggggcaccgccgacttcttctaccgcgagtcgcagcgtctgggctacgtcgcccgctctgcgtttaagctgatccagatgcagaagcagcacaagctcatcgcgccgggcgccgctgtactcgacctcggctgcgcccccggcgcgtggcttcaggtggcttgtcagaacctgggtcccctcgagaagggtggcattgtcgtcggcgtcgatgttaagagcagaaggtgaaagtgccctctgcgcactgtgactcacgggtcaggacggtctgtgcagatgtcatgacgctgatgaagcggcaggctcgggcaatgtcgccacagtttcagggatcacgactaaagatggagctatatcttgtgagttgggcatgcgcgctctctcgttggcagtagggaagataaagttaaaagattctaattacagtgataccctagagaagtatctgagctccactgagcctgagtctgacgaggatggcgttcttcgacgtggaggcaacctggtagtgaagtttcttgagaatgaggacatatcagggtttggcaaattctgcaaggtgaagttcaagaaagtatcgttgttgagacccaaggcgactcgacctagctcgagggagatctacatgatctgcgaaggtttgcggtagaaaggagggctcttcagaaggcaagcgaagactccaagaagctaggtcagttgagttgccctgaactgggcgctgttagttctagctgctggtgcaggtgctggctgattggcaatgtgatacagctgtttgatgctgatagcctcccagagcaagttaccacaaagctttgtgtgattgaaccatgctagtagttcgtctagatgttacctgtaataattttgttgaactgtgatactagttcgtctaggagaaacaagcatttgacttgagccctttctgagaacctgaaacacccttgctttttatgttgcaaatttccattatttcggcc

SEQ ID NO: 5762 - DNA, 1670 bp, Zea Mays
ggaaaagaaaagagggctaaaaacctagcaatcccctcctcgccgtagctgtcggacgaggtaaccatggccgcggggggcaccgccgacttcttctaccgcgagtcgcagcgtctgggctacgtcgcccgctctgcgtttaagctgatccagatgcagaagcagcacaagctcatcgcgccgggcgccgctgtactcgacctcggctgcgcccccggcgcgtggcttcaggtggcttgtcagaacctgggtcccctcgagaagggtggcattgtcgtcggcgtcgatgttaagaaggtgaaagtgccctctgcgcactgtgactcacgggtcaggacggtctgtgcagatgtcatgacgctgatgaagcggcaggctcgggcaatgtcgccacaggttcgaatcattgatcgtgtttggtgtggttgaatacttttgcttgggtgatgattgctagaacaacaaatagtgcggcatattggacagttagggctagtttagaaacctcattttcccaaggaaaattagttcattttcccttgggaaaataggaatcacttgggaaaatggagttcccaaactagctctagtttggattttactgaatctcatatttggtctgactacttgttttgtgtgtataactcgggaaggtagttcttaggttagaattagatagatggaaaggtatggattcctatattttcaagaaaactcggaggcaatttctatagcgagtaggaactagagatgtaataataattgatagtgtgaatactaaatcgctgactattgaacacagagctgactgtgattctgtatgaaatcatgtatctattcagcctttattggtgaaatgaaaatcgcaattgtcagttgttaagttgagagagtaattactcatgagaagctgagctcacttattttgttcaacactctgccctctgtttgtgatttacatatacaggaacgaggattctctgtgatactgtcagacatgtgccccccagtttcagggatcacgactaaagatggagctatatcttgtgagttgggcatgcgcgctctctcgttggcagtagggaagataaagttaaaagattctaattacagtgataccctagagaagtatctgagctccactgagcctgagtctgacgaggatggcgttcttcgacgtggaggcaacctggtagtgaagtttcttgagaatgaggacatatcagggtttggcaaattctgcaaggtgaagttcaagaaagtatcgttgttgagacccaaggcgactcgacctagctcgagggagatctacatgatctgcgaaggtttgcggtagaaaggagggctcttcagaaggcaagcgaagactccaagaagctaggtcagttgagttgccctgaactgggcgctgttagttctagctgctggtgcaggtgctggctgattggcaatgtgatacagctgtttgatgctgatagcctcccagagcaagttaccacaaagctttgtgtgattgaaccatgctagtagttcgtctagatgttacctgtaataattttgttgaactgtgatactagttcgtctaggagaaacaagcatttgacttgagccctttctgagaacctgaaacacccttgctttttatgttgcaaatttccattatttcggcc

SEQ ID NO: 5763 - DNA, 1012 bp, Zea Mays
ggaaaagaaaagagggctaaaaacctagcaatcccctcctcgccgtagctgtcggacgaggtaaccatggccgcggggggcaccgccgacttcttctaccgcgagtcgcagcgtctgggctacgtcgcccgctctgcgtttaaggtggcttgtcagaacctgggtcccctcgagaagggtggcattgtcgtcggcgtcgatgttaagaaggtgaaagtgccctctgcgcactgtgactcacgggtcaggacggtctgtgcagatgtcatgacgctgatgaagcggcaggctcgggcaatgtcgccacaggaacgaggattctctgtgatactgtcagacatgtgccccccagtttcagggatcacgactaaagatggagctatatcttgtgagttgggcatgcgcgctctctcgttggcagtagggaagataaagttaaaagattctaattacagtgataccctagagaagtatctgagctccactgagcctgagtctgacgaggatggcgttcttcgacgtggaggcaacctggtagtgaagtttcttgagaatgaggacatatcagggtttggcaaattctgcaaggtgaagttcaagaaagtatcgttgttgagacccaaggcgactcgacctagctcgagggagatctacatgatctgcgaaggtttgcggtagaaaggagggctcttcagaaggcaagcgaagactccaagaagctaggtcagttgagttgccctgaactgggcgctgttagttctagctgctggtgcaggtgctggctgattggcaatgtgatacagctgtttgatgctgatagcctcccagagcaagttaccacaaagctttgtgtgattgaaccatgctagtagttcgtctagatgttacctgtaataattttgttgaactgtgatactagttcgtctaggagaaacaagcatttgacttgagccctttctgagaacctgaaacacccttgctttttatgttgcaaatttccattatttcggcc

SEQ ID NO: 5764 - DNA, 1032 bp, Zea Mays
ggaaaagaaaagagggctaaaaacctagcaatcccctcctcgccgtagctgtcggacgaggtaaccatggccgcggggggcaccgccgacttcttctaccgcgagtcgcagcgtctgggctacgtcgcccgctctgcgtttaagctgatccagatgcagaagcagcacaagctcatcgcgccgggcgccgctgtactcgacctcggctgcgcccccggcgcgtggcttcaggtggcttgtcagaacctgggtcccctcgagaagggtggcattgtcgtcggcgtcgatgttaagaaggtgaaagtgccctctgcgcactgtgactcacgggtcaggacggtctgtgcagatgtcatgacgctgatgaagcggcaggctcgggcaatgtcgccacaggaacgaggattctctgtgatactgtcagacatgtgccccccagtttcagggatcacgactaaagatggagctatatctttgataccctagagaagtatctgagctccactgagcctgagtctgacgaggatggcgttcttcgacgtggaggcaacctggtagtgaagtttcttgagaatgaggacatatcagggtttggcaaattctgcaaggtgaagttcaagaaagtatcgttgttgagacccaaggcgactcgacctagctcgagggagatctacatgatctgcgaaggtttgcggtagaaaggagggctcttcagaaggcaagcgaagactccaagaagctaggtcagttgagttgccctgaactgggcgctgttagttctagctgctggtgcaggtgctggctgattggcaatgtgatacagctgtttgatgctgatagcctcccagagcaagttaccacaaagctttgtgtgattgaaccatgctagtagttcgtctagatgttacctgtaataattttgttgaactgtgatactagttcgtctaggagaaacaagcatttgacttgagccctttctgagaacctgaaacacccttgctttttatgttgcaaatttccattatttcggcc

SEQ ID NO: 5765 - DNA, 736 bp, Zea Mays
gttcaacactctgccctctgtttgtgatttacagaacgaggattctctgtgatactgtcagacatgtgccccccagtttcagggatcacgactaaagatggagctatatcttgtgagttgggcatgcgcgctctctcgttggcagtagggaagataaagttaaaagattctaattacagtgataccctagagaagtatctgagctccactgagcctgagtctgacgaggatggcgttcttcgacgtggaggcaacctggtagtgaagtttcttgagaatgaggacatatcagggtttggcaaattctgcaaggtgaagttcaagaaagtatcgttgttgagacccaaggcgactcgacctagctcgagggagatctacatgatctgcgaaggtttgcggtagaaaggagggctcttcagaaggcaagcgaagactccaagaagctaggtcagttgagttgccctgaactgggcgctgttagttctagctgctggtgcaggtgctggctgattggcaatgtgatacagctgtttgatgctgatagcctcccagagcaagttaccacaaagctttgtgtgattgaaccatgctagtagttcgtctagatgttacctgtaataattttgttgaactgtgatactagttcgtctaggagaaacaagcatttgacttgagccctttctgagaacctgaaacacccttgctttttatgttgcaaatttccattatttcggcc

SEQ ID NO: 5766 - DNA, 3463 bp, Zea Mays
tcgtggcccacggacgtgtaggaggggacacgccgccgggcctcactaaccgcaggttcgggagtactccggaacccgccgccgcatccacacgacgccacgactgacgacggagagccccggtctccttccacggctccaccgccaccaccccgcataaaacagcagaagaacaagggtatggcgaaggatgggggtcccgactggaacggcctgctcaagtggagcctcgcccacggcgacggcaccaacccgccgcgtgctctcagcgaggaagacagaaaatggttcatggatgctatgcaagccaacacggtagatgttgtgaagaggatgaaggagatcactcaggtgatgaaaactccagaagatgtcttgcagtctcagggcgtgacccctgagaacatcgaagatatgttggatgagctacaggagcatgttgaatccattgacatggcaaatgatctacattctattggtgggctggatcctctacttggttacttgaaaaattcaaatgctggcatccgagcaaaggcagcagaagttgttagtacaattgtgcagaataatcccaagagtcagcaacttgtcatggaatccaatgggctagagccactgttgacgaacttcaaatcagatccaagtacaaatgcacgcacaaaagctttaggagccatatcttctctaattcgtcataaccagcctggagtttccgcatttcgattgggaaatggctatgctggattgaaggatgctcttggttccgatgatgccagactccaaaggaaagctctcaatctcatacaatacttgctgcacaactacaaggcagacaggagtgttgccacagagcttggtcttccgaagctgatgatgcaccttgtgtccagcgatgattccttagtgcgtgaagctgctctaggcggcctccttgagttggcgcgggacaagacatctggtaacgcgctacctgaccaagaaaagctgaaagacatgctcaagagccgaatagaagggatcagcgcaatggacactgacgatctccacgctgctcgcgaggagcggcagctggtggattcactctggaaggagtgctacaacgaaccttcgtctctcagggagaagggcctcgtcgtgcttccgggagaggatgctccccaacagccgccaccagacgttgcagggaagatgtttgagccaccgcttcgtgcgtgggcggctgcaagacctgctcaggaagatgactctgactctggcagcggaaagaaggctccgccattgctgcttaagttttgacggccttcttatgccgatactagttcttaggctccaccatgggtgttgaaagctgaaagatcagatctgatggatgcctgaccttcttcgaacctcagttgtggttcttgtaatttgcaccgcatttctgttctgagtatgtttttatgagaagactgggaagatgacagacagatactgtatcacgtgatgctcgtaaattaacactacatgcgaattctcttgctcgattgctcattttctgatgcttccatgattgctgatatatcttaatccgatccgatagttataatttcacgggtctagttctagagatgctgaagagcttgcgcctgcttgcaggcatatgttactttcagcttgaaggatggccgtccgattctcgcgttcgatctggacggtgggtgattttgcctactcccgtccgtcgatgattcgtcgcgagccattcagaaggcagcaaatctagctatctcctctgcctcctgctggcggtcctgctgcgccatggcgctacagctgcgggccgccgctctctgtccgcccctgccactcaccgccttccatggccgcctcgttgcaccttggcctccgcctcccttggtcagcatagctgtcgccgccgcctccagcccgggtccctccgcgcccctctcctgccgcggcccggcgcctcgctggcgacgttcgagcgtgagggcgcgcaccggggccggcggcggcgggcagagggagtccccatacgaggtgctcggcgtgtcgccgtcggcggcgcccaacgagatcaagcgcgcgtaccgccgcctcgcgctcaagtaccacccggacgtgaacaaggagcccaatgctcaggagaagtttctgcggatcaagcacgcttacaacactctgatgaactcagagtcacgatccaagtacgcgagcagcagttcggattcgtcctggtcctccagctcccgggagagcaaatcagctgctgcagaagagccgttctatggatttgcggacttccttaaagatttgcaaacagaatttcagaactgggaagctgggttgaattcggatcagaaacctaaaagcctttgggaagagttggcagcaattggcgaggaatttgtagagtttctggagaatgagttgaagattgatgactcgagaccagaggacgtcactggagatgacccatacacccagtttggacagcaggcaaaaagcgctaaggatgacaagacgtcgacgaacagctttgatgatggtctttctgaaatagaggccgctcttgagaatctgaagaaggaactcggactgggctaaaccgttgatgtggcaactagaggtgttgctgctgctactgacttagttccttgttcatacaaaggtattccttgtattgtatgtaacggttggtgataatgattagcagttgtgatctatcacattcgtttctgttttgacttttctagatacaagatctggcatatacctagatggctagcaaaagctaagtgccagaaagccaaaacggcctataatttgggatggagaggattatcaatagctcaagagcttctttctgaattctaattgttcagcgtgttcggaaagaaaaagggacaaatgtttgatcgcctttagaattttgtgggtagaggcgttctgattttgtgtgatgggggggtacaaaagaaaaaagttttgcaccgatagcactgttggggaccttcggcgtccgaaggtcctcaaaaactggatttaacagtatttctgtagtacaatgtgtgaacaggtaccctcaaactaaagtcggcattgcagcagaccggaataatacgaagcttgattcagagccgaaggtgctgagcaggaaagcttcggcgtaacagcaaagagtggaaccgacttaaagatgaaaaggctatccagaccccgatagattactatagagttattatcaaatgtaaagggcatgaatgtaattttgtaagggctgtgtcccttgtctataaataggtgaacagtatccccgtactgttcacgctgacttggcattcgttttttgcgccaagcttgtactgttattcccttccgattgaaggtacacttgtaattcgacaatgtttctgtttatgccctatcataatatatgattgcttatattgtcttt

SEQ ID NO: 5767 - DNA, 3499 bp, Zea Mays
tcgtggcccacggacgtgtaggaggggacacgccgccgggcctcactaaccgcaggttcgggagtactccggaacccgccgccgcatccacacgacgccacgactgacgacggagagccccggtctccttccacggctccaccgccaccaccccgcataaaaaaccctacagctcgtattcgcctcatctcgcagcagcagcagaagaacaagggtatggcgaaggatgggggtcccgactggaacggcctgctcaagtggagcctcgcccacggcgacggcaccaacccgccgcgtgctctcagcgaggaagacagaaaatggttcatggatgctatgcaagccaacacggtagatgttgtgaagaggatgaaggagatcactcaggtgatgaaaactccagaagatgtcttgcagtctcagggcgtgacccctgagaacatcgaagatatgttggatgagctacaggagcatgttgaatccattgacatggcaaatgatctacattctattggtgggctggatcctctacttggttacttgaaaaattcaaatgctggcatccgagcaaaggcagcagaagttgttagtacaattgtgcagaataatcccaagagtcagcaacttgtcatggaatccaatgggctagagccactgttgacgaacttcaaatcagatccaagtacaaatgcacgcacaaaagctttaggagccatatcttctctaattcgtcataaccagcctggagtttccgcatttcgattgggaaatggctatgctggattgaaggatgctcttggttccgatgatgccagactccaaaggaaagctctcaatctcatacaatacttgctgcacaactacaaggcagacaggagtgttgccacagagcttggtcttccgaagctgatgatgcaccttgtgtccagcgatgattccttagtgcgtgaagctgctctaggcggcctccttgagttggcgcgggacaagacatctggtaacgcgctacctgaccaagaaaagctgaaagacatgctcaagagccgaatagaagggatcagcgcaatggacactgacgatctccacgctgctcgcgaggagcggcagctggtggattcactctggaaggagtgctacaacgaaccttcgtctctcagggagaagggcctcgtcgtgcttccgggagaggatgctccccaacagccgccaccagacgttgcagggaagatgtttgagccaccgcttcgtgcgtgggcggctgcaagacctgctcaggaagatgactctgactctggcagcggaaagaaggctccgccattgctgcttaagttttgacggccttcttatgccgatactagttcttaggctccaccatgggtgttgaaagctgaaagatcagatctgatggatgcctgaccttcttcgaacctcagttgtggttcttgtaatttgcaccgcatttctgttctgagtatgtttttatgagaagactgggaagatgacagacagatactgtatcacgtgatgctcgtaaattaacactacatgcgaattctcttgctcgattgctcattttctgatgcttccatgattgctgatatatcttaatccgatccgatagttataatttcacgggtctagttctagagatgctgaagagcttgcgcctgcttgcaggcatatgttactttcagcttgaaggatggccgtccgattctcgcgttcgatctggacggtgggtgattttgcctactcccgtccgtcgatgattcgtcgcgagccattcagaaggcagcaaatctagctatctcctctgcctcctgctggcggtcctgctgcgccatggcgctacagctgcgggccgccgctctctgtccgcccctgccactcaccgccttccatggccgcctcgttgcaccttggcctccgcctcccttggtcagcatagctgtcgccgccgcctccagcccgggtccctccgcgcccctctcctgccgcggcccggcgcctcgctggcgacgttcgagcgtgagggcgcgcaccggggccggcggcggcgggcagagggagtccccatacgaggtgctcggcgtgtcgccgtcggcggcgcccaacgagatcaagcgcgcgtaccgccgcctcgcgctcaagtaccacccggacgtgaacaaggagcccaatgctcaggagaagtttctgcggatcaagcacgcttacaacactctgatgaactcagagtcacgatccaagtacgcgagcagcagttcggattcgtcctggtcctccagctcccgggagagcaaatcagctgctgcagaagagccgttctatggatttgcggacttccttaaagatttgcaaacagaatttcagaactgggaagctgggttgaattcggatcagaaacctaaaagcctttgggaagagttggcagcaattggcgaggaatttgtagagtttctggagaatgagttgaagattgatgactcgagaccagaggacgtcactggagatgacccatacacccagtttggacagcaggcaaaaagcgctaaggatgacaagacgtcgacgaacagctttgatgatggtctttctgaaatagaggccgctcttgagaatctgaagaaggaactcggactgggctaaaccgttgatgtggcaactagaggtgttgctgctgctactgacttagttccttgttcatacaaaggtattccttgtattgtatgtaacggttggtgataatgattagcagttgtgatctatcacattcgtttctgttttgacttttctagatacaagatctggcatatacctagatggctagcaaaagctaagtgccagaaagccaaaacggcctataatttgggatggagaggattatcaatagctcaagagcttctttctgaattctaattgttcagcgtgttcggaaagaaaaagggacaaatgtttgatcgcctttagaattttgtgggtagaggcgttctgattttgtgtgatgggggggtacaaaagaaaaaagttttgcaccgatagcactgttggggaccttcggcgtccgaaggtcctcaaaaactggatttaacagtatttctgtagtacaatgtgtgaacaggtaccctcaaactaaagtcggcattgcagcagaccggaataatacgaagcttgattcagagccgaaggtgctgagcaggaaagcttcggcgtaacagcaaagagtggaaccgacttaaagatgaaaaggctatccagaccccgatagattactatagagttattatcaaatgtaaagggcatgaatgtaattttgtaagggctgtgtcccttgtctataaataggtgaacagtatccccgtactgttcacgctgacttggcattcgttttttgcgccaagcttgtactgttattcccttccgattgaaggtacacttgtaattcgacaatgtttctgtttatgccctatcataatatatgattgcttatattgtcttt

SEQ ID NO: 5768 - DNA, 2806 bp, Zea Mays
tcgtggcccacggacgtgtaggaggggacacgccgccgggcctcactaaccgcaggttcgggagtactccggaacccgccgccgcatccacacgacgccacgactgacgacggagagccccggtctccttccacggctccaccgccaccaccccgcataaaagtagggaagagagccttgcagcgagaaccgtatcgatctattctcgtctgaagcaattcgcccctgtcgtgagcagaaccctacagctcgtattcgcctcatctcgcagcagcagcagaagaacaagggtatggcgaaggatgggggtcccgactggaacggcctgctcaagtggagcctcgcccacggcgacggcaccaacccgccgcgtgctctcagcgaggaagacagaaaatggttcatggatgctatgcaagccaacacggtagatgttgtgaagaggatgaaggagatcactcaggtgatgaaaactccagaagatgtcttgcagtctcagggcgtgacccctgagaacatcgaagatatgttggatgagctacaggagcatgttgaatccattgacatggcaaatgatctacattctattggtgggctggatcctctacttggttacttgaaaaattcaaatgctggcatccgagcaaaggcagcagaagttgttagtacaattgtgcagaataatcccaagagtcagcaacttgtcatggaatccaatgggctagagccactgttgacgaacttcaaatcagatccaagtacaaatgcacgcacaaaagctttaggagccatatcttctctaattcgtcataaccagcctggagtttccgcatttcgattgggaaatggctatgctggattgaaggatgctcttggttccgatgatgccagactccaaaggaaagctctcaatctcatacaatacttgctgcacaactacaaggcagacaggagtgttgccacagagcttggtcttccgaagctgatgatgcaccttgtgtccagcgatgattccttagtgcgtgaagctgctctaggcggcctccttgagttggcgcgggacaagacatctggtaacgcgctacctgaccaagaaaagctgaaagacatgctcaagagccgaatagaagggatcagcgcaatggacactgacgatctccacgctgctcgcgaggagcggcagctggtggattcactctggaaggagtgctacaacgaaccttcgtctctcagggagaagggcctcgtcgtgcttccgggagaggatgctccccaacagccgccaccagacgttgcagggaagatgtttgagccaccgcttcgtgcgtgggcggctgcaagacctgctcaggaagatgactctgactctggcagcggaaagaaggctccgccattgctgcttaagttttgacggccttcttatgccgatactagttcttaggctccaccatgggtgttgaaagctgaaagatcagatctgatggatgcctgaccttcttcgaacctcagttgtggttcttgtaatttgcaccgcatttctgttctgagtatgtttttatgagaagactgggaagatgacagacagatactgtatcacgtgatgctcgtaaattaacactacatgcgaattctcttgctcgattgctcattttctgatgcttccatgattgctgatatatcttaatccgatccgatagttataatttcacgggtctagttctagagatgctgaagagcttgcgcctgcttgcaggcatatgttactttcagcttgaaggatggccgtccgattctcgcgttcgatctggacggtgggtgattttgcctactcccgtccgtcgatgattcgtcgcgagccattcagaaggcagcaaatctagctatctcctctgcctcctgctggcggtcctgctgcgccatggcgctacagctgcgggccgccgctctctgtccgcccctgccactcaccgccttccatggccgcctcgttgcaccttggcctccgcctcccttggtcagcatagctgtcgccgccgcctccagcccgggtccctccgcgcccctctcctgccgcggcccggcgcctcgctggcgacgttcgagcgtgagggcgcgcaccggggccggcggcggcgggcagagggagtccccatacgaggtgctcggcgtgtcgccgtcggcggcgcccaacgagatcaagcgcgcgtaccgccgcctcgcgctcaagtaccacccggacgtgaacaaggagcccaatgctcaggagaagtttctgcggatcaagcacgcttacaacactctgatgaactcagagtcacgatccaagtacgcgagcagcagttcggattcgtcctggtcctccagctcccgggagagcaaatcagctgctgcagaagagccgttctatggatttgcggacttccttaaagatttgcaaacagaatttcagaactgggaagctgggttgaattcggatcagaaacctaaaagcctttgggaagagttggcagcaattggcgaggaatttgtagagtttctggagaatgagttgaagattgatgactcgagaccagaggacgtcactggagatgacccatacacccagtttggacagcaggcaaaaagcgctaaggatgacaagacgtcgacgaacagctttgatgatggtctttctgaaatagaggccgctcttgagaatctgaagaaggaactcggactgggctaaaccgttgatgtggcaactagaggtgttgctgctgctactgacttagttccttgttcatacaaagtacaatgtgtgaacagg

SEQ ID NO: 5769 - DNA, 2796 bp, Zea Mays
catcgattcaccctccccggctccccgcccctcccggttttcttcctcccggaccccgccccggcggccgccgattttggggaagcccggccgtttcgcctcccgaaaacccggtaggacacgcgaatccaattgtgccgttcctgacgctgacgcccggcggtgatggctgatgcagcagcgttcgtgctcttgcctgatggagagggacgcggttctggaggacgcggcggcgggggatggggaggagcaggaccaggaccaggaagaggtggtggtgccgatcggagcgcagaagcacgatccggcgtggaagcactgcgtcatggtgcgctccgacggccggatgcgcctcaagtgcgcctactgcggcaagcactttctcggcggtggtatccaccgcttcaaggagcacctggcccgccgccccgggaacgcctgctgctgccccagtgtgccccgcgacgtccaggacaccatgctccgcagcctcgccgccgtcgctgccaagaagatgcagcgcaagctcgccgccgccagcacgacgcccgcctctgtctctacggctagcgggggtaccggcagccccatccacatgatctcgctcaacgaggtgctcgacttcgaggccgtgccgctcgaggagcagaggcctccggttccggagggcagcattagggggagtaccagcggtaagaagaagaggaagcaggtgacctacgcccctgctccgccacttataccccagatccggccgcagcatgttcggtctacccctcagaacaatcttcttcacgggctgcagcatgttccgcctactcctcagaccaaccctcttcatcaggttgtcatggcagtgaacgcagtgacaccagcagagcatttcgaacatgctgccccctcggagaaggagcatgtttccgtggcagttgggaggttcttgtatgacgccggtgtgccattggaagcggtgaactcggtctacttccaaccgatgctcgaggccattgcggcggcaggggggaggcctgagacgctctcgtaccatgactttcgcggtcacattcttaagaggtcactcgacgacgtgacggctcgcttggagttcttcagggggtcatggaccaggacgggctgctcggtgttggctgacgagtggatcactgataaaggcagaaccttgataaacttctccgtgtattgcccggaaggtactatgttcctcaagtcggtggatgcaaccagcatcgtcacatcttcagatgcactgtacgagctactaaaaagtgcagtcgaggaaattggcgagaaaaaagttgtccaggttatcacaaacaattctgaggtccatgcagctgccggaaaaaagctaggtgaaacattccccacattgttctggtctccatgcactttccagtgtgttgatggcatgctcgaagatttcagtaaggtggaggcaattagtgagataataagtaatgcaaaggccattacgggatttgtctacaacagcgcatatgcgttgaatctgatgaagaagtatctgcaagggaaggatctgctggttcctgcggagactcgtgcggctatgaactttgtgacgttgaagaatatgtacggtttgagggaggctttgcaagctatggtcaactcggatgaatggatagacttgttgccaaagaaaggagggattgaagcaagcaatcttgttaataatttgcagttttggaactcctgtgctgccgtcgttcacatcactgagcaacttgtgcaccttcttaagctagtcggtaaccccaagaggccttctatgggttatgtatatgctggactgtacaaggcaaaagcagcaatcaaaaaagagctggtgagtaagaacgattacatggtttactggaatattatcgactggaggtgggacaaccagacaccacagccacttcattcagctggtttcttcctgaaccctctattttttgatggaattcgaggtgacatatcaaatggaatattctcaggaatgctagactgcatagaaaggctggtacctgatgtgaaaatccaagataaagtacagcgagagctccacatataccggagtgaaacagcagtggattttcgtaggcagatggctgtccgatctagacgaactttacctcctgaaattggaaacttgtaagcctattgcatcctttgatcgcggtaatcataaggtgagacaacaacacaaggcgaaagcgtttgatcctctctctgtggactacatagacgtagtcgatgattgggctgtggatagacctgcaatgttctctggcccagctgagcagccaaactggatggagattaatcaatcaggcaaccgaatgacatcaagggaaccaactgaagatgaattcgaatccttcattgaaggagttgatgacgaaatgatccaaggtgctgcacagggcttccatgaagatggtgatgatcctgcttgtggctgaggctatatagattgacagccagttaacctgtaagctaatgttgcatggctaaaatctggggttgcctgctgtattttttcgaaacaaggccatcttattgtgtatcttatacttggtgtctatttgggctagttgtagagatattttagtgtccagatatcttcccgagtccatcgttggtctacgacacacatttttgtcacaataaagtttgaggtttcagttcctgggccatttttaaagatattttagggggtgtttggtttacgtatcattccatccaaaatgagatggtgcatcataaatctat

SEQ ID NO: 5770 - DNA, 2776 bp, Zea Mays
atcgattcaccctccccggctccccgcccctcccggttttcttcctcccggaccccgccccggcggccgccgattttggggaagcccggccgtttcgcctcccgaaaacccggcagcgttcgtgctcttgcctgatggagagggacgcggttctggaggacgcggcggcgggggatggggaggagcaggaccaggaccaggaagaggtggtggtgccgatcggagcgcagaagcacgatccggcgtggaagcactgcgtcatggtgcgctccgacggccggatgcgcctcaagtgcgcctactgcggcaagcactttctcggcggtggtatccaccgcttcaaggagcacctggcccgccgccccgggaacgcctgctgctgccccagtgtgccccgcgacgtccaggacaccatgctccgcagcctcgccgccgtcgctgccaagaagatgcagcgcaagctcgccgccgccagcacgacgcccgcctctgtctctacggctagcgggggtaccggcagccccatccacatgatctcgctcaacgaggtgctcgacttcgaggccgtgccgctcgaggagcagaggcctccggttccggagggcagcattagggggagtaccagcggtaagaagaagaggaagcaggtgacctacgcccctgctccgccacttataccccagatccggccgcagcatgttcggtctacccctcagaacaatcttcttcacgggctgcagcatgttccgcctactcctcagaccaaccctcttcatcaggttgtcatggcagtgaacgcagtgacaccagcagagcatttcgaacatgctgccccctcggagaaggagcatgtttccgtggcagttgggaggttcttgtatgacgccggtgtgccattggaagcggtgaactcggtctacttccaaccgatgctcgaggccattgcggcggcaggggggaggcctgagacgctctcgtaccatgactttcgcggtcacattcttaagaggtcactcgacgacgtgacggctcgcttggagttcttcagggggtcatggaccaggacgggctgctcggtgttggctgacgagtggatcactgataaaggcagaaccttgataaacttctccgtgtattgcccggaaggtactatgttcctcaagtcggtggatgcaaccagcatcgtcacatcttcagatgcactgtacgagctactaaaaagtgcagtcgaggaaattggcgagaaaaaagttgtccaggttatcacaaacaattctgaggtccatgcagctgccggaaaaaagctaggtgaaacattccccacattgttctggtctccatgcactttccagtgtgttgatggcatgctcgaagatttcagtaaggtggaggcaattagtgagataataagtaatgcaaaggccattacgggatttgtctacaacagcgcatatgcgttgaatctgatgaagaagtatctgcaagggaaggatctgctggttcctgcggagactcgtgcggctatgaactttgtgacgttgaagaatatgtacggtttgagggaggctttgcaagctatggtcaactcggatgaatggatagacttgttgccaaagaaaggagggattgaagcaagcaatcttgttaataatttgcagttttggaactcctgtgctgccgtcgttcacatcactgagcaacttgtgcaccttcttaagctagtcggtaaccccaagaggccttctatgggttatgtatatgctggactgtacaaggcaaaagcagcaatcaaaaaagagctggtgagtaagaacgattacatggtttactggaatattatcgactggaggaatgctagactgcatagaaaggctggtacctgatgtgaaaatccaagataaagtacagcgagagctccacatataccggagtgaaacagcagtggattttcgtaggcagatggctgtccgatctagacgaactttacctcctgctgaatggtggtatacatatggaggagcttgcccaaatttaacacgtctagcggtccgtattctcagtcaaacctgcagcgcaagaggatgtgaccggacgaacattcattttgaacaagttcatgatgaaagaatgaatagttttgagcgtcagcgaatgcatgacctcacctttgtacaatacaacctacggcttcagcaaagacaacaacacaaggcgaaagcgtttgatcctctctctgtggactacatagacgtagtcgatgattgggctgtggatagacctgcaatgttctctggcccagctgagcagccaaactggatggagattaatcaatcaggcaaccgaatgacatcaagggaaccaactgaagatgaattcgaatccttcattgaaggagttgatgacgaaatgatccaaggtgctgcacagggcttccatgaagatggtgatgatcctgcttgtggctgaggctatatagattgacagccagttaacctgtaagctaatgttgcatggctaaaatctggggttgcctgctgtattttttcgaaacaaggccatcttattgtgtatcttatacttggtgtctatttgggctagttgtagagatattttagtgtccagatatcttcccgagtccatcgttggtctacgacacacatttttgtcacaataaagtttgaggtttcagttcctgggccatttttaaagatattttagggggtgtttggtttacgtatcattccatccaaaatgagatggtgcatcataaatctat

SEQ ID NO: 5771 - DNA, 2801 bp, Zea Mays
ctccccgcccctcccggttttcttcctcccggaccccgccccggcggccgccgattttggggaagcccggccgtttcgcctcccgaaaacccggtaggacacgcgaatccaattgtgccgttcctgacgctgacgcccggcggtgatggctgatgcagcagcgttcgtgctcttgcctgatggagagggacgcggttctggaggacgcggcggcgggggatggggaggagcaggaccaggaccaggaagaggtggtggtgccgatcggagcgcagaagcacgatccggcgtggaagcactgcgtcatggtgcgctccgacggccggatgcgcctcaagtgcgcctactgcggcaagcactttctcggcggtggtatccaccgcttcaaggagcacctggcccgccgccccgggaacgcctgctgctgccccagtgtgccccgcgacgtccaggacaccatgctccgcagcctcgccgccgtcgctgccaagaagatgcagcgcaagctcgccgccgccagcacgacgcccgcctctgtctctacggctagcgggggtaccggcagccccatccacatgatctcgctcaacgaggtgctcgacttcgaggccgtgccgctcgaggagcagaggcctccggttccggagggcagcattagggggagtaccagcggtaagaagaagaggaagcaggtgacctacgcccctgctccgccacttataccccagatccggccgcagcatgttcggtctacccctcagaacaatcttcttcacgggctgcagcatgttccgcctactcctcagaccaaccctcttcatcaggttgtcatggcagtgaacgcagtgacaccagcagagcatttcgaacatgctgccccctcggagaaggagcatgtttccgtggcagttgggaggttcttgtatgacgccggtgtgccattggaagcggtgaactcggtctacttccaaccgatgctcgaggccattgcggcggcaggggggaggcctgagacgctctcgtaccatgactttcgcggtcacattcttaagaggtcactcgacgacgtgacggctcgcttggagttcttcagggggtcatggaccaggacgggctgctcggtgttggctgacgagtggatcactgataaaggcagaaccttgataaacttctccgtgtattgcccggaaggtactatgttcctcaagtcggtggatgcaaccagcatcgtcacatcttcagatgcactgtacgagctactaaaaagtgcagtcgaggaaattggcgagaaaaaagttgtccaggttatcacaaacaattctgaggtccatgcagctgccggaaaaaagctaggtgaaacattccccacattgttctggtctccatgcactttccagtgtgttgatggcatgctcgaagatttcagtaaggtggaggcaattagtgagataataagtaatgcaaaggccattacgggatttgtctacaacagcgcatatgcgttgaatctgatgaagaagtatctgcaagggaaggatctgctggttcctgcggagactcgtgcggctatgaactttgtgacgttgaagaatatgtacggtttgagggaggctttgcaagctatggtcaactcggatgaatggatagacttgttgccaaagaaaggagggattgaagcaagcaatcttgttaataatttgcagttttggaactcctgtgctgccgtcgttcacatcactgagcaacttgtgcaccttcttaagctagtcggtaaccccaagaggccttctatgggttatgtatatgctggactgtacaaggcaaaagcagcaatcaaaaaagagctggtgacatatcaaatggaatattctcaggaatgctagactgcatagaaaggctggtacctgatgtgaaaatccaagataaagtacagcgagagctccacatataccggagtgaaacagcagtggattttcgtaggcagatggctgtccgatctagacgaactttacctcctgctgaatggtggtatacatatggaggagcttgcccaaatttaacacgtctagcggtccgtattctcagtcaaacctgcagcgcaagaggatgtgaccggacgaacattcattttgaacaagttcatgatgaaagaatgaatagttttgagcgtcagcgaatgcatgacctcacctttgtacaatacaacctacggcttcagcaaagacaacaacacaaggcgaaagcgtttgatcctctctctgtggactacatagacgtagtcgatgattgggctgtggatagacctgcaatgttctctggcccagctgagcagccaaactggatggagattaatcaatcaggcaaccgaatgacatcaagggaaccaactgaagatgaattcgaatccttcattgaaggagttgatgacgaaatgatccaaggtgctgcacagggcttccatgaagatggtgatgatcctgcttgtggctgaggctatatagattgacagccagttaacctgtaagctaatgttgcatggctaaaatctggggttgcctgctgtattttttcgaaacaaggccatcttattgtgtatcttatacttggtgtctatttgggctagttgtagagatattttagtgtccagatatcttcccgagtccatcgttggtctacgacacacatttttgtcacaataaagtttgaggtttcagttcctgggccatttttaaagatattttagggggtgtttggtttacgtatcattccatccaaaatgagatggtgcatcataaatctat

SEQ ID NO: 5772 - DNA, 2774 bp, Zea Mays
ctccccgcccctcccggttttcttcctcccggaccccgccccggcggccgccgattttggggaagcccggccgtttcgcctcccgaaaacccggtaggacacgcgaatccaattgtgccgttcctgacgctgacgcccggcggtgatggctgatgcagcagcgttcgtgctcttgcctgatggagagggacgcggttctggaggacgcggcggcgggggatggggaggagcaggaccaggaccaggaagaggtggtggtgccgatcggagcgcagaagcacgatccggcgtggaagcactgcgtcatggtgcgctccgacggccggatgcgcctcaagtgcgcctactgcggcaagcactttctcggcggtggtatccaccgcttcaaggagcacctggcccgccgccccgggaacgcctgctgctgccccagtgtgccccgcgacgtccaggacaccatgctccgcagcctcgccgccgtcgctgccaagaagatgcagcgcaagctcgccgccgccagcacgacgcccgcctctgtctctacggctagcgggggtaccggcagccccatccacatgatctcgctcaacgaggtgctcgacttcgaggccgtgccgctcgaggagcagaggcctccggttccggagggcagcattagggggagtaccagcggtaagaagaagaggaagcaggtgacctacgcccctgctccgccacttataccccagatccggccgcagcatgttcggtctacccctcagaacaatcttcttcacgggctgcagcatgttccgcctactcctcagaccaaccctcttcatcaggttgtcatggcagtgaacgcagtgacaccagcagagcatttcgaacatgctgccccctcggagaaggagcatgtttccgtggcagttgggaggttcttgtatgacgccggtgtgccattggaagcggtgaactcggtctacttccaaccgatgctcgaggccattgcggcggcaggggggaggcctgagacgctctcgtaccatgactttcgcggtcacattcttaagaggtcactcgacgacgtgacggctcgcttggagttcttcagggggtcatggaccaggacgggctgctcggtgttggctgacgagtggatcactgataaaggcagaaccttgataaacttctccgtgtattgcccggaaggtactatgttcctcaagtcggtggatgcaaccagcatcgtcacatcttcagatgcactgtacgagctactaaaaagtgcagtcgaggaaattggcgagaaaaaagttgtccaggttatcacaaacaattctgaggtccatgcagctgccggaaaaaagctaggtgaaacattccccacattgttctggtctccatgcactttccagtgtgttgatggcatgctcgaagatttcagtaaggtggaggcaattagtgagataataagtaatgcaaaggccattacgggatttgtctacaacagcgcatatgcgttgaatctgatgaagaagtatctgcaagggaaggatctgctggttcctgcggagactcgtgcggctatgaactttgtgacgttgaagaatatgtacggtttgagggaggctttgcaagctatggtcaactcggatgaatggatagacttgttgccaaagaaaggagggattgaagcaagcaatcttgttaataatttgcagttttggaactcctgtgctgccgtcgttcacatcactgagcaacttgtgcaccttcttaagctagtcggtaaccccaagaggccttctatgggttatgtatatgctggactgtacaaggcaaaagcagcaatcaaaaaagagctggaatgctagactgcatagaaaggctggtacctgatgtgaaaatccaagataaagtacagcgagagctccacatataccggagtgaaacagcagtggattttcgtaggcagatggctgtccgatctagacgaactttacctcctgctgaatggtggtatacatatggaggagcttgcccaaatttaacacgtctagcggtccgtattctcagtcaaacctgcagcgcaagaggatgtgaccggacgaacattcattttgaacaagttcatgatgaaagaatgaatagttttgagcgtcagcgaatgcatgacctcacctttgtacaatacaacctacggcttcagcaaagacaacaacacaaggcgaaagcgtttgatcctctctctgtggactacatagacgtagtcgatgattgggctgtggatagacctgcaatgttctctggcccagctgagcagccaaactggatggagattaatcaatcaggcaaccgaatgacatcaagggaaccaactgaagatgaattcgaatccttcattgaaggagttgatgacgaaatgatccaaggtgctgcacagggcttccatgaagatggtgatgatcctgcttgtggctgaggctatatagattgacagccagttaacctgtaagctaatgttgcatggctaaaatctggggttgcctgctgtattttttcgaaacaaggccatcttattgtgtatcttatacttggtgtctatttgggctagttgtagagatattttagtgtccagatatcttcccgagtccatcgttggtctacgacacacatttttgtcacaataaagtttgaggtttcagttcctgggccatttttaaagatattttagggggtgtttggtttacgtatcattccatccaaaatgagatggtgcatcataaatctat

SEQ ID NO: 5773 - DNA, 2858 bp, Zea Mays
ctccccgcccctcccggttttcttcctcccggaccccgccccggcggccgccgattttggggaagcccggccgtttcgcctcccgaaaacccggcgttcgtgctcttgcctgatggagagggacgcggttctggaggacgcggcggcgggggatggggaggagcaggaccaggaccaggaagaggtggtggtgccgatcggagcgcagaagcacgatccggcgtggaagcactgcgtcatggtgcgctccgacggccggatgcgcctcaagtgcgcctactgcggcaagcactttctcggcggtggtatccaccgcttcaaggagcacctggcccgccgccccgggaacgcctgctgctgccccagtgtgccccgcgacgtccaggacaccatgctccgcagcctcgccgccgtcgctgccaagaagatgcagcgcaagctcgccgccgccagcacgacgcccgcctctgtctctacggctagcgggggtaccggcagccccatccacatgatctcgctcaacgaggtgctcgacttcgaggccgtgccgctcgaggagcagaggcctccggttccggagggcagcattagggggagtaccagcggtaagaagaagaggaagcaggtgacctacgcccctgctccgccacttataccccagatccggccgcagcatgttcggtctacccctcagaacaatcttcttcacgggctgcagcatgttccgcctactcctcagaccaaccctcttcatcaggttgtcatggcagtgaacgcagtgacaccagcagagcatttcgaacatgctgccccctcggagaaggagcatgtttccgtggcagttgggaggttcttgtatgacgccggtgtgccattggaagcggtgaactcggtctacttccaaccgatgctcgaggccattgcggcggcaggggggaggcctgagacgctctcgtaccatgactttcgcggtcacattcttaagaggtcactcgacgacgtgacggctcgcttggagttcttcagggggtcatggaccaggacgggctgctcggtgttggctgacgagtggatcactgataaaggcagaaccttgataaacttctccgtgtattgcccggaaggtactatgttcctcaagtcggtggatgcaaccagcatcgtcacatcttcagatgcactgtacgagctactaaaaagtgcagtcgaggaaattggcgagaaaaaagttgtccaggttatcacaaacaattctgaggtccatgcagctgccggaaaaaagctaggtgaaacattccccacattgttctggtctccatgcactttccagtgtgttgatggcatgctcgaagatttcagtaaggtggaggcaattagtgagataataagtaatgcaaaggccattacgggatttgtctacaacagcgcatatgcgttgaatctgatgaagaagtatctgcaagggaaggatctgctggttcctgcggagactcgtgcggctatgaactttgtgacgttgaagaatatgtacggtttgagggaggctttgcaagctatggtcaactcggatgaatggatagacttgttgccaaagaaaggagggattgaagcaagcaatcttgttaataatttgcagttttggaactcctgtgctgccgtcgttcacatcactgagcaacttgtgcaccttcttaagctagtcggtaaccccaagaggccttctatgggttatgtatatgctggactgtacaaggcaaaagcagcaatcaaaaaagagctggtgagtaagaacgattacatggtttactggaatattatcgactggaggtgggacaaccagacaccacagccacttcattcagctggtttcttcctgaaccctctattttttgatggaattcgaggtgacatatcaaatggaatattctcaggaatgctagactgcatagaaaggctggtacctgatgtgaaaatccaagataaagtacagcgagagctccacatataccggagtgaaacagcagtggattttcgtaggcagatggctgtccgatctagacgaactttacctcctgctgaatggtggtatacatatggaggagcttgcccaaatttaacacgtctagcggtccgtattctcagtcaaacctgcagcgcaagaggatgtgaccggacgaacattcattttgaacaagttcatgatgaaagaatgaatagttttgagcgtcagcgaatgcatgacctcacctttgtacaatacaacctacggcttcagcaaagacaacaacacaaggcgaaagcgtttgatcctctctctgtggactacatagacgtagtcgatgattgggctgtggatagacctgcaatgttctctggcccagctgagcagccaaactggatggagattaatcaatcaggcaaccgaatgacatcaagggaaccaactgaagatgaattcgaatccttcattgaaggagttgatgacgaaatgatccaaggtgctgcacagggcttccatgaagatggtgatgatcctgcttgtggctgaggctatatagattgacagccagttaacctgtaagctaatgttgcatggctaaaatctggggttgcctgctgtattttttcgaaacaaggccatcttattgtgtatcttatacttggtgtctatttgggctagttgtagagatattttagtgtccagatatcttcccgagtccatcgttggtctacgacacacatttttgtcacaataaagtttgaggtttcagttcctgggccatttttaaagatattttagggggtgtttggtttacgtatcattccatccaaaatgagatggtgcatcataaatctat

SEQ ID NO: 5774 - DNA, 2636 bp, Zea Mays
ctccccgcccctcccggttttcttcctcccggaccccgccccggcggccgccgattttggggaagcccggccgtttcgcctcccgaaaacccggtaggacacgcgaatccaattgtgccgttcctgacgctgacgcccggcggtgatggctgatgcagcagcgttcgtgctcttgcctgatggagagggacgcggttctggaggacgcggcggcgggggatggggaggagcaggaccaggaccaggaagaggtggtggtgccgatcggagcgcagaagcacgatccggcgtggaagcactgcgtcatggtgcgctccgacggccggatgcgcctcaagtgcgcctactgcggcaagcactttctcggcggtggtatccaccgcttcaaggagcacctggcccgccgccccgggaacgcctgctgctgccccagtgtgccccgcgacgtccaggacaccatgctccgcagcctcgccgccgtcgctgccaagaagatgcagcgcaagctcgccgccgccagcacgacgcccgcctctgtctctacggctagcgggggtaccggcagccccatccacatgatctcgctcaacgaggtgctcgacttcgaggccgtgccgctcgaggagcagaggcctccggttccggagggcagcattagggggagtaccagcggtaagaagaagaggaagcaggtgacctacgcccctgctccgccacttataccccagatccggccgcagcatgttcggtctacccctcagaacaatcttcttcacgggctgcagcatgttccgcctactcctcagaccaaccctcttcatcaggttgtcatggcagtgaacgcagtgacaccagcagagcatttcgaacatgctgccccctcggagaaggagcatgtttccgtggcagttgggaggttcttgtatgacgccggtgtgccattggaagcggtgaactcggtctacttccaaccgatgctcgaggccattgcggcggcaggggggaggcctgagacgctctcgtaccatgactttcgcggtcacattcttaagaggtcactcgacgacgtgacggctcgcttggagttcttcagggggtcatggaccaggacgggctgctcggtgttggctgacgagtggatcactgataaaggcagaaccttgataaacttctccgtgtattgcccggaaggtactatgttcctcaagtcggtggatgcaaccagcatcgtcacatcttcagatgcactgtacgagctactaaaaagtgcagtcgaggaaattggcgagaaaaaagttgtccaggttatcacaaacaattctgaggtccatgcagctgccggaaaaaagctaggtgaaacattccccacattgttctggtctccatgcactttccagtgtgttgatggcatgctcgaagatttcagtaaggtggaggcaattagtgagataataagtaatgcaaaggccattacgggatttgtctacaacagcgcatatgcgttgaatctgatgaagaagtatctgcaagggaaggatctgctggttcctgcggagactcgtgcggctatgaactttgtgacgttgaagaatatgtacggtttgagggaggctttgcaagctatggtcaactcggatgaatggatagacttgttgccaaagaaaggagggattgaagcaagcaatcttgttaataatttgcagttttggaactcctgtgctgccgtcgttcacatcactgagcaacttgtgcaccttcttaagctagtcggtaaccccaagaggccttctatgggttatgtatatgctggactgtacaaggcaaaagcagcaatcaaaaaagagctggaatgctagactgcatagaaaggctggtacctgatgtgaaaatccaagataaagtacagcgagagctccacatataccggagtgaaacagcagtggattttcgtaggcagatggctgtccgatctagacgaactttacctcctgccttctttcagaaattggaaacttgtaagcctattgcatcctttgatcgcggtaatcataaggtgagacaacaacacaaggcgaaagcgtttgatcctctctctgtggactacatagacgtagtcgatgattgggctgtggatagacctgcaatgttctctggcccagctgagcagccaaactggatggagattaatcaatcaggcaaccgaatgacatcaagggaaccaactgaagatgaattcgaatccttcattgaaggagttgatgacgaaatgatccaaggtgctgcacagggcttccatgaagatggtgatgatcctgcttgtggctgaggctatatagattgacagccagttaacctgtaagctaatgttgcatggctaaaatctggggttgcctgctgtattttttcgaaacaaggccatcttattgtgtatcttatacttggtgtctatttgggctagttgtagagatattttagtgtccagatatcttcccgagtccatcgttggtctacgacacacatttttgtcacaataaagtttgaggtttcagttcctgggccatttttaaagatattttagggggtgtttggtttacgtatcattccatccaaaatgagatggtgcatcataaatctat

SEQ ID NO: 5775 - DNA, 2758 bp, Zea Mays
ctccccgcccctcccggttttcttcctcccggaccccgccccggcggccgccgattttggggaagcccggccgtttcgcctcccgaaaacccggtaggacacgcgaatccaattgtgccgttcctgacgctgacgcccggcggtgatggctgatgcagcagcgttcgtgctcttgcctgatggagagggacgcggttctggaggacgcggcggcgggggatggggaggagcaggaccaggaccaggaagaggtggtggtgccgatcggagcgcagaagcacgatccggcgtggaagcactgcgtcatggtgcgctccgacggccggatgcgcctcaagtgcgcctactgcggcaagcactttctcggcggtggtatccaccgcttcaaggagcacctggcccgccgccccgggaacgcctgctgctgccccagtgtgccccgcgacgtccaggacaccatgctccgcagcctcgccgccgtcgctgccaagaagatgcagcgcaagctcgccgccgccagcacgacgcccgcctctgtctctacggctagcgggggtaccggcagccccatccacatgatctcgctcaacgaggtgctcgacttcgaggccgtgccgctcgaggagcagaggcctccggttccggagggcagcattagggggagtaccagcggtaagaagaagaggaagcaggtgacctacgcccctgctccgccacttataccccagatccggccgcagcatgttcggtctacccctcagaacaatcttcttcacgggctgcagcatgttccgcctactcctcagaccaaccctcttcatcaggttgtcatggcagtgaacgcagtgacaccagcagagcatttcgaacatgctgccccctcggagaaggagcatgtttccgtggcagttgggaggttcttgtatgacgccggtgtgccattggaagcggtgaactcggtctacttccaaccgatgctcgaggccattgcggcggcaggggggaggcctgagacgctctcgtaccatgactttcgcggtcacattcttaagaggtcactcgacgacgtgacggctcgcttggagttcttcagggggtcatggaccaggacgggctgctcggtgttggctgacgagtggatcactgataaaggcagaaccttgataaacttctccgtgtattgcccggaaggtactatgttcctcaagtcggtggatgcaaccagcatcgtcacatcttcagatgcactgtacgagctactaaaaagtgcagtcgaggaaattggcgagaaaaaagttgtccaggttatcacaaacaattctgaggtccatgcagctgccggaaaaaagctaggtgaaacattccccacattgttctggtctccatgcactttccagtgtgttgatggcatgctcgaagatttcagtaaggtggaggcaattagtgagataataagtaatgcaaaggccattacgggatttgtctacaacagcgcatatgcgttgaatctgatgaagaagtatctgcaagggaaggatctgctggttcctgcggagactcgtgcggctatgaactttgtgacgttgaagaatatgtacggtttgagggaggctttgcaagctatggtcaactcggatgaatggatagacttgttgccaaagaaaggagggattgaagcaagcaatcttgttaataatttgcagttttggaactcctgtgctgccgtcgttcacatcactgagcaacttgtgcaccttcttaagctagtcggtaaccccaagaggccttctatgggttatgtatatgctggactgtacaaggcaaaagcagcaatcaaaaaagagctggaatgctagactgcatagaaaggctggtacctgatgtgaaaatccaagataaagtacagcgagagctccacatataccggagtgaaacagcagtggattttcgtaggcagatggctgtccgatctagacgaactttacctcctgaaattggaaacttgtaagcctattgcatcctttgatcgcggtaatcataagtcaaacctgcagcgcaagaggatgtgaccggacgaacattcattttgaacaagttcatgatgaaagaatgaatagttttgagcgtcagcgaatgcatgacctcacctttgtacaatacaacctacggcttcagcaaagacaacaacacaaggcgaaagcgtttgatcctctctctgtggactacatagacgtagtcgatgattgggctgtggatagacctgcaatgttctctggcccagctgagcagccaaactggatggagattaatcaatcaggcaaccgaatgacatcaagggaaccaactgaagatgaattcgaatccttcattgaaggagttgatgacgaaatgatccaaggtgctgcacagggcttccatgaagatggtgatgatcctgcttgtggctgaggctatatagattgacagccagttaacctgtaagctaatgttgcatggctaaaatctggggttgcctgctgtattttttcgaaacaaggccatcttattgtgtatcttatacttggtgtctatttgggctagttgtagagatattttagtgtccagatatcttcccgagtccatcgttggtctacgacacacatttttgtcacaataaagtttgaggtttcagttcctgggccatttttaaagatattttagggggtgtttggtttacgtatcattccatccaaaatgagatggtgcatcataaatctat

SEQ ID NO: 5776 - DNA, 877 bp, Zea Mays
ctccccgcccctcccggttttcttcctcccggaccccgccccggcggccgccgattttggggaagcccggccgtttcgcctcccgaaaacccggctgaatggtggtatacatatggaggagcttgcccaaatttaacacgtctagcggtccgtattctcagtcaaacctgcagcgcaagaggatgtgaccggacgaacattcattttgaacaagttcatgatgaaagaatgaatagttttgagcgtcagcgaatgcatgacctcacctttgtacaatacaacctacggcttcagcaaagacaacaacacaaggcgaaagcgtttgatcctctctctgtggactacatagacgtagtcgatgattgggctgtggatagacctgcaatgttctctggcccagctgagcagccaaactggatggagattaatcaatcaggcaaccgaatgacatcaagggaaccaactgaagatgaattcgaatccttcattgaaggagttgatgacgaaatgatccaaggtgctgcacagggcttccatgaagatggtgatgatcctgcttgtggctgaggctatatagattgacagccagttaacctgtaagctaatgttgcatggctaaaatctggggttgcctgctgtattttttcgaaacaaggccatcttattgtgtatcttatacttggtgtctatttgggctagttgtagagatattttagtgtccagatatcttcccgagtccatcgttggtctacgacacacatttttgtcacaataaagtttgaggtttcagttcctgggccatttttaaagatattttagggggtgtttggtttacgtatcattccatccaaaatgagatggtgcatcataaatctat

SEQ ID NO: 5777 - DNA, 2030 bp, Zea Mays
ggatcacgtggatatggcaggacgacgacgacgggagaggggaggagggagaaggagcaacaagagcgaacgcaaaagtacagtacagctcctgagatggcggcgccggcgccgaagcaggaggagctgcagccgcacgccgtcagggaccagctgccctccgtctcctactgcctcaccagcccgcccccatggccggaggccgtcctcctcggcttccagcactacctcgtcatgctcggcaccaccgtcatcatccccaccgcgctcgtcccccagatgggcggcggcaatgaggagaaggcgcgggtggtgcagacgctgctgttcgtggccgggatcaacacgctgatccagagcttcctcggcacgcgcctccccgccgtcatgggtggctcctacaccttcgtcgcgcccaccatctccatcatcctcgccggccgctacagcggcattgccgatccccacgagaaattcgtgcgcatcatgcggggcacgcaaggcgcgctcattgtggcctccaccctccaaatcatcattggcttcagtggcctttggcgcattgtcgtcaggctgctgagcccgctgtctgctgctcccttggtcgccctcgtcggattcggcctctatgaactggggtttccaagtgttgccaaatgtgtagagatcggtcttccacagattttactgctggttgcactttctcagtacgtaccacatttggtccccttgctgagtactgcctttgagcggtttgctgtcataatgtccgtcgtcctcatctggctttacgccttcttcctgacggtcggcggtgcctataagaatgctgctcccaagacccaattccactgccgcactgatcgatctgggcttgttgggggcgctccatggataagtgtaccctatccgtttcagtggggagctccaacctttgatgctggtgaagcctttgctatgatggcagcttcttttgttgctcttgtggagtccaccggtgcatttatcgctgtttcacggtatgccagcgcaacaccatgccctccttccgtcatgagccgtggcatcgggtggcagggagttggcattttgctgggtggattatttggaactgccaatggaaccactgtatctgtcgaaaatgctgggctgctcgctttgacacgcgttggtagtagacgtgttgtgcagatttctgctggatttatgatattcttctcaatccttggtaaattcggggctgttttcgcatcaattcccggcccagttatcgcagctgtatactgtcttctcttcgcatatgttggtatggcaggtgttgggttcctacagttctgcaacctgaacagcttccgaacaaagttcatcctgggattctccttgtttatgggtctgtcggtgccacagtatttcaacgaatacacttccgtcgcgggctttggtccagtgcacacgcgtgcaagatgggcgcttgttggcggggcggtggcgtattttctggacaacaccctgcacaggcgcgatggcgtcgcgaggaaggaccggggccaccatttctgggacaggttcaggtccttcaagaccgacccgcgcagcgaggagttctactccctcccgttcaacctcaacaaattcttcccgtccttctgatccttgctggtgctggtaactgagagcagaaaaaatggctttggactgtgattttgttggcaatgccacgccgcccaagagggctgtttctcctacttctgttgtggtgagctttgaatcttgcagagctcagcgtaaactatttcgaaaggagtggagaaattgcttggtattgctggatgtaaattgggtcgggaaccgggatagattgataaaatgaaaacagaactgcgccagtactctttctgtagattataaactattgagctccagtgctattttagagtaaactaatgctggttgatgtgcaatcattgcatactctgcagtgagatactgacactgagcactgttgttttgttaatttcctgaattcgcag

SEQ ID NO: 5778 - DNA, 1290 bp, Zea Mays
aaacgacagccagagccaccacctatgagaggctgaaagcaacggtgccgccggagatggagacgaaaaaggaggcggcagcggcgaggcaggcgaaggagtccctggagctggcgttccagatgtcccagatcctcgaaaccggcctcgaccgccacaccctgtcgctgctcatggcgctctgcgaccgcggcgccaaccccgaggccctggccgccctcgtccgcgaactctcctccactgctcccccaaccgccgccgaggctccctcccccgtgagcaacgccgccgcggggccggccccggcaacagcgtccatgttctcctccggccttcgccgtccctagggtttgtgatgtcccttttttcgccggtgagactgcttgccagttagtcgactagatcccgcagtatgcactcagccgctgtgagtgcctgaatgtagtatgttcttatgttttgactaaatttgtgcctcacaagaagataatggttcaaccaaatgccatatatcacgttactgcgtagatgtgctgctacctgcatttggcatcaagattcacattataatgtctatgtttgggttataatattaatttgcagccaggtgtttctacaaatagtcaatctaggcatgggcatatgaactgtgggttggttattctttctatgcaacatcaacggttgtggaactttctatctcttgttctctctggctctgccacccttttagctacaccttgtcgggtagtggtattgccatgatatagatttgttgcagttgctagtagattaatgggatgcttgttgcttggttgacgaatgggttagtacatcatatttccactcctaacttttttgtttgatttgtggaatggaatggattgatccaccaccacatcattccttataagctattagtataaccgcatgccactaaaattcatgggatgaacacatgatggaccacctcgcctgtgtccggtgtccccctccccccgactttagtgtccataggattttgtggcatccctttcttccccagtgagattgcttatcatcagccaaagtgtcaaactagatcccacaatatgcatttagctgctgtgaatgactgaatgtagtgtttccttctgttgattaattttgcatcttggcttatgattcacacttcacaagcagataatacatggacttgtgtagtcctagatgagttgggtcagacacaatgtgcataggttacatgactgcaaacatgtgacgcgtcctgcatttggcatcaagattcag

SEQ ID NO: 5779 - DNA, 2042 bp, Zea Mays
caaacaggctgcagacagcaggggtgcccaaaagcagggaaggaagagcggaaaagtccaccagtccaccaccaccttcctcggatccacaacccggacgcccgagtgcagagtgctccacccgggtcctttcttcctccttccccagtcccagtcccagtatcagtaccagtccaagccccactccccaccccgaacctcgcaagtattttagtcttactccattcgagccctaccactaccagtggcaggcgagcgagaggcggtggaggaggagcggacggaaccgtcgcctgctgcgtctgcctgcgagatctaggcgagcgcggccatgggtgctcgctgctccaagctctccgtctgctggtggcctccccacttcaaatcgccaatgctcgagaatggcgccgccggagatgatggcagcggcgtgccggtgttcgccgagtacagcttcgacgacctccgggtggccaccgacggcttcgcccccgatcgcatcgtgtcggagcacggggagaaggcacccaacgtggtctaccgtggcacgctcttcagctccggccgcaccgtcgctattaagcgcttcggccgctccgcctggccggactcacgccagttcctggaggaggcgagggctgttgggcagctgcgtagtggcaggctggccaatctgatcggttgctgctgcgagagcggcgagcgtctcctcgtcgcagagttcatgccgcacgagaccttggcaaagcatctcttccactgggagacaaatccattgagttgggcaatgaggatgagggctgcgctttatgtggcacaagcgttggactactgcagtagcaaagggagggcactctatcatgacctgcatgcatacagggttgtctttgatgtggatggtaacccaagattatcatgttttggtctgatgaagaacagccgagatggaaagagctacagtactaatttggccttcacgcctcctgaatatcttaagacagagtaagtcctgagagtgtggtttacagttttggcactgtcttgcttgatctcctgagtggaaagcacattccaccaagtcatgcactcgaccttataagaggaaagaactttctagtgctgatggattcttgcttagaaggtcatgtatccaactcggacggaacagacttgatgcgattagcatcccgttgcctgcaatatgaagcacgtgaccgtccaaatctgaaaactgtggtatctggtctcacaagtctccagaaagatgcttatactccttcgcacactttgcttgggattcaacatgataagaacaactcaggtcaagtttccttatctgctattgggaaagcttttgccagagcagacctgaatgaagtgcatgaaatattgctgcatgatggatataatgaggacgacgaggctaatgctgagttcctcgactcaggtgcagtggtggctccaaccatgctgggacggagatgcttcgcacatgtggtggccggcaacccacaggaaggcctcgaggatgcaaagagagccgagattattgcatcggactggccgatgggacactacctgcaggccctggcacttcataagctgggtagggaggctgaaagccaagaagcactgaagaatggcactgccttggaagctgcaaggaatagtagagctagaactgtatagccctgaatttgtgataccatgcccttcctgcttgtacctagatcgcctgcatttcgggtgcctacctccaatccaatgctttgccaccagtagggttgtttttggtattccctaacttgtatcgttatttcccgtggttttacaagtcgaagaactcctaggtcagctgttattacacctccaatatatccatgaatacaggaatgggcaactagtctgctatagcattctgttgatgcgagtttgtaaagtgacaggatttcgatttatttcaacaaacccatgtatatacaaacttttgaactctgcaacttaagatatttgaggccaggcaaccttcaactgttgttaac

SEQ ID NO: 5780 - DNA, 2124 bp, Zea Mays
caaacaggctgcagacagcaggggtgcccaaaagcagggaaggaagagcggaaaagtccaccagtccaccaccaccttcctcggatccacaacccggacgcccgagtgcagagtgctccacccgggtcctttcttcctccttccccagtcccagtcccagtatcagtaccagtccaagccccactccccaccccgaacctcgcaagtattttagtcttactccattcgagccctaccactaccagtggcaggcgagcgagaggcggtggaggaggagcggacggaaccgtcgcctgctgcgtctgcctgcgagatctaggcgagcgcggccatgggtgctcgctgctccaagctctccgtctgctggtggcctccccacttcaaatcgccaatgctcgagaatggcgccgccggagatgatggcagcggcgtgccggtgttcgccgagtacagcttcgacgacctccgggtggccaccgacggcttcgcccccgatcgcatcgtgtcggagcacggggagaaggcacccaacgtggtctaccgtggcacgctcttcagctccggccgcaccgtcgctattaagcgcttcggccgctccgcctggccggactcacgccagttcctggaggaggcgagggctgttgggcagctgcgtagtggcaggctggccaatctgatcggttgctgctgcgagagcggcgagcgtctcctcgtcgcagagttcatgccgcacgagaccttggcaaagcatctcttccactgggagacaaatccattgagttgggcaatgaggatgagggctgcgctttatgtggcacaagcgttggactactgcagtagcaaagggagggcactctatcatgacctgcatgcatacagggttgtctttgatgtggatggtaacccaagattatcatgttttggtctgatgaagaacagccgagatggaaagagctacagtactaatttggccttcacgcctcctgaatatcttaagacaggcagagtaagtcctgagagtgtggtttacagttttggcactgtcttgcttgatctcctgagtggaaagcacattccaccaagtcatgcactcgaccttataagaggaaagaactttctagtgctgatggattcttgcttagaaggtcatgtatccaactcggacggaacagacttgatgcgattagcatcccgttgcctgcaatatgaagcacgtgaccgtccaaatctgaaaactgtgactccttcgcacactttgcttgggattcaacatgataagaacaactcaggtcaagtttccttatctgctattgggaaagcttttgccagagcagacctgaatgaagtgcatgaaatattgctgcatgatggatataatgaggacgacgaggctaatgctgagctatctctccagtcatggaatggtgatatatctgagagctttgttgttaagaggcgtgcagacaatgcctttaggtctaaggaatacacgactgcaatcgagtgttactcaaggttcctcgactcaggtgcagtggtggctccaaccatgctgggacggagatgcttcgcacatgtggtggccggcaacccacaggaaggcctcgaggatgcaaagagagccgagattattgcatcggactggccgatgggacactacctgcaggccctggcacttcataagctgggtagggaggctgaaagccaagaagcactgaagaatggcactgccttggaagctgcaaggaatagtagagctagaactgtatagccctgaatttgtgataccatgcccttcctgcttgtacctagatcgcctgcatttcgggtgcctacctccaatccaatgctttgccaccagtagggttgtttttggtattccctaacttgtatcgttatttcccgtggttttacaagtcgaagaactcctaggtcagctgttattacacctccaatatatccatgaatacaggaatgggcaactagtctgctatagcattctgttgatgcgagtttgtaaagtgacaggatttcgatttatttcaacaaacccatgtatatacaaacttttgaactctgcaacttaagatatttgaggccaggcaaccttcaactgttgttaac

SEQ ID NO: 5781 - DNA, 2439 bp, Zea Mays
caaacaggctgcagacagcaggggtgcccaaaagcagggaaggaagagcggaaaagtccaccagtccaccaccaccttcctcggatccacaacccggacgcccgagtgcagagtgctccacccgggtcctttcttcctccttccccagtcccagtcccagtatcagtaccagtccaagccccactccccaccccgaacctcgcaagtattttagtcttactccattcgagccctaccactaccagtggcaggcgagcgagaggcggtggaggaggagcggacggaaccgtcgcctgctgcgtctgcctgcgagatctaggcgagcgcggccatgggtgctcgctgctccaagctctccgtctgctggtggcctccccacttcaaatcgccaatgctcgagaatggcgccgccggagatgatggcagcggcgtgccggtgttcgccgagtacagcttcgacgacctccgggtggccaccgacggcttcgcccccgatcgcatcgtgtcggagcacggggagaaggcacccaacgtggtctaccgtggcacgctcttcagctccggccgcaccgtcgctattaagcgcttcggccgctccgcctggccggactcacgccagttcctggaggaggcgagggctgttgggcagctgcgtagtggcaggctggccaatctgatcggttgctgctgcgagagcggcgagcgtctcctcgtcgcagagttcatgccgcacgagaccttggcaaagcatctcttccactgggagacaaatccattgagttgggcaatgaggatgagggctgcgctttatgtggcacaagcgttggactactgcagtagcaaagggagggcactctatcatgacctgcatgcatacagggttgtctttgatgtggatggtaacccaagattatcatgttttggtctgatgaagaacagccgagatggaaagagctacagtactaatttggccttcacgcctcctgaatatcttaagacaggcagagtaagtcctgagagtgtggtttacagttttggcactgtcttgcttgatctcctgagtggaaagcacattccaccaagtcatgcactcgaccttataagaggaaagaactttctagtgctgatggattcttgcttagaaggtcatgtatccaactcggacggaacagacttgatgcgattagcatcccgttgcctgcaatatgaagcacgtgaccgtccaaatctgaaaactgtggtatctggtctcacaagtctccagaaagatgcttatgtaatgttatttcttactattgtcttttaatgttaaaattcttatactgtggtgattattgagtatgcaaatgtccctagttaaattttgttacatatttgaggtagtaagcctgattttattttgctagaatgcacttggtgtgtatgttgattgttgagaacacaaattttggttgtttgtgccatacattttatcttgtttttctagcatgtggaattatgtcgtttgtttatatagttttccttgctcaatagttctaaccgaattttgatgcagactccttcgcacactttgcttgggattcaacatgataagaacaactcaggtcaagtttccttatctgctattgggaaagcttttgccagagcagacctgaatgaagtgcatgaaatattgctgcatgatggatataatgaggacgacgaggctaatgctgagctatctctccagtcatggaatggtgatatatctgagagctttgttgttaagaggcgtgcagacaatgcctttaggtctaaggaatacacgactgcaatcgagtgttactcaaggttcctcgactcaggtgcagtggtggctccaaccatgctgggacggagatgcttcgcacatgtggtggccggcaacccacaggaaggcctcgaggatgcaaagagagccgagattattgcatcggactggccgatgggacactacctgcaggccctggcacttcataagctgggtagggaggctgaaagccaagaagcactgaagaatggcactgccttggaagctgcaaggaatagtagagctagaactgtatagccctgaatttgtgataccatgcccttcctgcttgtacctagatcgcctgcatttcgggtgcctacctccaatccaatgctttgccaccagtagggttgtttttggtattccctaacttgtatcgttatttcccgtggttttacaagtcgaagaactcctaggtcagctgttattacacctccaatatatccatgaatacaggaatgggcaactagtctgctatagcattctgttgatgcgagtttgtaaagtgacaggatttcgatttatttcaacaaacccatgtatatacaaacttttgaactctgcaacttaagatatttgaggccaggcaaccttcaactgttgttaac

SEQ ID NO: 5782 - DNA, 1837 bp, Zea Mays
gccgccacttgctgcgctgatacctcctcacgtttctcccccgctcggttccgtgaaatcggttgctcgcgcgagagaatggcgccgccggagatgatggcagcggcgtgccggtgttcgccgagtacagcttcgacgacctccgggtggccaccgacggcttcgcccccgatcgcatcgtgtcggagcacggggagaaggcacccaacgtggtctaccgtggcacgctcttcagctccggccgcaccgtcgctattaagcgcttcggccgctccgcctggccggactcacgccagttcctggaggaggcgagggctgttgggcagctgcgtagtggcaggctggccaatctgatcggttgctgctgcgagagcggcgagcgtctcctcgtcgcagagttcatgccgcacgagaccttggcaaagcatctcttccactgggagacaaatccattgagttgggcaatgaggatgagggctgcgctttatgtggcacaagcgttggactactgcagtagcaaagggagggcactctatcatgacctgcatgcatacagggttgtctttgatgtggatggtaacccaagattatcatgttttggtctgatgaagaacagccgagatggaaagagctacagtactaatttggccttcacgcctcctgaatatcttaagacaggcagagtaagtcctgagagtgtggtttacagttttggcactgtcttgcttgatctcctgagtggaaagcacattccaccaagtcatgcactcgaccttataagaggaaagaactttctagtgctgatggattcttgcttagaaggtcatgtatccaactcggacggaacagacttgatgcgattagcatcccgttgcctgcaatatgaagcacgtgaccgtccaaatctgaaaactgtggtatctggtctcacaagtctccagaaagatgcttatactccttcgcacactttgcttgggattcaacatgataagaacaactcaggtcaagtttccttatctgctattgggaaagcttttgccagagcagacctgaatgaagtgcatgaaatattgctgcatgatggatataatgaggacgacgaggctaatgctgagctatctctccagtcatggaatggtgatatatctgagagctttgttgttaagaggcgtgcagacaatgcctttaggtctaaggaatacacgactgcaatcgagtgttactcaaggttcctcgactcaggtgcagtggtggctccaaccatgctgggacggagatgcttcgcacatgtggtggccggcaacccacaggaaggcctcgaggatgcaaagagagccgagattattgcatcggactggccgatgggacactacctgcaggccctggcacttcataagctgggtagggaggctgaaagccaagaagcactgaagaatggcactgccttggaagctgcaaggaatagtagagctagaactgtatagccctgaatttgtgataccatgcccttcctgcttgtacctagatcgcctgcatttcgggtgcctacctccaatccaatgctttgccaccagtagggttgtttttggtattccctaacttgtatcgttatttcccgtggttttacaagtcgaagaactcctaggtcagctgttattacacctccaatatatccatgaatacaggaatgggcaactagtctgctatagcattctgttgatgcgagtttgtaaagtgacaggatttcgatttatttcaacaaacccatgtatatacaaacttttgaactctgcaacttaagatatttgaggccaggcaaccttcaactgttgttaac

SEQ ID NO: 5783 - DNA, 1506 bp, Zea Mays
cgtcttccaaaatccaaaccgctcgctcctcaccgaagacgccattagccatgagcagcttggcttatccgctcctccggctcccgtgccgctgctctatcgcgccggcgccggcgccggcgtctcagctccccgcaccggtgtgtctatctgcttcggcttccgcaaatgcagggggcgatctgacggcgcgggaaaagcgagcgcagcgtcgggaacggcgggagctgcgtgcgacggactggaaggaggaggtgcaggaccggctgatccacgagccagcgcggcggcggaagaagcctcctaagcgttcgtggagggaggagctcaacctcgacctcctcgccgagctggggccgcagtggtggctcgtgcgcgtctccatggcgcccggcaccgactacgtcgacctcctcaccaaggctatctcacggcgctactcggaagtccccttcaagatttacaatccatcaatccaagtaaagaggagattaaaaagtggtgcaatcagtgttaaatcgaagcctctgcatgccgggttggtctttctgcattgtaccttaaacaaggagcttcatgactttatcagagacacagagggttgttatggctttattggagctacagttggttcaatcaagaggcagattaaaaagccaaaacctattccagttgatgaagttgaatcaattattagagaagagaaggaggaacaagagagagttgacagagaatttgaagaaatggagaatatgggaaacattgagcctttcagtaaacccgttgaagaatctgaacttatgttaatgaataagatcaagaagcagtttaagaaatcgtcctcacagggtggcactagacacagtgctttttcgcctggtgcaactgttcatgttctctccgggccttttgcagacttcactggttccatcctggaagtgaatcgcaaaaacaagaaggaatcttgtgtttatgtatcacagtagccgataactttttatcaacaacccagatctccagctgggcctgagtgaatgaagcaggaacttcagtgggtgggcagtggaccgttgaagacccagctatcagcaagagaaacagttagcacacctgcgcatgagctaccgtcaaaattaaccatttataaacaatgaggatgctgaggttagaaagctcgctgatttccactaggctgttcacattattttccctgtgctcgaatgcagaaagcagtcccttaggccattcatttcacactttgtcttcgtttatagaccatctccatcagcttaccgatacatgtacccatattcaaactacactctacaaatattacaatctacggtacaaaacgatgtttttagcgaccatatggttcaatgtatagtagttcactcatatggttaccaaaaacattattttacattgtactgtttgtagattatagtttgaatataggtataggtaagttgttggagatggtagttgttgatccatatactcgag

SEQ ID NO: 5784 - DNA, 2642 bp, Zea Mays
agatgaagatgctttattgaaaaccaaatgtccgaagcatgtggagctgagatggcagactgaagttagttccagcatttatgcaactcctttgatcgctgatatcaacagtgatggaaaattggaagtagtggtgccatcatttgttcattacttagaagttcttgaaggcactgatggagacaaactgccaggatggcctgcatttcatcagtcaaatgttcattcaagtcctcttctgtatgacattgacaaggatggtgtacgggaaatagctttggctacttacaacggtgttgtaaatttctttaggttatatgatgatggacaagcttgaggtacctcgtagaaaagtacgtaaagattggtatgttgggctaaatccagatccagttgaccgctcccatccagatgttaatgacagttcaattgccaaagtggctacttctaatgaaactcccctaatagatcagaataaatcaggaagtatgaagggaggtgaggccctgaaaaattcatccgagcaacactcagctgaaacaaaacttaattctacgcaagtgcaagagaatgtacagttgccaaacaatccgacaagagtgatgatcaaacaggaagctcagaaactcatgaaagtgattcgggggcaaaagcagcagccactgttgaaaatagtgaacccctagacgaagatgcagatgcatcatttgacttgtttcgggacccagaagatcttcctgatgagtacaattatgattatgatgactatgttgatgatcgcttgtggggagatgaggattggaaagagcaagaacatgagaaagaggaagattatgtgagcatagatgcccacatcttgtccaccccagtaattgcagatattgacaaagatggtgtacaagaaatggtgattgctgtatcatacttctttgatcatgaatattatcgtgattcagatcatgcgaaagaactagaaggaattgacatgggaaaatatgtcgcgagcagtatagttgtttttaaccttgacacccggcaagttaaatgggctgcagatcttgatttgagcacggatgctgtaaatttccgtgctcatgtgttttcctctccaactgtggttgatttggatggtgatggatatttggacatccttattgggactgcttatggcttgttttatgttattgatcatcgtggtaaggttaggaacaaattcccccttgagatggctgagattcacgcaccagtcattgctgcggacatcaatgatgatggcaaaatcgagatggttaccactgattcccatggaaatgtagcagcatggactgcagagggagaagaaatctgggaagtgcatctaaagagtctgattccacagagacctactgttggtgatgtcaatggagatggccacactgatgttgtggtcccaactgtgtcaggaaacatctatgttcttagtggaaaggatgggtcaaaaatccaacctttcccatatagaacacatggaagaatcatgagtcctgttctacttctcgacatgagcaaacatggagacaatgcaaaagggctaactcttgcaacaacgtcctttgatggttatttatatttgattgagggatcgagtggctgtgcagatgttgttgacattggagagacctcgtacactatggttttggctgataacgtggatggtggagatgaccttgatcttattgttaccactatgaatggcaacgtcttctgcttctccactcaatcaccacaccatccgcttaaggaatggaggtcatcaaaccaaggaaggaataatgctgcatatcagtacaaccgtgaaggtatctatgttaagcatggttccaggaccttccgtgacgaagagggcaagaatttctggatagagtttgaaatcgttgacaagtacagggtgccctatgggaagcaagctccttataacgtgacggtaactttacttgttccggggaattatcaaggagataggcgcattgttgtcagtggtgtgtatcatcaaccagggaagcaacggatgatgcttcccactgttcctgttagaactactggaactgtggtcgtggagatgatcgataaaaatgggctgtacttctccgacgagttctcactcaccttccacatgcattactataagctgctgaaatggcttctgctactgccaatgcttggaatgtttggtgttctcgtcatcttgaggccccaagaaggtgcgccgctgccatcgttttcacggaatatcgactagtggtgaaatgccggtgacccattgaagctgacgaagtgactccccaacatctccatgacctaaatgtcttgttcagtgtagtatcccaacagttaaccatttcatggattatagttatattttttacaatgtacccatttagttctgcagaacaattttgtacacagccattttcaatattggctcacccaaagaacaagcatattgtcaccattgagagtttacagtaggccttggaaacggtaattgtcagattctaagagaagcgacactcggagaggagaagcaaaactctcggatactgtgtcaaaacgctcttcataactattagtagaaaacaaacctatattaagcctgttttcat

SEQ ID NO: 5785 - DNA, 2679 bp, Zea Mays
gatgaagatgctttattgaaaaccaaatgtccgaagcatgtggagctgagatggcagactgaagttagttccagcatttatgcaactcctttgatcgctgatatcaacagtgatggaaaattggaagtagtggtgccatcatttgttcattacttagaagttcttgaaggcactgatggagacaaactgccaggatggcctgcatttcatcagtcaaatgttcattcaagtcctcttctgtatgacattgacaaggatggtgtacgggaaatagctttggctacttacaacggtgttgtaaatttctttagggtgtcaggttatatgatgatggacaagcttgaggtacctcgtagaaaagtacgtaaagattggtatgttgggctaaatccagatccagttgaccgctcccatccagatgttaatgacagttcaattgccaaagtggctacttctaatgaaactcccctaatagatcagaataaatcaggaagtatgaagggaggtgaggccctgaaaaattcatccgagcaacactcagctgaaacaaaacttaattctacgcaagtgcaagagaatgtacagttgccaaacaatgtaaacgacactcattctgagagcatctctagtgtcactactaaagcagagaatacatcgcaaacacatactcagagacgcttgcttgaaacagccgacaagagtgatgatcaaacaggaagctcagaaactcatgaaagtgattcgggggcaaaagcagcagccactgttgaaaatagtgaacccctagacgaagatgcagatgcatcatttgacttgtttcgggacccagaagatcttcctgatgagtacaattatgattatgatgactatgttgatgatcgcttgtggggagatgaggattggaaagagcaagaacatgagaaagaggaagattatgtgagcatagatgcccacatcttgtccaccccagtaattgcagatattgacaaagatggtgtacaagaaatggtgattgctgtatcatacttctttgatcatgaatattatcgtgattcagatcatgcgaaagaactagaaggaattgacatgggaaaatatgtcgcgagcagtatagttgtttttaaccttgacacccggcaagttaaatgggctgcagatcttgatttgagcacggatgctgtaaatttccgtgctcatgtgttttcctctccaactgtggttgatttggatggtgatggatatttggacatccttattgggactgcttatggcttgttttatgttattgatcatcgtggtaaggttaggaacaaattcccccttgagatggctgagattcacgcaccagtcattgctgcggacatcaatgatgatggcaaaatcgagatggttaccactgattcccatggaaatgtagcagcatggactgcagagggagaagaaatctgggaagtgcatctaaagagtctgattccacaggaaacatctatgttcttagtggaaaggatgggtcaaaaatccaacctttcccatatagaacacatggaagaatcatgagtcctgttctacttctcgacatgagcaaacatggagacaatgcaaaagggctaactcttgcaacaacgtcctttgatggttatttatatttgattgagggatcgagtggctgtgcagatgttgttgacattggagagacctcgtacactatggttttggctgataacgtggatggtggagatgaccttgatcttattgttaccactatgaatggcaacgtcttctgcttctccactcaatcaccacaccatccgcttaaggaatggaggtcatcaaaccaaggaaggaataatgctgcatatcagtacaaccgtgaaggtatctatgttaagcatggttccaggaccttccgtgacgaagagggcaagaatttctggatagagtttgaaatcgttgacaagtacagggtgccctatgggaagcaagctccttataacgtgacggtaactttacttgttccggggaattatcaaggagataggcgcattgttgtcagtggtgtgtatcatcaaccagggaagcaacggatgatgcttcccactgttcctgttagaactactggaactgtggtcgtggagatgatcgataaaaatgggctgtacttctccgacgagttctcactcaccttccacatgcattactataagctgctgaaatggcttctgctactgccaatgcttggaatgtttggtgttctcgtcatcttgaggccccaagaaggtgcgccgctgccatcgttttcacggaatatcgactagtggtgaaatgccggtgacccattgaagctgacgaagtgactccccaacatctccatgacctaaatgtcttgttcagtgtagtatcccaacagttaaccatttcatggattatagttatattttttacaatgtacccatttagttctgcagaacaattttgtacacagccattttcaatattggctcacccaaagaacaagcatattgtcaccattgagagtttacagtaggccttggaaacggtaattgtcagattctaagagaagcgacactcggagaggagaagcaaaactctcggatactgtgtcaaaacgctcttcataactattagtagaaaacaaacctatattaagcctgttttcat

SEQ ID NO: 5786 - DNA, 2649 bp, Zea Mays
gatgaagatgctttattgaaaaccaaatgtccgaagcatgtggagctgagatggcagactgaagttagttccagcatttatgcaactcctttgatcgctgatatcaacagtgatggaaaattggaagtagtggtgccatcatttgttcattacttagaagttcttgaaggcactgatggagacaaactgccaggatggcctgcatttcatcagtcaaatgttcattcaagtcctcttctgtatgacattgacaaggatggtgtacgggaaatagctttggctacttacaacggtgttgtaaatttctttagggtgtcaggttatatgatgatggacaagcttgaggtacctcgtagaaaagtacgtaaagattggtatgttgggctaaatccagatccagttgaccgctcccatccagatgttaatgacagttcaattgccaaagtggctacttctaatgaaactcccctaatagatcagaataaatcaggaagtatgaagggaggtgaggccctgaaaaattcatccgagcaacactcagctgaaacaaaacttaattctacgcaagtgcaagagaatgtacagttgccaaacaatccgacaagagtgatgatcaaacaggaagctcagaaactcatgaaagtgattcgggggcaaaagcagcagccactgttgaaaatagtgaacccctagacgaagatgcagatgcatcatttgacttgtttcgggacccagaagatcttcctgatgagtacaattatgattatgatgactatgttgatgatcgcttgtggggagatgaggattggaaagagcaagaacatgagaaagaggaagattatgtgagcatagatgcccacatcttgtccaccccagtaattgcagatattgacaaagatggtgtacaagaaatggtgattgctgtatcatacttctttgatcatgaatattatcgtgattcagatcatgcgaaagaactagaaggaattgacatgggaaaatatgtcgcgagcagtatagttgtttttaaccttgacacccggcaagttaaatgggctgcagatcttgatttgagcacggatgctgtaaatttccgtgctcatgtgttttcctctccaactgtggttgatttggatggtgatggatatttggacatccttattgggactgcttatggcttgttttatgttattgatcatcgtggtaaggttaggaacaaattcccccttgagatggctgagattcacgcaccagtcattgctgcggacatcaatgatgatggcaaaatcgagatggttaccactgattcccatggaaatgtagcagcatggactgcagagggagaagaaatctgggaagtgcatctaaagagtctgattccacagagacctactgttggtgatgtcaatggagatggccacactgatgttgtggtcccaactgtgtcaggaaacatctatgttcttagtggaaaggatgggtcaaaaatccaacctttcccatatagaacacatggaagaatcatgagtcctgttctacttctcgacatgagcaaacatggagacaatgcaaaagggctaactcttgcaacaacgtcctttgatggttatttatatttgattgagggatcgagtggctgtgcagatgttgttgacattggagagacctcgtacactatggttttggctgataacgtggatggtggagatgaccttgatcttattgttaccactatgaatggcaacgtcttctgcttctccactcaatcaccacaccatccgcttaaggaatggaggtcatcaaaccaaggaaggaataatgctgcatatcagtacaaccgtgaaggtatctatgttaagcatggttccaggaccttccgtgacgaagagggcaagaatttctggatagagtttgaaatcgttgacaagtacagggtgccctatgggaagcaagctccttataacgtgacggtaactttacttgttccggggaattatcaaggagataggcgcattgttgtcagtggtgtgtatcatcaaccagggaagcaacggatgatgcttcccactgttcctgttagaactactggaactgtggtcgtggagatgatcgataaaaatgggctgtacttctccgacgagttctcactcaccttccacatgcattactataagctgctgaaatggcttctgctactgccaatgcttggaatgtttggtgttctcgtcatcttgaggccccaagaaggtgcgccgctgccatcgttttcacggaatatcgactagtggtgaaatgccggtgacccattgaagctgacgaagtgactccccaacatctccatgacctaaatgtcttgttcagtgtagtatcccaacagttaaccatttcatggattatagttatattttttacaatgtacccatttagttctgcagaacaattttgtacacagccattttcaatattggctcacccaaagaacaagcatattgtcaccattgagagtttacagtaggccttggaaacggtaattgtcagattctaagagaagcgacactcggagaggagaagcaaaactctcggatactgtgtcaaaacgctcttcataactattagtagaaaacaaacctatattaagcctgttttcat

SEQ ID NO: 5787 - DNA, 2925 bp, Zea Mays
gatgaagatgctttattgaaaaccaaatgtccgaagcatgtggagctgagatggcagactgaagttagttccagcatttatgcaactcctttgatcgctgatatcaacagtgatggaaaattggaagtagtggtgccatcatttgttcattacttagaagttcttgaaggcactgatggagacaaactgccaggatggcctgcatttcatcagtcaaatgttcattcaagtcctcttctgtatgacattgacaaggatggtgtacgggaaatagctttggctacttacaacggtgttgtaaatttctttaggttatatgatgatggacaagcttgaggtacctcgtagaaaagtacgtaaagattggtatgttgggctaaatccagatccagttgaccgctcccatccagatgttaatgacagttcaattgccaaagtggctacttctaatgaaactcccctaatagatcagaataaatcaggtatccaataatcttctatgggagtgcagtcttatatgttactttattgatagaaatgtcttgtttttgaatctcatgataaagcttaccttggtttgatggtttcagttagcagaactctctgattccatcgacttgctttaaggaaaaaagaattgcatgcatgtttcagcagtaccaactatactaagaagtatgaagggaggtgaggccctgaaaaattcatccgagcaacactcagctgaaacaaaacttaattctacgcaagtgcaagagaatgtacagttgccaaacaatgtaaacgacactcattctgagagcatctctagtgtcactactaaagcagagaatacatcgcaaacacatactcagagacgcttgcttgaaacagccgacaagagtgatgatcaaacaggaagctcagaaactcatgaaagtgattcgggggcaaaagcagcagccactgttgaaaatagtgaacccctagacgaagatgcagatgcatcatttgacttgtttcgggacccagaagatcttcctgatgagtacaattatgattatgatgactatgttgatgatcgcttgtggggagatgaggattggaaagagcaagaacatgagaaagaggaagattatgtgagcatagatgcccacatcttgtccaccccagtaattgcagatattgacaaagatggtgtacaagaaatggtgattgctgtatcatacttctttgatcatgaatattatcgtgattcagatcatgcgaaagaactagaaggaattgacatgggaaaatatgtcgcgagcagtatagttgtttttaaccttgacacccggcaagttaaatgggctgcagatcttgatttgagcacggatgctgtaaatttccgtgctcatgtgttttcctctccaactgtggttgatttggatggtgatggatatttggacatccttattgggactgcttatggcttgttttatgttattgatcatcgtggtaaggttaggaacaaattcccccttgagatggctgagattcacgcaccagtcattgctgcggacatcaatgatgatggcaaaatcgagatggttaccactgattcccatggaaatgtagcagcatggactgcagagggagaagaaatctgggaagtgcatctaaagagtctgattccacagagacctactgttggtgatgtcaatggagatggccacactgatgttgtggtcccaactgtgtcaggaaacatctatgttcttagtggaaaggatgggtcaaaaatccaacctttcccatatagaacacatggaagaatcatgagtcctgttctacttctcgacatgagcaaacatggagacaatgcaaaagggctaactcttgcaacaacgtcctttgatggttatttatatttgattgagggatcgagtggctgtgcagatgttgttgacattggagagacctcgtacactatggttttggctgataacgtggatggtggagatgaccttgatcttattgttaccactatgaatggcaacgtcttctgcttctccactcaatcaccacaccatccgcttaaggaatggaggtcatcaaaccaaggaaggaataatgctgcatatcagtacaaccgtgaaggtatctatgttaagcatggttccaggaccttccgtgacgaagagggcaagaatttctggatagagtttgaaatcgttgacaagtacagggtgccctatgggaagcaagctccttataacgtgacggtaactttacttgttccggggaattatcaaggagataggcgcattgttgtcagtggtgtgtatcatcaaccagggaagcaacggatgatgcttcccactgttcctgttagaactactggaactgtggtcgtggagatgatcgataaaaatgggctgtacttctccgacgagttctcactcaccttccacatgcattactataagctgctgaaatggcttctgctactgccaatgcttggaatgtttggtgttctcgtcatcttgaggccccaagaaggtgcgccgctgccatcgttttcacggaatatcgactagtggtgaaatgccggtgacccattgaagctgacgaagtgactccccaacatctccatgacctaaatgtcttgttcagtgtagtatcccaacagttaaccatttcatggattatagttatattttttacaatgtacccatttagttctgcagaacaattttgtacacagccattttcaatattggctcacccaaagaacaagcatattgtcaccattgagagtttacagtaggccttggaaacggtaattgtcagattctaagagaagcgacactcggagaggagaagcaaaactctcggatactgtgtcaaaacgctcttcataactattagtagaaaacaaacctatattaagcctgttttcat

SEQ ID NO: 5788 - DNA, 2825 bp, Zea Mays
gatgaagatgctttattgaaaaccaaatgtccgaagcatgtggagctgagatggcagactgaagttagttccagcatttatgcaactcctttgatcgctgatatcaacagtgatggaaaattggaagtagtggtgccatcatttgttcattacttagaagttcttgaaggcactgatggagacaaactgccaggatggcctgcatttcatcagtcaaatgttcattcaagtcctcttctgtatgacattgacaaggatggtgtacgggaaatagctttggctacttacaacggtgttgtaaatttctttagggtgtcaggttatatgatgatggacaagcttgaggtacctcgtagaaaagtacgtaaagattggtatgttgggctaaatccagatccagttgaccgctcccatccagatgttaatgacagttcaattgccaaagtggctacttctaatgaaactcccctaatagatcagaataaatcagttagcagaactctctgattccatcgacttgctttaaggaaaaaagaattgcatgcatgtttcagcagtaccaactatactaagaagtatgaagggaggtgaggccctgaaaaattcatccgagcaacactcagctgaaacaaaacttaattctacgcaagtgcaagagaatgtacagttgccaaacaatgtaaacgacactcattctgagagcatctctagtgtcactactaaagcagagaatacatcgcaaacacatactcagagacgcttgcttgaaacagccgacaagagtgatgatcaaacaggaagctcagaaactcatgaaagtgattcgggggcaaaagcagcagccactgttgaaaatagtgaacccctagacgaagatgcagatgcatcatttgacttgtttcgggacccagaagatcttcctgatgagtacaattatgattatgatgactatgttgatgatcgcttgtggggagatgaggattggaaagagcaagaacatgagaaagaggaagattatgtgagcatagatgcccacatcttgtccaccccagtaattgcagatattgacaaagatggtgtacaagaaatggtgattgctgtatcatacttctttgatcatgaatattatcgtgattcagatcatgcgaaagaactagaaggaattgacatgggaaaatatgtcgcgagcagtatagttgtttttaaccttgacacccggcaagttaaatgggctgcagatcttgatttgagcacggatgctgtaaatttccgtgctcatgtgttttcctctccaactgtggttgatttggatggtgatggatatttggacatccttattgggactgcttatggcttgttttatgttattgatcatcgtggtaaggttaggaacaaattcccccttgagatggctgagattcacgcaccagtcattgctgcggacatcaatgatgatggcaaaatcgagatggttaccactgattcccatggaaatgtagcagcatggactgcagagggagaagaaatctgggaagtgcatctaaagagtctgattccacagagacctactgttggtgatgtcaatggagatggccacactgatgttgtggtcccaactgtgtcaggaaacatctatgttcttagtggaaaggatgggtcaaaaatccaacctttcccatatagaacacatggaagaatcatgagtcctgttctacttctcgacatgagcaaacatggagacaatgcaaaagggctaactcttgcaacaacgtcctttgatggttatttatatttgattgagggatcgagtggctgtgcagatgttgttgacattggagagacctcgtacactatggttttggctgataacgtggatggtggagatgaccttgatcttattgttaccactatgaatggcaacgtcttctgcttctccactcaatcaccacaccatccgcttaaggaatggaggtcatcaaaccaaggaaggaataatgctgcatatcagtacaaccgtgaaggtatctatgttaagcatggttccaggaccttccgtgacgaagagggcaagaatttctggatagagtttgaaatcgttgacaagtacagggtgccctatgggaagcaagctccttataacgtgacggtaactttacttgttccggggaattatcaaggagataggcgcattgttgtcagtggtgtgtatcatcaaccagggaagcaacggatgatgcttcccactgttcctgttagaactactggaactgtggtcgtggagatgatcgataaaaatgggctgtacttctccgacgagttctcactcaccttccacatgcattactataagctgctgaaatggcttctgctactgccaatgcttggaatgtttggtgttctcgtcatcttgaggccccaagaaggtgcgccgctgccatcgttttcacggaatatcgactagtggtgaaatgccggtgacccattgaagctgacgaagtgactccccaacatctccatgacctaaatgtcttgttcagtgtagtatcccaacagttaaccatttcatggattatagttatattttttacaatgtacccatttagttctgcagaacaattttgtacacagccattttcaatattggctcacccaaagaacaagcatattgtcaccattgagagtttacagtaggccttggaaacggtaattgtcagattctaagagaagcgacactcggagaggagaagcaaaactctcggatactgtgtcaaaacgctcttcataactattagtagaaaacaaacctatattaagcctgttttcat

SEQ ID NO: 5789 - DNA, 2588 bp, Zea Mays
gttagttccagcatttatgcaactcctttgatcgctgatatcaacagagtgatggaaaattggaagtagtggtgccatcatttgttcattacttagaagttcttgaaggcactgatggagacaaactgccaggatggcctgcatttcatcagtcaaatgttcattcaagtcctcttctgtatgacattgacaaggatggtgtacgggaaatagctttggctacttacaacggtgttgtaaatttctttagggtgtcaggttatatgatgatggacaagcttgaggtacctcgtagaaaagtacgtaaagattggtatgttgggctaaatccagatccagttgaccgctcccatccagatgttaatgacagttcaattgccaaagtggctacttctaatgaaactcccctaatagatcagaataaatcaggaagtatgaagggaggtgaggccctgaaaaattcatccgagcaacactcagctgaaacaaaacttaattctacgcaagtgcaagagaatgtacagttgccaaacaatccgacaagagtgatgatcaaacaggaagctcagaaactcatgaaagtgattcgggggcaaaagcagcagccactgttgaaaatagtgaacccctagacgaagatgcagatgcatcatttgacttgtttcgggacccagaagatcttcctgatgagtacaattatgattatgatgactatgttgatgatcgcttgtggggagatgaggattggaaagagcaagaacatgagaaagaggaagattatgtgagcatagatgcccacatcttgtccaccccagtaattgcagatattgacaaagatggtgtacaagaaatggtgattgctgtatcatacttctttgatcatgaatattatcgtgattcagatcatgcgaaagaactagaaggaattgacatgggaaaatatgtcgcgagcagtatagttgtttttaaccttgacacccggcaagttaaatgggctgcagatcttgatttgagcacggatgctgtaaatttccgtgctcatgtgttttcctctccaactgtggttgatttggatggtgatggatatttggacatccttattgggactgcttatggcttgttttatgttattgatcatcgtggtaaggttaggaacaaattcccccttgagatggctgagattcacgcaccagtcattgctgcggacatcaatgatgatggcaaaatcgagatggttaccactgattcccatggaaatgtagcagcatggactgcagagggagaagaaatctgggaagtgcatctaaagagtctgattccacagagacctactgttggtgatgtcaatggagatggccacactgatgttgtggtcccaactgtgtcaggaaacatctatgttcttagtggaaaggatgggtcaaaaatccaacctttcccatatagaacacatggaagaatcatgagtcctgttctacttctcgacatgagcaaacatggagacaatgcaaaagggctaactcttgcaacaacgtcctttgatggttatttatatttgattgagggatcgagtggctgtgcagatgttgttgacattggagagacctcgtacactatggttttggctgataacgtggatggtggagatgaccttgatcttattgttaccactatgaatggcaacgtcttctgcttctccactcaatcaccacaccatccgcttaaggaatggaggtcatcaaaccaaggaaggaataatgctgcatatcagtacaaccgtgaaggtatctatgttaagcatggttccaggaccttccgtgacgaagagggcaagaatttctggatagagtttgaaatcgttgacaagtacagggtgccctatgggaagcaagctccttataacgtgacggtaactttacttgttccggggaattatcaaggagataggcgcattgttgtcagtggtgtgtatcatcaaccagggaagcaacggatgatgcttcccactgttcctgttagaactactggaactgtggtcgtggagatgatcgataaaaatgggctgtacttctccgacgagttctcactcaccttccacatgcattactataagctgctgaaatggcttctgctactgccaatgcttggaatgtttggtgttctcgtcatcttgaggccccaagaaggtgcgccgctgccatcgttttcacggaatatcgactagtggtgaaatgccggtgacccattgaagctgacgaagtgactccccaacatctccatgacctaaatgtcttgttcagtgtagtatcccaacagttaaccatttcatggattatagttatattttttacaatgtacccatttagttctgcagaacaattttgtacacagccattttcaatattggctcacccaaagaacaagcatattgtcaccattgagagtttacagtaggccttggaaacggtaattgtcagattctaagagaagcgacactcggagaggagaagcaaaactctcggatactgtgtcaaaacgctcttcataactattagtagaaaacaaacctatattaagcctgttttcat

SEQ ID NO: 5790 - DNA, 1932 bp, Zea Mays
gcgtctctttctcttctaacgttcaaatattcaaacgaggagcggatggacagaggggacggaggctggatgaggcactagaccactagtgcactacggaaacgcgagagaagaggcagacggcggcggcggccatggatttccactccctctcccggcgagaacttcaggcgctctgcaagagcaacggcatccgtgccaacatgtccaacgcggccatggcggaagcgcttaggtgcctccccgcggtggacaggatcgacgagatcgggagcacggcgccaccgccggtatcggcgatgaaggaacagacgccggatgcggaagaggcggtcggaggggagcaggagcacgggtgcccgctccctcgcggcggccgtgcacgggggaagagaaggaaggccggggcacggaagagtaagacggagggggatgaggaggaggtgatggtgccgggcccacagaccttgccgggacccaagatgacggtggcacgggaggctgctgcggcacctgtggatgatgcggaagaggcggccgtaggaattaggacgagaaggtcagcgagatccaaggtgaaggtcgcgctggatcagaaagaggaggacgtacaagcggcggcagcccggaaggagcagaaagtttcagataagagctgcgaggattcagaagagcatgcaatagtagtaggtgtggtggaggaagaagaggtcagaaagccacaggaaggtcaaaacgtgacgaggagagccgcgccatataagacacatgaggatttgcagccggatcagaggacggcggaagagttgtccatggcaaagaaaaggacgagaaggtccacaagatccaaggtagcagcggcagcacagaaggggcagaaagctgattcttctgacacaaccgttggacctgaaattgatcctaaatatgatgaagttgttcccaaggtggaggaggccacaaaaccacaggaaggcaagaatgtcactaagagggctacagcttatatttacaaggcacacgaggaggtgcagacaggccaggtgacagcggcacccgaagctacggcagaagaagtggccacgacaaagagaaggaggaggaggtcaacaagatccaaggtgggggcggcagcacggaaggctcagaaagaatgtgcggctgatacttctgatgcagtcaacgggtctacagtaagtgatgatcctaaggaagagcaagtggttgaggtgatagaggaagggacaacaaagcacaatgaagaacgagagcaaattaacaacgttcggcagtttgcttccttgccaaaactggaggactcaccaatccttggcatcgtgtccaagcccaatacagcagatgcttcagacaaggcaccggttgcacatcaggaggctagcaaggaagatcgtttcactttcactggtgaggctgatgtgtccaatcttcttgtcaacacacttgacagatttgcaaagcctgtgtatgagtccagagtcaaagaggagaagaaatgcagtgagtgttggtggatgcttctataatttacaagaggtgtaggaccaggtccagtcagaactgccaaaagtatcaaattacatgagatcatgtaatgtgtgggtcaaaaactctagaatcaggattggagagatggtttaagacacgaatctaagcaaagaaaaggaaaaggaaagaatcctgagagtgtaaacagatggtttatactggagcatgaggcagacatgtaaggccactgtggacaccacctccggcatggtttacatgatattaattgacaccacctccggcatggtcttcgccatgaggtctgacattgttttgaatgaagtggacagtttgtctagctaattaaaagtaaaattttcttgaagttgtccaggatgcccatacgctggcatgattgagttttcc

SEQ ID NO: 5791 - DNA, 234 bp, Zea Mays
cgcggcgtggttttggagagggcctttagctttaggcgcctggggtatttgcgagagacgccggccgcctctagcggtggctgccgggcgccggctgcgctgcctcggcattcggcaacctcaccatgtgaacctgcctttgtatgaacatcagtcatgataagtacttccacctccatgtaaaacccaattaaatgaggtgtcttttaaaaatctatagaaggctaagtgaac

SEQ ID NO: 5792 - DNA, 2284 bp, Zea Mays
aaaaacttctccctaaatcattcttttgatttaggttttgatttttaagggtaaaagtcagagccaaatcaccctaaaaaacattatagatgagtggatcaatcgaacgactgcatactttccgctagggtgggccgcgggccgggcagcacggttttcttggcccgacccttgatcaaatcaggtctagcgaaatccaaaagcccgttcgaccccaaacaccgactgaccgacacgactccccccttcgtcttccaatccgccgctgttcgagtagtcggcggcgcggcgccggcggccggggcggcggcgatgaatcccctcacgcaggtgaagcggacgcagattatcaaccagaaggaggcgctcctgggcatcggcgaggacgcgtcgtggcacgccaagtttaaggactcggcctacgtctacgtcggcggcgtccccttcgacctcaccgagggcgacctcctcgccatctttgcgcagtatggtgaggttgtcgacgtgaacctcgtgcgcgacaagggcaccggaaaatccaaggggttcgcgttcctcgcgtacgaggaccagagaagcacgattcttgctgttgacaatttgaatggagctaaagttcttgggaggatcataaaggttgaccatgtgagcaagtacaagaagaaggaagaggaagatgaggaggagctgcagaagaagagggaggcccgtggagtctgctatgctttccagaaaggcgagtgcaaccgcggagcttcctgcagatattcacatgatgagcagagaaatgcaaacaccggttggggttctaaagaggatagtggtgcacgatgggagcatgacaaacacagtgatgtaccgaagagtcgaggcatgtgctatgctttccagaagggagagtgcaaccgtggagcatcctgcaaatttttgcatgacgagcagagaaatgcaaacagtcgtcgggactctagggatggtggaccatcgagatcagagcggtatggagaccgagaatctaggagtaggcatgatgatagaagagcagaagatcgggacagattcaggcgtgacaactcacctgagagatcacgaggtgagaggcagagggacgatgacagatccgacagaggaagagaagcaaaatcagaaagacgcagatatgatgtggaacatgaggatcgcaagcggtcaaggcacggcagagagtgatgccatgaaagaagtgtttacaaagaacacaaatgttgccttcggctgctgctcgtgctgctgctttattcagataagtttctttatatgcctccatttgattacatctggtgttctttttcgctcttcagatcggtgtcatttttagttatcatcactgaaaccgtctgactggattgtgttggtgccaattgcgtggtttttgccgaggaagttgtttactggttaatcttcagctaggatggtgggcgcgcctccgcaaggaccacaatgcctgttctggctacgcgctgatgaacaatgaaaatgaaccactgttacctgcaacagcatcagcagcagcatgtgcaacccaaaaggagccgtattccccagtagaaattttgtactggacagaggcacggttccaaaaggttcggccctaaaaattgctctgcaatgtcagtggtccagcgtagatgatgatgatcgcttctaacatagtctataaaaaatgcatactggagatttggtactagataacaagaggaccttgagtaccgagttttttccggtgaaagattgatgggcgatgccacagcctgaagacgaagaggatgtaaagaaaaaaactcgccaattaagggcttgttcggttattcctatcccatatggattggatgagattggaaaaaattgtgaaagattttgacttgtttgggattgaaacccatccaatcccacccaatccacatggattgagagcaaaacgaacaagccctaagaattgatgatgttgtagtacaaattccaggccttcggttgattttctaagagttagtttggttaattttctaagagttagtttgacagcctcgttttttcaaggaattttcatttttccaagtgaaattaatttatttttagaatttgagaatcttttattctcaagagaaattagtttatttttgttgaaaaaattaaaatcctttagaaaaatagagttgtcaaaatagccctaagccttcaaaagaatggcttgcaactgtcgaaaccatggctagtaaaatccttggaaatttcatcaccaaagaag

SEQ ID NO: 5793 - DNA, 2299 bp, Zea Mays
aaaacttctccctaaatcattcttttgatttaggttttgatttttaagggtaaaagtcagagccaaatcaccctaaaaaacattatagatgagtggatcaatcgaacgactgcatactttccgctagggtgggccgcgggccgggcagcacggttttcttggcccgacccttgatcaaatcaggtctagcgaaatccaaaagcccgttcgaccccaaacaccgactgaccgacacgactccccccttcgtcttccaatccgccgctgttcgagtagtcggcggcgcggcgccggcggccggggcggcggcgatgaatcccctcacgcaggtgaagcggacgcagattatcaaccagaaggaggcgctcctgggcatcggcgaggacgcgtcgtggcacgccaagtttaaggactcggcctacgtctacgtcggcggcgtccccttcgacctcaccgagggcgacctcctcgccatctttgcgcagtatggtgaggttgtcgacgtgaacctcgtgcgcgacaagggcaccggaaaatccaaggggttcgcgttcctcgcgtacgaggaccagagaagcacgattcttgctgttgacaatttgaatggagctaaagttcttgggaggatcataaaggttgaccatgtgagcaagtacaagaagaaggaagaggaagatgaggaggagctgcagaagaagagggaggcccgtggagtctgctatgctttccagaaaggcgagtgcaaccgcggagcttcctgcagatattcacatgatgagcagagaaatgcaaacaccggttggggttctaaagaggatagtggtgcacgatgggagcatgacaaacacagtgatgtaccgaagagtcgaggcatgtgctatgctttccagaagggagagtgcaaccgtggagcatcctgcaaatttttgcatgacgagcagagaaatgcaaacagtcgtcgggactctagggatggtggaccatcgagatcagagcggtatggagaccgagaatctaggagtaggcatgatgatagaagagcagaagatcgggacagattcaggcgtgacaactcacctgagagatcacgaggtgagaggcagagggacgatgacagatccgacagaggaagagaagcaaaatcagaaagacgcagatatgatgtggaacatgaggatcgcaagcggtcaaggcacggcagagagtgatgccatgaaagaagtgtttacaaagaacacaaatgttgccttcggctgctgctcgtgctgctgctttattcagataagtttctttatatgcctccatttgattacatctggtgttctttttcgctcttcagatcggtgtcatttttagttatcatcactgaaaccgtctgactggattgtgttggtgccaattgcgtggtttttgccgaggaagttgtttactggttaatcttcagctaggatggtgggcgcgcctccgcaaggaccacaatgcctgttctggctacgcgctgatgaacaatgaaaatgatgctgtattttgcagaaccactgttacctgcaacagcatcagcagcagcatgtgcaacccaaaaggagccgtattccccagtagaaattttgtactggacagaggcacggttccaaaaggttcggccctaaaaattgctctgcaatgtcagtggtccagcgtagatgatgatgatcgcttctaacatagtctataaaaaatgcatactggagatttggtactagataacaagaggaccttgagtaccgagttttttccggtgaaagattgatgggcgatgccacagcctgaagacgaagaggatgtaaagaaaaaaactcgccaattaagggcttgttcggttattcctatcccatatggattggatgagattggaaaaaattgtgaaagattttgacttgtttgggattgaaacccatccaatcccacccaatccacatggattgagagcaaaacgaacaagccctaagaattgatgatgttgtagtacaaattccaggccttcggttgattttctaagagttagtttggttaattttctaagagttagtttgacagcctcgttttttcaaggaattttcatttttccaagtgaaattaatttatttttagaatttgagaatcttttattctcaagagaaattagtttatttttgttgaaaaaattaaaatcctttagaaaaatagagttgtcaaaatagccctaagccttcaaaagaatggcttgcaactgtcgaaaccatggctagtaaaatccttggaaatttcatcaccaaagaag

SEQ ID NO: 5794 - DNA, 2228 bp, Zea Mays
aaaacttctccctaaatcattcttttgatttaggttttgatttttaagggtaaaagtcagagccaaatcaccctaaaaaacattatagatgagtggatcaatcgaacgactgcatactttccgctagggtgggccgcgggccgggcagcacggttttcttggcccgacccttgatcaaatcaggtctagcgaaatccaaaagcccgttcgaccccaaacaccgactgaccgacacgactccccccttcgtcttccaatccgccgctgttcgagtagtcggcggcgcggcgccggcggccggggcggcggcgatgaatcccctcacgcaggtgaagcggacgcagattatcaaccagaaggaggcgctcctgggcatcggcgaggacgcgtcgtggcacgccaagtttaaggactcggcctacgtctacgtcggcggcgtccccttcgacctcaccgagggcgacctcctcgccatctttgcgcagtatggtgaggttgtcgacgtgaacctcgtgcgcgacaagggcaccggaaaatccaaggggttcgcgttcctcgcgtacgaggaccagagaagcacgattcttgctgttgacaatttgaatggagctaaagttcttgggaggatcataaaggttgaccatgtgagcaagtacaagaagaaggaagaggaagatgaggaggagctgcagaagaagagggaggcccgtggagtctgctatgctttccagaaaggcgagtgcaaccgcggagcttcctgcagatattcacatgatgagcagagaaatgcaaacaccggttggggttctaaagaggatagtggtgcacgatgggagcatgacaaacacagtgatgtaccgaagagtcgaggcatgtgctatgctttccagaagggagagtgcaaccgtggagcatcctgcaaatttttgcatgacgagcagagaaatgcaaacagtcgtcgggactctagggatggtggaccatcgagatcagagcggtatggagaccgagaatctaggagtaggcatgatgatagaagagcagaagatcgggacagattcaggcgtgacaactcacctgagagatcacgaggtgagaggcagagggacgatgacagatccgacagaggaagagaagcaaaatcagaaagacgcagatatgatgtggaacatgaggatcgcaagcggtcaaggcacggcagagagtgatgccatgaaagaagtgtttacaaagaacacaaatggtgcaagaggccgtgggggattgacatcggtgtcatttttagttatcatcactgaaaccgtctgactggattgtgttggtgccaattgcgtggtttttgccgaggaagttgtttactggttaatcttcagctaggatggtgggcgcgcctccgcaaggaccacaatgcctgttctggctacgcgctgatgaacaatgaaaatgatgctgtattttgcagaaccactgttacctgcaacagcatcagcagcagcatgtgcaacccaaaaggagccgtattccccagtagaaattttgtactggacagaggcacggttccaaaaggttcggccctaaaaattgctctgcaatgtcagtggtccagcgtagatgatgatgatcgcttctaacatagtctataaaaaatgcatactggagatttggtactagataacaagaggaccttgagtaccgagttttttccggtgaaagattgatgggcgatgccacagcctgaagacgaagaggatgtaaagaaaaaaactcgccaattaagggcttgttcggttattcctatcccatatggattggatgagattggaaaaaattgtgaaagattttgacttgtttgggattgaaacccatccaatcccacccaatccacatggattgagagcaaaacgaacaagccctaagaattgatgatgttgtagtacaaattccaggccttcggttgattttctaagagttagtttggttaattttctaagagttagtttgacagcctcgttttttcaaggaattttcatttttccaagtgaaattaatttatttttagaatttgagaatcttttattctcaagagaaattagtttatttttgttgaaaaaattaaaatcctttagaaaaatagagttgtcaaaatagccctaagccttcaaaagaatggcttgcaactgtcgaaaccatggctagtaaaatccttggaaatttcatcaccaaagaag

SEQ ID NO: 5795 - DNA, 2075 bp, Zea Mays
gtgggccgcgggccgggcagcacggttttcttggcccgacccttgatcaaatcaggtctagcgaaatccaaaagcccgttcgaccccaaacaccgactgaccgacacgactccccccttcgtcttccaatccgccgctgttcgagtagtcggcggcgcggcgccggcggccggggcggcggcgatgaatcccctcacgcaggtgaagcggacgcagattatcaaccagaaggaggcgctcctgggcatcggcgaggacgcgtcgtggcacgccaagtttaaggactcggcctacgtctacgtcggcggcgtccccttcgacctcaccgagggcgacctcctcgccatctttgcgcagtatggtgaggttgtcgacgtgaacctcgtgcgcgacaagggcaccggaaaatccaaggggttcgcgttcctcgcgtacgaggaccagagaagcacgattcttgctgttgacaatttgaatggagctaaagttcttgggaggatcataaaggttgaccatgtgagcaagtacaagaagaaggaagaggaagatgaggaggagctgcagaagaagagggaggcccgtggagtctgctatgctttccagaaaggcgagtgcaaccgcggagcttcctgcagatattcacatgatgagcagagaaatgcaaacaccggttggggttctaaagaggatagtggtgcacgatgggagcatgacaaacacagtgatgtaccgaagagtcgaggcatgtgctatgctttccagaagggagagtgcaaccgtggagcatcctgcaaatttttgcatgacgagcagagaaatgcaaacagtcgtcgggactctagggatggtggaccatcgagatcagagcggtatggagaccgagaatctaggagtaggcatgatgatagaagagcagaagatcgggacagattcaggcgtgacaactcacctgagagatcacgaggtgagaggcagagggacgatgacagatccgacagaggaagagaagcaaaatcagaaagacgcagatatgatgtggaacatgaggatcgcaagcggtcaaggcacggcagagagtgatgccatgaaagaagtgtttacaaagaacacaaatgatcggtgtcatttttagttatcatcactgaaaccgtctgactggattgtgttggtgccaattgcgtggtttttgccgaggaagttgtttactggttaatcttcagctaggatggtgggcgcgcctccgcaaggaccacaatgcctgttctggctacgcgctgatgaacaatgaaaatgatgctgtattttgcagaaccactgttacctgcaacagcatcagcagcagcatgtgcaacccaaaaggagccgtattccccagtagaaattttgtactggacagaggcacggttccaaaaggttcggccctaaaaattgctctgcaatgtcagtggtccagcgtagatgatgatgatcgcttctaacatagtctataaaaaatgcatactggagatttggtactagataacaagaggaccttgagtaccgagttttttccggtgaaagattgatgggcgatgccacagcctgaagacgaagaggatgtaaagaaaaaaactcgccaattaagggcttgttcggttattcctatcccatatggattggatgagattggaaaaaattgtgaaagattttgacttgtttgggattgaaacccatccaatcccacccaatccacatggattgagagcaaaacgaacaagccctaagaattgatgatgttgtagtacaaattccaggccttcggttgattttctaagagttagtttggttaattttctaagagttagtttgacagcctcgttttttcaaggaattttcatttttccaagtgaaattaatttatttttagaatttgagaatcttttattctcaagagaaattagtttatttttgttgaaaaaattaaaatcctttagaaaaatagagttgtcaaaatagccctaagccttcaaaagaatggcttgcaactgtcgaaaccatggctagtaaaatccttggaaatttcatcaccaaagaag

SEQ ID NO: 5796 - DNA, 3486 bp, Zea Mays
cactagtcaccacgagtgacgacgagtgccgtcgacgtggagcagaggagcgtggaaggcgagcatgctggcgatcgggggggtgtcgcccccaccaggccaccacgttcccttcgctcctctcatcgccttccaccaccgccttctgcaccgcgcagctgtacctgaatatcctcaagacacgggtcacgggggatcgctagtggggttattctggtcgacgaagcgctgaaggtgttcggtcaaatgacggtaaggagcgtcatcacctggaaggctggaaacaaaagacacatagtgcaacagatgggtgcggagacttctaagcccgaggtcatcaagcctgagtttaagggatttgatgctaatactgttgaagaggctgtgaaaataatagttccttatttagaggacacaagaatacaaaaccaagtcatctactttgatggatggaatggacttggtgcatctgctgtccttaactcgatcgctgaacaccctcctccgtctgttagaaacaaatttcagaatattatacacattgattgctcaagatggagaaaccggagaacagtccagagaatgatggcacagaaactaaggcttcctcaacatgtaatggctatctttgataaacatgatgaagatgatgatttagctggtatagatgaatgctctagggttgagataaaagtggtcaggaaagagatctcccgagctctacaaggacagaactccttagtagtcttccacaatgggagccatagcatggttaacttcaatgaccttggcattactctagatgctgcagatccttcatcaaatattcttcggaaggtactgtggacattccaaggaaggcttcgtgccatcaatgcacgtaaggaaatacagggaactgaggcagtggacacttcatatctgtaccttggttcaattttttctaaggaaaactctgatttatcccacagggttgaaatactgcgtgaagaagctacaaaaatagcacaatacacgaataagcttatggtcactagggaaatagctgaagtgtgttgtaagtacttgttatcattgcattccaacactaccacctctctggacttcaactgggccattcatgcatcaaattattgggtttgtgatgggattctacaagacctccagcaagaggaagcatgggaggttgccactgcgttgcatgaagagttgcaactggaggaccactcaacttatataacgcccttttccggtggtgatacaacatcttggattgtggccacaaaaggtgttgtaccaacagtacaacctgaaacgtcatcattctttttggcaattaaggaaaaaaaatcgctagtgtcattacccaagggcatgttccaaagatcagagcaacttcatgtattgaaactctgccactgcaccttcaacttttcttcacctcctttcctttgttgccgaaacataagattccttggagttgatagctgcaaggatgaaccacaagataaaccagaagaatacaaagaacaagaagaggaaggaaatttcagaccaacaatagaaggagaattctttcaaagcctatgggtgctagacgtatgccaaacagattgggaattgactttatccccaaatgcaatagagacgatggcaacaaacattagggagatacatataaagagcggaagaatatggcacaacaatctttcgtggacatgtctggggaacattcacaagcttcgactgatcaaccctacacgtccttgggagacaggtaatgaggatgaatttaaggatatggtgaagctggagcttcttgacctgtcagggaataccacaatacaatttttgccaagcttgtcaggtgcagttggcctcaaaacccttattctagatggttgtattgaattgcaacatgttatgcccaaaacactccctccaactcttgaaacatttagcttagacggaggatctaaacaaactaaaatctcatgtatctccttggctggttgtgcaagattggtcaatttcagattgtgtgggtcagtactgaaccttgaggagctggatctctctaacacatcaataaaaaaacttgacctcactgacaaagtggtgcaggtcccaggcctacagcgcatcatcttgctgggatgtgagcggctccgtgctgtcttatggccaaagcatggaatgcccaaactaatggtgctaggcattgacactcggggaggcacagaagcagttagttcgaaaacactacataactcttttttcaataaagaacgagaagaaggttgccgtgcatttattgctatctcagacatgaggttcgctgagtcattggtgctagcaagtggcaataagttttgctggaacactgatcctagatatgatctgaatatttgcctgtactctactagcaaatgtgttgaacaaaactataacaacgtgaaaatgtgccctctacagaagtgcagtgtaggtcatgatagcactagtgtgtggcagtttctttcactcgaccgccatgtagagatttggtgagggaataagcaactcgaatgtggtcaccgtacgtgggagaagggctgtaatccttttgatgaatagggtatactcgttgtttgtgcatgacaattcttccatcagcaccgttatccccgagagcatgatgtcaatagaagtagggacaagaaagtcaaagatttattggtcttgtctcaggtggtgccgtgtcgagagatgccccaacattgacactgtgtttgccactaactatgatattgtttgctttaatgaactagaggcgttttgggcagctgatctcttgatagcgcattgcatttggagcaaaggaagaacagtcaacatcaaggacactgaatcctttgcaaaactgcaggctatacatctccactcctgtcctaagcttacatttgtccttccactgtcatggttctataccctgcccagccttgagactcttcacatcgtctattgtggtgacctcagtcaggtattccctgtggaggcagagtttctgaacaaattgggtactggccatcaaagaggtgtcctggaattcccaaagctgcagcacatatattttcatgagctccccaagctgcatcagatatgtgaggccaggatgtatgctcctgagctcaagaccatcacagtgaggggatgctggagccttaagcacctcccaggcaccactgaccgcccatacgatcgccctgtcgtggactgtgaggtcggctggtgggagaaactcgagtgggatgggagggaggctagccaccacccttccttctttgacccacgctacgtcagttgactagaatattatctgcaaatctcatggaacatctgtctagctatctgcaagaatcctatgtgctactacagtttagctaacaataatatgtacggctagcaattaagtttatttttgttttctgaaaatccagtactaac

SEQ ID NO: 5797 - DNA, 4030 bp, Zea Mays
atgacggtaaggagcgtcatcacctggaaggctggaaacaaaagacacatagtgcaacagatgggtgcggagacttctaagcccgaggtcatcaagcctgagtttaaggaggaaggaagtttcacctttatcctttagctccaaccccaagcaaagcaaagaaccatcagcctttactttagtgaaagcactgaaagcagaatctaaaggcaaagctacataagaaatggcatcagaagctcgttgcacatttgcatcaagctacaacattgacagttagcaagctccttgtgttacagaactatagcttccttttgtcaaatattatgcggtgtggcactggcactggatagtggatacatagctgctctcaagataagggacatcaggcagaacggatgggttcggggtcttcaaagtcagagtttgaggactttcatgccaatgcggttgaagaggctgtgaaaaacctagctccttatttggaggacacaagggtgcgaaaccaggccatttactttgatggatgggatggacttggtgcatctgctgtccttaactcgatcgctgaacgccctccgccatctctgaggaacaaatttgatgatattattctacacattgactgttcaaggtggaaaagccggagagcactgcagaggacaattgcacagaaactagggcttcctcaacatgtcatggctgtttttgatagacaagacgaagaggacgatctagttggagtacatgaaggctcaagaactgagataagagacatcgggagagagatatatcgagtcctacaaagacagagcttcttagtggtcttccataacgggagtgataccatggttgacttcaatgactttggcatccctcgagctgctgcagatccttggtcaaacattatccggaaggtattgtggaccttccgtggaaggcttcatgccatcaaagaaacggaggaagtttcaggtcatctcaaacctgataaacgacaaccaaagggaactgagaccgtggacacttcatatctttgctttcgttcgttattttctggaggcccatcagatgtatcttcgtacaggcttcaaatactgtgtgaggaagctgcagcaatagctcaatacacgaataatcctatagtcactcaggaaatagctgaaatatgctgcaggtatttgttatcattgaattccaaggggaatggcaagctagatttcaactggagtgctcatgcctccaactattgggtttgtgatgggattctaaacgaatgccaaccagagcaagcatgggagattgccgcttctctgcacaaagagttacgactggagggctactcatctgctcgtaagttctgtcatcctggtgctgacacaacatcctgggttgtaaccatcaaatctagtgaagatattgtaccaactgtgaagccagagacaacgtctttctttttggcagtcaaaagaaaacatggccattcggttttgccattacccatgaaaatgttccaaagatccgagcaacttcatgttttgaagctctaccactgcagcttcagctttgcttcacctccattcctttgttgcctaaacctaagatttcttggacttgatagctgcacggatcatcaatcaatgaaaccgaaagaaaacaaagaagaggagtcggaggaggcaggggcagagggggaggaggagaatacagcaacaatcgaattctttcaaagcctatgggtgcttgacatatgttgcactgattgggaattgactttatccccaaatacaatagtgaaaatggcaacaaacattagggagataaacataaagaggggaagaatctggcacagcagtatttcatggagatttcttggtaacattcacaagcttcgagtgattgagcctacaagtccttgggagacaagtaataaggatgaatttatggacatggtgaagctggagcttcttgacctgtcagggaataccacaatacaatttttgccaagcttgtcaggtgcaatcagcctcagaacccttattctagatggttgtattgaattgcaacatgttgtgcctgaaacactccctccatggcttgaaacatttagctttgatggaggatataaacaagctaaaatctcatgtatctccttggctggttgtgcaagactggtcaacttcagattgtgtgggtcagtacagaaccttgaggagctggacctctcaaacacatcaatcaaaacacttgacctcagtgataaagtggtgcaggtcccatgcctagagcgcatcatcttgctgggatgtgagcggcttcgtgctgtcctgtggccaaaggatggaatgcccaatctaatggtgctaggcattgacactcggggaggcgcagaagcagctagtgcaaaaacagtacatgataactttgccatcagtaaagaacgagaagaaggttgtcgtgcatttgttgctgttatggaaatgaggttccttcagtcgttggtgctagcaagttccaataaactttgctgggacactgaccgtaagtatgatcttaacatctgcttgtcttcctctaggagtagcagcaaaggtgttggacaacacagctacaaggaggagacgatgggccctctgcagaagtcgatgatcacctccaagacttacctgacctacagcgatgtgaatattgacaaggcaggtagtgtgaggcagtttcagccactgcaccgtcatgtagagattggtgagggaataagcaactctagcatggtaaccgttcgtgaaatcagcgctgcgatccttttgataaatagggtctactcattgctcgtgcatgacaattcatccatcaggactgttatccctgaaaacataatgtctatagacacgaagaaggtctattggtcttgtctcaggtggtgctgtgtcgagagatgccccagtttggacagtgtcttcgccactaactacgatgccgtctgctttaatgctctagagaccttctgggcagctgatctcttggtggcccgatgtatctggagtaaaggaagaacaactaatgtgaaggacaccgaatccttcgctaaactgcaggctatacatctccactcctgtcctaggctggcatttgtcctcccactatcgtggttctacaccctgtccagccttgagacccttcacatcgtctattgtgataaccttggtcaggttttccccgtagaggcagagttcttaaacgaaatatctactggccatccaggaggtttgttggaattcccaaagctgaagcacatctggctacaggagctacccaagctgcagcagatatgtgaagccaagatgtttgctccggagctcaggaccatcaccttaagaggatgctggagccttaagcgcctccccgctaccgccgaccgcccaggtgatcgccctgtcgtggactgcgagaagaatttgtgggcgaagctggagtgggacgggaaggaggctggccaccacccttgtctcttcgagccacgccactccaagtaccacaagaagagagttcttagaaccacgcttctccgatgagccaaactgaccctggtaggtaagaataaatatatagcttcctgttgttttttccgtttcacgttggattgtgtatcatatgcaataccataatccataatctactgtactgccgccatggaacatcttttagctatcctgcatgctgttagagatggaactaagaacaaatacttatacacacattgttagatgtgttgtgatcggcttatggtcttcctgagctgcacaagtttgtattttccttttgtttatctcgttagttaatcatttacattatcaattatgtaagtttaatttggtgctgtgctggattgaaggcgacatatctcccagctgcttcctacggtacagtgccgactgcccgagcactcttcctttgtttttgccaaatctttgctatttttttcttacggataaatttgcgaccaggggtggtaatggatcgtgatccaaat

SEQ ID NO: 5798 - DNA, 3930 bp, Zea Mays
atgacggtaaggagcgtcatcacctggaaggctggaaacaaaagacacatagtgcaacagatgggtgcggagacttctaagcccgaggtcatcaagcctgagtttaaggaggaaggaagtttcacctttatcctttagctccaaccccaagcaaagcaaagaaccatcagcctttactttagtgaaagcactgaaagcagaatctaaaggcaaagctacataagaaatggcatcagaagctcgttgcacatttgcatcaagctacaacattgacaataagggacatcaggcagaacggatgggttcggggtcttcaaagtcagagtttgaggactttcatgccaatgcggttgaagaggctgtgaaaaacctagctccttatttggaggacacaagggtgcgaaaccaggccatttactttgatggatgggatggacttggtgcatctgctgtccttaactcgatcgctgaacgccctccgccatctctgaggaacaaatttgatgatattattctacacattgactgttcaaggtggaaaagccggagagcactgcagaggacaattgcacagaaactagggcttcctcaacatgtcatggctgtttttgatagacaagacgaagaggacgatctagttggagtacatgaaggctcaagaactgagataagagacatcgggagagagatatatcgagtcctacaaagacagagcttcttagtggtcttccataacgggagtgataccatggttgacttcaatgactttggcatccctcgagctgctgcagatccttggtcaaacattatccggaaggtattgtggaccttccgtggaaggcttcatgccatcaaagaaacggaggaagtttcaggtcatctcaaacctgataaacgacaaccaaagggaactgagaccgtggacacttcatatctttgctttcgttcgttattttctggaggcccatcagatgtatcttcgtacaggcttcaaatactgtgtgaggaagctgcagcaatagctcaatacacgaataatcctatagtcactcaggaaatagctgaaatatgctgcaggtatttgttatcattgaattccaaggggaatggcaagctagatttcaactggagtgctcatgcctccaactattgggtttgtgatgggattctaaacgaatgccaaccagagcaagcatgggagattgccgcttctctgcacaaagagttacgactggagggctactcatctgctcgtaagttctgtcatcctggtgctgacacaacatcctgggttgtaaccatcaaatctagtgaagatattgtaccaactgtgaagccagagacaacgtctttctttttggcagtcaaaagaaaacatggccattcggttttgccattacccatgaaaatgttccaaagatccgagcaacttcatgttttgaagctctaccactgcagcttcagctttgcttcacctccattcctttgttgcctaaacctaagatttcttggacttgatagctgcacggatcatcaatcaatgaaaccgaaagaaaacaaagaagaggagtcggaggaggcaggggcagagggggaggaggagaatacagcaacaatcgaattctttcaaagcctatgggtgcttgacatatgttgcactgattgggaattgactttatccccaaatacaatagtgaaaatggcaacaaacattagggagataaacataaagaggggaagaatctggcacagcagtatttcatggagatttcttggtaacattcacaagcttcgagtgattgagcctacaagtccttgggagacaagtaataaggatgaatttatggacatggtgaagctggagcttcttgacctgtcagggaataccacaatacaatttttgccaagcttgtcaggtgcaatcagcctcagaacccttattctagatggttgtattgaattgcaacatgttgtgcctgaaacactccctccatggcttgaaacatttagctttgatggaggatataaacaagctaaaatctcatgtatctccttggctggttgtgcaagactggtcaacttcagattgtgtgggtcagtacagaaccttgaggagctggacctctcaaacacatcaatcaaaacacttgacctcagtgataaagtggtgcaggtcccatgcctagagcgcatcatcttgctgggatgtgagcggcttcgtgctgtcctgtggccaaaggatggaatgcccaatctaatggtgctaggcattgacactcggggaggcgcagaagcagctagtgcaaaaacagtacatgataactttgccatcagtaaagaacgagaagaaggttgtcgtgcatttgttgctgttatggaaatgaggttccttcagtcgttggtgctagcaagttccaataaactttgctgggacactgaccgtaagtatgatcttaacatctgcttgtcttcctctaggagtagcagcaaaggtgttggacaacacagctacaaggaggagacgatgggccctctgcagaagtcgatgatcacctccaagacttacctgacctacagcgatgtgaatattgacaaggcaggtagtgtgaggcagtttcagccactgcaccgtcatgtagagattggtgagggaataagcaactctagcatggtaaccgttcgtgaaatcagcgctgcgatccttttgataaatagggtctactcattgctcgtgcatgacaattcatccatcaggactgttatccctgaaaacataatgtctatagacacgaagaaggtctattggtcttgtctcaggtggtgctgtgtcgagagatgccccagtttggacagtgtcttcgccactaactacgatgccgtctgctttaatgctctagagaccttctgggcagctgatctcttggtggcccgatgtatctggagtaaaggaagaacaactaatgtgaaggacaccgaatccttcgctaaactgcaggctatacatctccactcctgtcctaggctggcatttgtcctcccactatcgtggttctacaccctgtccagccttgagacccttcacatcgtctattgtgataaccttggtcaggttttccccgtagaggcagagttcttaaacgaaatatctactggccatccaggaggtttgttggaattcccaaagctgaagcacatctggctacaggagctacccaagctgcagcagatatgtgaagccaagatgtttgctccggagctcaggaccatcaccttaagaggatgctggagccttaagcgcctccccgctaccgccgaccgcccaggtgatcgccctgtcgtggactgcgagaagaatttgtgggcgaagctggagtgggacgggaaggaggctggccaccacccttgtctcttcgagccacgccactccaagtaccacaagaagagagttcttagaaccacgcttctccgatgagccaaactgaccctggtaggtaagaataaatatatagcttcctgttgttttttccgtttcacgttggattgtgtatcatatgcaataccataatccataatctactgtactgccgccatggaacatcttttagctatcctgcatgctgttagagatggaactaagaacaaatacttatacacacattgttagatgtgttgtgatcggcttatggtcttcctgagctgcacaagtttgtattttccttttgtttatctcgttagttaatcatttacattatcaattatgtaagtttaatttggtgctgtgctggattgaaggcgacatatctcccagctgcttcctacggtacagtgccgactgcccgagcactcttcctttgtttttgccaaatctttgctatttttttcttacggataaatttgcgaccaggggtggtaatggatcgtgatccaaat

SEQ ID NO: 5799 - DNA, 3822 bp, Zea Mays
gcggccacgatgctgtgtcctggtccagggagctcccgagaagcggcgatgcattgtcagatcagatggctcgcttgttgccgtgttgcctgcatttgggcttggcaaagcaagttcatgagaaaattggaacgggttccttctcaacaggtgaaaatgcactgttgaattcgtactgtacttgaggtgctctatgtgtggcagagaagctgtcgatgagtttagagatgcgatgcacaaataaactcatgcttcctgttcacctacaatggcattgaagtaaaaggggcagaattcacttggtttgcttggaaggagcaaaatggtcaatttcctgccaaaataacaccccactaacagcacatggacggaaatggtgctgagggaatctgttatttcatttgatggcaccaaagagaaattcaaaaaaattcaacggcatcgagagaagcgctataatgtccagggctgggccatggcatggctgttgtaagggacagtgcgtcggtgcgtgtggtgcatttgtttaaagagcaaggcacaattccagctttatcctttggctcccacaccaagcaaagcaaagaacctacgtgccttcacactgtagtgaaactgtgaaagcagcgagagcagaatttaaaggcaaagtaagaagtgacatcagaagctccctgcagatttgcatcaaactacaccatcgacagttagcaagttcctcatcctccacactagggcgtcttcgcaatatttctgctgtagcgctagcattgggtagtggacacgacatagctgctcccaagacaaaagacacatagtgcaacagatgggtgcggagacttctaagcccgaggtcatcaagcctgagtttaagggatttgatgctaatactgttgaagaggctgtgaaaataatagttccttatttagaggacacaagaatacaaaaccaagtcatctactttgatggatggaatggacttggtgcatctgctgtccttaactcgatcgctgaacaccctcctccgtctgttagaaacaaatttcagaatattatacacattgattgctcaagatggagaaaccggagaacagtccagagaatgatggcacagaaactaaggcttcctcaacatgtaatggctatctttgataaacatgatgaagatgatgatttagctggtatagatgaatgctctagggttgagataaaagtggtcaggaaagagatctcccgagctctacaaggacagaactccttagtagtcttccacaatgggagccatagcatggttaacttcaatgaccttggcattactctagatgctgcagatccttcatcaaatattcttcggaaggtactgtggacattccaaggaaggcttcgtgccatcaatgcacgtaaggaaatacagggaactgaggcagtggacacttcatatctgtaccttggttcaattttttctaaggaaaactctgatttatcccacagggttgaaatactgcgtgaagaagctacaaaaatagcacaatacacgaataagcttatggtcactagggaaatagctgaagtgtgttgtaagtacttgttatcattgcattccaacactaccacctctctggacttcaactgggccattcatgcatcaaattattgggtttgtgatgggattctacaagacctccagcaagaggaagcatgggaggttgccactgcgttgcatgaagagttgcaactggaggaccactcaacttatataacgcccttttccggtggtgatacaacatcttggattgtggccacaaaaggtgttgtaccaacagtacaacctgaaacgtcatcattctttttggcaattaaggaaaaaaaatcgctagtgtcattacccaagggcatgttccaaagatcagagcaacttcatgtattgaaactctgccactgcaccttcaacttttcttcacctcctttcctttgttgccgaaacataagattccttggagttgatagctgcaaggatgaaccacaagataaaccagaagaatacaaagaacaagaagaggaaggaaatttcagaccaacaatagaaggagaattctttcaaagcctatgggtgctagacgtatgccaaacagattgggaattgactttatccccaaatgcaatagagacgatggcaacaaacattagggagatacatataaagagcggaagaatatggcacaacaatctttcgtggacatgtctggggaacattcacaagcttcgactgatcaaccctacacgtccttgggagacaggtaatgaggatgaatttaaggatatggtgaagctggagcttcttgacctgtcagggaataccacaatacaatttttgccaagcttgtcaggtgcagttggcctcaaaacccttattctagatggttgtattgaattgcaacatgttatgcccaaaacactccctccaactcttgaaacatttagcttagacggaggatctaaacaaactaaaatctcatgtatctccttggctggttgtgcaagattggtcaatttcagattgtgtgggtcagtactgaaccttgaggagctggatctctctaacacatcaataaaaaaacttgacctcactgacaaagtggtgcaggtcccaggcctacagcgcatcatcttgctgggatgtgagcggctccgtgctgtcttatggccaaagcatggaatgcccaaactaatggtgctaggcattgacactcggggaggcacagaagcagttagttcgaaaacactacataactcttttttcaataaagaacgagaagaaggttgccgtgcatttattgctatctcagacatgaggttcgctgagtcattggtgctagcaagtggcaataagttttgctggaacactgatcctagatatgatctgaatatttgcctgtactctactagcaaatgtgttgaacaaaactataacaacgtgaaaatgtgccctctacagaagtgcagtgtaggtcatgatagcactagtgtgtggcagtttctttcactcgaccgccatgtagagatttggtggtgccgtgtcgagagatgccccaacattgacactgtgtttgccactaactatgatattgtttgctttaatgaactagaggcgttttgggcagctgatctcttgatagcgcattgcatttggagcaaaggaagaacagtcaacatcaaggacactgaatcctttgcaaaactgcaggctatacatctccactcctgtcctaagcttacatttgtccttccactgtcatggttctataccctgcccagccttgagactcttcacatcgtctattgtggtgacctcagtcaggtattccctgtggaggcagagtttctgaacaaattgggtactggccatcaaagaggtgtcctggaattcccaaagctgcagcacatatattttcatgagctccccaagctgcatcagatatgtgaggccaggatgtatgctcctgagctcaagaccatcacagtgaggggatgctggagccttaagcacctcccaggcaccactgaccgcccatacgatcgccctgtcgtggactgtgaggtcggctggtgggagaaactcgagtgggatgggagggaggctagccaccacccttccttctttgacccacgctacgtcagttgactagaatattatctgcaaatctcatggaacatctgtctagctatctgcaagaatcctatgtgctactacagtttagctaacaataatatgtacggctagcaattaagtttatttttgttttctgaaaatccagtactaac

SEQ ID NO: 5800 - DNA, 7608 bp, Zea Mays
gcggccacgatgctgtgtcctggtccagggagctcccgagaagcggcgatgcattgtcagatcagatggctcgcttgttgccgtgttgcctgcatttgggcttggcaaagcaagttcatgagaaaattggaacgggttccttctcaacaggtgaaaatgcactgttgaattcgtactgtacttgaggtgctctatgtgtggcagagaagctgtcgatgagtttagagatgcgatgcacaaataaactcatgcttcctgttcacctacaatggcattgaagtaaaaggggcagaattcacttggtttgcttggaaggagcaaaatggtcaatttcctgccaaaataacaccccactaacagcacatggacggaaatggtgctgagggaatctgttatttcatttgatggcaccaaagagaaattcaaaaaaattcaacggcatcgagagaagcgctataatgtccagggctgggccatggcatggctgttgtaagggacagtgcgtcggtgcgtgtggtgcatttgtttaaagagcaaggcacaattccagctttatcctttggctcccacaccaagcaaagcaaagaacctacgtgccttcacactgtagtgaaactgtgaaagcagcgagagcagaatttaaaggcaaagtaagaagtgacatcagaagctccctgcagatttgcatcaaactacaccatcgacagttagcaagttcctcatcctccacactagggcgtcttcgcaatatttctgctgtagcgctagcattgggtagtggacacgacatagctgctcccaagacaaaagacacatagtgcaacagatgggtgcggagacttctaagcccgaggtcatcaagcctgagtttaagggatttgatgctaatactgttgaagaggctgtgaaaataatagttccttatttagaggacacaagaatacaaaaccaagtcatctactttgatggatggaatggacttggtgcatctgctgtccttaactcgatcgctgaacaccctcctccgtctgttagaaacaaatttcagaatattatacacattgattgctcaagatggagaaaccggagaacagtccagagaatgatggcacagaaactaaggcttcctcaacatgtaatggctatctttgataaacatgatgaagatgatgatttagctggtatagatgaatgctctagggttgagataaaagtggtcaggaaagagatctcccgagctctacaaggacagaactccttagtagtcttccacaatgggagccatagcatggttaacttcaatgaccttggcattactctagatgctgcagatccttcatcaaatattcttcggaaggtactgtggacattccaaggaaggcttcgtgccatcaatgcacgtaaggaaatacagggaactgaggcagtggacacttcatatctgtaccttggttcaattttttctaaggaaaactctgatttatcccacagggttgaaatactgcgtgaagaagctacaaaaatagcacaatacacgaataagcttatggtcactagggaaatagctgaagtgtgttgtaagtacttgttatcattgcattccaacactaccacctctctggacttcaactgggccattcatgcatcaaattattgggtttgtgatgggattctacaagacctccagcaagaggaagcatgggaggttgccactgcgttgcatgaagagttgcaactggaggaccactcaacttatataacgcccttttccggtggtgatacaacatcttggattgtggccacaaaaggtgttgtaccaacagtacaacctgaaacgtcatcattctttttggcaattaaggaaaaaaaatcgctagtgtcattacccaagggcatgttccaaagatcagagcaacttcatgtattgaaactctgccactgcaccttcaacttttcttcacctcctttcctttgttgccgaaacataagattccttggagttgatagctgcaaggatgaaccacaagataaaccagaagaatacaaagaacaagaagaggaaggaaatttcagaccaacaatagaaggagaattctttcaaagcctatgggtgctagacgtatgccaaacagattgggaattgactttatccccaaatgcaatagagacgatggcaacaaacattagggagatacatataaagagcggaagaatatggcacaacaatctttcgtggacatgtctggggaacattcacaagcttcgactgatcaaccctacacgtccttgggagacaggtaatgaggatgaatttaaggatatggtgaagctggagcttcttgacctgtcagggaataccacaatacaatttttgccaagcttgtcaggtgcagttggcctcaaaacccttattctagatggttgtattgaattgcaacatgttatgcccaaaacactccctccaactcttgaaacatttagcttagacggaggatctaaacaaactaaaatctcatgtatctccttggctggttgtgcaagattggtcaatttcagattgtgtgggtcagtactgaaccttgaggagctggatctctctaacacatcaataaaaaaacttgacctcactgacaaagtggtgcaggtcccaggcctacagcgcatcatcttgctgggatgtgagcggctccgtgctgtcttatggccaaagcatggaatgcccaaactaatggtgctaggcattgacactcggggaggcacagaagcagttagttcgaaaacactacataactcttttttcaataaagaacgagaagaaggttgccgtgcatttattgctatctcagacatgaggttcgctgagtcattggtgctagcaagtggcaataagttttgctggaacactgatcctagatatgatctgaatatttgcctgtactctactagcaaatgtgttgaacaaaactataacaacgtgaaaatgtgccctctacagaagtgcagtgtaggtcatgatagcactagtgtgtggcagtttctttcactcgaccgccatgtagagatttggtggtgccgtgtcgagagatgccccaacattgacactgtgtttgccactaactatgatattgtttgctttaatgaactagaggcgttttgggcagctgatctcttgatagcgcattgcatttggagcaaaggaagaacagtcaacatcaaggacactgaatcctttgcaaaactgcaggctatacatctccactcctgtcctaagcttacatttgtccttccactgtcatggttctataccctgcccagccttgagactcttcacatcgtctattgtggtgacctcagtcaggtattccctgtggaggcagagtttctgaacaaattgggtactggccatcaaagaggtgtcctggaattcccaaagctgcagcacatatattttcatgagctccccaagctgcatcagatatgtgaggccaggatgtatgctcctgagctcaagaccatcacagtgaggggatgctggagccttaagcacctcccaggcaccactgaccgcccatacgatcgccctgtcgtggactgtgaggtcggctggtgggagaaactcgagtgggatgggagggaggctagccaccacccttccttctttgacccacgctacgtcagttgactaggaggaaggaagtttcacctttatcctttagctccaaccccaagcaaagcaaagaaccatcagcctttactttagtgaaagcactgaaagcagaatctaaaggcaaagctacataagaaatggcatcagaagctcgttgcacatttgcatcaagctacaacattgacagttagcaagctccttgtgttacagaactatagcttccttttgtcaaatattatgcggtgtggcactggcactggatagtggatacatagctgctctcaagataagggacatcaggcagaacggatgggttcggggtcttcaaagtcagagtttgaggactttcatgccaatgcggttgaagaggctgtgaaaaacctagctccttatttggaggacacaagggtgcgaaaccaggccatttactttgatggatgggatggacttggtgcatctgctgtccttaactcgatcgctgaacgccctccgccatctctgaggaacaaatttgatgatattattctacacattgactgttcaaggtggaaaagccggagagcactgcagaggacaattgcacagaaactagggcttcctcaacatgtcatggctgtttttgatagacaagacgaagaggacgatctagttggagtacatgaaggctcaagaactgagataagagacatcgggagagagatatatcgagtcctacaaagacagagcttcttagtggtcttccataacgggagtgataccatggttgacttcaatgactttggcatccctcgagctgctgcagatccttggtcaaacattatccggaaggtattgtggaccttccgtggaaggcttcatgccatcaaagaaacggaggaagtttcaggtcatctcaaacctgataaacgacaaccaaagggaactgagaccgtggacacttcatatctttgctttcgttcgttattttctggaggcccatcagatgtatcttcgtacaggcttcaaatactgtgtgaggaagctgcagcaatagctcaatacacgaataatcctatagtcactcaggaaatagctgaaatatgctgcaggtatttgttatcattgaattccaaggggaatggcaagctagatttcaactggagtgctcatgcctccaactattgggtttgtgatgggattctaaacgaatgccaaccagagcaagcatgggagattgccgcttctctgcacaaagagttacgactggagggctactcatctgctcgtaagttctgtcatcctggtgctgacacaacatcctgggttgtaaccatcaaatctagtgaagatattgtaccaactgtgaagccagagacaacgtctttctttttggcagtcaaaagaaaacatggccattcggttttgccattacccatgaaaatgttccaaagatccgagcaacttcatgttttgaagctctaccactgcagcttcagctttgcttcacctccattcctttgttgcctaaacctaagatttcttggacttgatagctgcacggatcatcaatcaatgaaaccgaaagaaaacaaagaagaggagtcggaggaggcaggggcagagggggaggaggagaatacagcaacaatcgaattctttcaaagcctatgggtgcttgacatatgttgcactgattgggaattgactttatccccaaatacaatagtgaaaatggcaacaaacattagggagataaacataaagaggggaagaatctggcacagcagtatttcatggagatttcttggtaacattcacaagcttcgagtgattgagcctacaagtccttgggagacaagtaataaggatgaatttatggacatggtgaagctggagcttcttgacctgtcagggaataccacaatacaatttttgccaagcttgtcaggtgcaatcagcctcagaacccttattctagatggttgtattgaattgcaacatgttgtgcctgaaacactccctccatggcttgaaacatttagctttgatggaggatataaacaagctaaaatctcatgtatctccttggctggttgtgcaagactggtcaacttcagattgtgtgggtcagtacagaaccttgaggagctggacctctcaaacacatcaatcaaaacacttgacctcagtgataaagtggtgcaggtcccatgcctagagcgcatcatcttgctgggatgtgagcggcttcgtgctgtcctgtggccaaaggatggaatgcccaatctaatggtgctaggcattgacactcggggaggcgcagaagcagctagtgcaaaaacagtacatgataactttgccatcagtaaagaacgagaagaaggttgtcgtgcatttgttgctgttatggaaatgaggttccttcagtcgttggtgctagcaagttccaataaactttgctgggacactgaccgtaagtatgatcttaacatctgcttgtcttcctctaggagtagcagcaaaggtgttggacaacacagctacaaggaggagacgatgggccctctgcagaagtcgatgatcacctccaagacttacctgacctacagcgatgtgaatattgacaaggcaggtagtgtgaggcagtttcagccactgcaccgtcatgtagagattggtgagggaataagcaactctagcatggtaaccgttcgtgaaatcagcgctgcgatccttttgataaatagggtctactcattgctcgtgcatgacaattcatccatcaggactgttatccctgaaaacataatgtctatagacacgaagaaggtctattggtcttgtctcaggtggtgctgtgtcgagagatgccccagtttggacagtgtcttcgccactaactacgatgccgtctgctttaatgctctagagaccttctgggcagctgatctcttggtggcccgatgtatctggagtaaaggaagaacaactaatgtgaaggacaccgaatccttcgctaaactgcaggctatacatctccactcctgtcctaggctggcatttgtcctcccactatcgtggttctacaccctgtccagccttgagacccttcacatcgtctattgtgataaccttggtcaggttttccccgtagaggcagagttcttaaacgaaatatctactggccatccaggaggtttgttggaattcccaaagctgaagcacatctggctacaggagctacccaagctgcagcagatatgtgaagccaagatgtttgctccggagctcaggaccatcaccttaagaggatgctggagccttaagcgcctccccgctaccgccgaccgcccaggtgatcgccctgtcgtggactgcgagaagaatttgtgggcgaagctggagtgggacgggaaggaggctggccaccacccttgtctcttcgagccacgccactccaagtaccacaagaagagagttcttagaaccacgcttctccgatgagccaaactgaccctggtaggtaagaataaatatatagcttcctgttgttttttccgtttcacgttggattgtgtatcatatgcaataccataatccataatctactgtactgccgccatggaacatcttttagctatcctgcatgctgttagagatggaactaagaacaaatacttatacacacattgttagatgtgttgtgatcggcttatggtcttcctgagctgcacaagtttgtattttccttttgtttatctcgttagttaatcatttacattatcaattatgtaagtttaatttggtgctgtgctggattgaaggcgacatatctcccagctgcttcctacggtacagtgccgactgcccgagcactcttcctttgtttttgccaaatctttgctatttttttcttacggataaatttgcgaccaggggtggtaatggatcgtgatccaaat

SEQ ID NO: 5801 - DNA, 4288 bp, Zea Mays
cttccccaaaacacgaccgtccgtaccagccgccacccccgcccgtatccgccgccaccttcgcgtcctcctcctccgccgtgccttgctgccgtgcctgcgtcccggcgagccgctcagccgcggagcgtcgacctcgccgtatgcagagaccgaggcgctgccggcctgccgcgcctagcccgcgagcagcgagccaccgttcgccgaggcaccgacgtcgaggggagggagctgggagcgcttgcgccgttctcgagccgctgcgccctgaccagctgccgcacaggcgccgccgcagggagactgcggtcaacaagttaggaagctgcagcgctgctcggacgcgtcttcccagcagcaaaggaggaaggaagtttcacctttatcctttagctccaaccccaagcaaagcaaagaaccatcagcctttactttagtgaaagcactgaaagcagaatctaaaggcaaagctacataagaaatggcatcagaagctcgttgcacatttgcatcaagctacaacattgacagttagcaagctccttgtgttacagaactatagcttccttttgtcaaatattatgcggtgtggcactggcactggatagtggatacatagctgctctcaagataagggacatcaggcagaacggatgggttcggggtcttcaaagtcagagtttgaggactttcatgccaatgcggttgaagaggctgtgaaaaacctagctccttatttggaggacacaagggtgcgaaaccaggccatttactttgatggatgggatggacttggtgcatctgctgtccttaactcgatcgctgaacgccctccgccatctctgaggaacaaatttgatgatattattctacacattgactgttcaaggtggaaaagccggagagcactgcagaggacaattgcacagaaactagggcttcctcaacatgtcatggctgtttttgatagacaagacgaagaggacgatctagttggagtacatgaaggctcaagaactgagataagagacatcgggagagagatatatcgagtcctacaaagacagagcttcttagtggtcttccataacgggagtgataccatggttgacttcaatgactttggcatccctcgagctgctgcagatccttggtcaaacattatccggaaggtattgtggaccttccgtggaaggcttcatgccatcaaagaaacggaggaagtttcaggtcatctcaaacctgataaacgacaaccaaagggaactgagaccgtggacacttcatatctttgctttcgttcgttattttctggaggcccatcagatgtatcttcgtacaggcttcaaatactgtgtgaggaagctgcagcaatagctcaatacacgaataatcctatagtcactcaggaaatagctgaaatatgctgcaggtatttgttatcattgaattccaaggggaatggcaagctagatttcaactggagtgctcatgcctccaactattgggtttgtgatgggattctaaacgaatgccaaccagagcaagcatgggagattgccgcttctctgcacaaagagttacgactggagggctactcatctgctcgtaagttctgtcatcctggtgctgacacaacatcctgggttgtaaccatcaaatctagtgaagatattgtaccaactgtgaagccagagacaacgtctttctttttggcagtcaaaagaaaacatggccattcggttttgccattacccatgaaaatgttccaaagatccgagcaacttcatgttttgaagctctaccactgcagcttcagctttgcttcacctccattcctttgttgcctaaacctaagatttcttggacttgatagctgcacggatcatcaatcaatgaaaccgaaagaaaacaaagaagaggagtcggaggaggcaggggcagagggggaggaggagaatacagcaacaatcgaattctttcaaagcctatgggtgcttgacatatgttgcactgattgggaattgactttatccccaaatacaatagtgaaaatggcaacaaacattagggagataaacataaagaggggaagaatctggcacagcagtatttcatggagatttcttggtaacattcacaagcttcgagtgattgagcctacaagtccttgggagacaagtaataaggatgaatttatggacatggtgaagctggagcttcttgacctgtcagggaataccacaatacaatttttgccaagcttgtcaggtgcaatcagcctcagaacccttattctagatggttgtattgaattgcaacatgttgtgcctgaaacactccctccatggcttgaaacatttagctttgatggaggatataaacaagctaaaatctcatgtatctccttggctggttgtgcaagactggtcaacttcagattgtgtgggtcagtacagaaccttgaggagctggacctctcaaacacatcaatcaaaacacttgacctcagtgataaagtggtgcaggtcccatgcctagagcgcatcatcttgctgggatgtgagcggcttcgtgctgtcctgtggccaaaggatggaatgcccaatctaatggtgctaggcattgacactcggggaggcgcagaagcagctagtgcaaaaacagtacatgataactttgccatcagtaaagaacgagaagaaggttgtcgtgcatttgttgctgttatggaaatgaggttccttcagtcgttggtgctagcaagttccaataaactttgctgggacactgaccgtaagtatgatcttaacatctgcttgtcttcctctaggagtagcagcaaaggtgttggacaacacagctacaaggaggagacgatgggccctctgcagaagtcgatgatcacctccaagacttacctgacctacagcgatgtgaatattgacaaggcaggtagtgtgaggcagtttcagccactgcaccgtcatgtagagattggtgagggaataagcaactctagcatggtaaccgttcgtgaaatcagcgctgcgatccttttgataaatagggtctactcattgctcgtgcatgacaattcatccatcaggactgttatccctgaaaacataatgtctatagacacgaagaaggtctattggtcttgtctcaggtggtgctgtgtcgagagatgccccagtttggacagtgtcttcgccactaactacgatgccgtctgctttaatgctctagagaccttctgggcagctgatctcttggtggcccgatgtatctggagtaaaggaagaacaactaatgtgaaggacaccgaatccttcgctaaactgcaggctatacatctccactcctgtcctaggctggcatttgtcctcccactatcgtggttctacaccctgtccagccttgagacccttcacatcgtctattgtgataaccttggtcaggttttccccgtagaggcagagttcttaaacgaaatatctactggccatccaggaggtttgttggaattcccaaagctgaagcacatctggctacaggagctacccaagctgcagcagatatgtgaagccaagatgtttgctccggagctcaggaccatcaccttaagaggatgctggagccttaagcgcctccccgctaccgccgaccgcccaggtgatcgccctgtcgtggactgcgagaagaatttgtgggcgaagctggagtgggacgggaaggaggctggccaccacccttgtctcttcgagccacgccactccaagtaccacaagaagagagttcttagaaccacgcttctccgatgagccaaactgaccctggtaggtaagaataaatatatagcttcctgttgttttttccgtttcacgttggattgtgtatcatatgcaataccataatccataatctactgtactgccgccatggaacatcttttagctatcctgcatgctgttagagatggaactaagaacaaatacttatacacacattgttagatgtgttgtgatcggcttatggtcttcctgagctgcacaagtttgtattttccttttgtttatctcgttagttaatcatttacattatcaattatgtaagtttaatttggtgctgtgctggattgaaggcgacatatctcccagctgcttcctacggtacagtgccgactgcccgagcactcttcctttgtttttgccaaatctttgctatttttttcttacggataaatttgcgaccaggggtggtaatggatcgtgatccaaat

SEQ ID NO: 5802 - DNA, 4168 bp, Zea Mays
ccgtaccagccgccacccccgcccgtatccgccgccaccttcgcgtcctcctcctccgccgtgccttgctgccgtgcctgcgtcccggcgagccgctcagccgcggagcgtcgacctcgccgtatgcagagaccgaggcgctgccggcctgccgcgcctagcccgcgagcagcgagccaccgttcgccgaggcaccgacgtcgaggggagggagctgggagcgcttgcgccgttctcgagccgctgcgccctgaccagctgccgcacaggcgccgccgcagggagactgcggtcaacaagttaggaagctgcagcgctgctcggacgcgtcttcccagcagcaaaggaggaaggaagtttcacctttatcctttagctccaaccccaagcaaagcaaagaaccatcagcctttactttagtgaaagcactgaaagcagaatctaaaggcaaagctacataagaaatggcatcagaagctcgttgcacatttgcatcaagctacaacattgacaataagggacatcaggcagaacggatgggttcggggtcttcaaagtcagagtttgaggactttcatgccaatgcggttgaagaggctgtgaaaaacctagctccttatttggaggacacaagggtgcgaaaccaggccatttactttgatggatgggatggacttggtgcatctgctgtccttaactcgatcgctgaacgccctccgccatctctgaggaacaaatttgatgatattattctacacattgactgttcaaggtggaaaagccggagagcactgcagaggacaattgcacagaaactagggcttcctcaacatgtcatggctgtttttgatagacaagacgaagaggacgatctagttggagtacatgaaggctcaagaactgagataagagacatcgggagagagatatatcgagtcctacaaagacagagcttcttagtggtcttccataacgggagtgataccatggttgacttcaatgactttggcatccctcgagctgctgcagatccttggtcaaacattatccggaaggtattgtggaccttccgtggaaggcttcatgccatcaaagaaacggaggaagtttcaggtcatctcaaacctgataaacgacaaccaaagggaactgagaccgtggacacttcatatctttgctttcgttcgttattttctggaggcccatcagatgtatcttcgtacaggcttcaaatactgtgtgaggaagctgcagcaatagctcaatacacgaataatcctatagtcactcaggaaatagctgaaatatgctgcaggtatttgttatcattgaattccaaggggaatggcaagctagatttcaactggagtgctcatgcctccaactattgggtttgtgatgggattctaaacgaatgccaaccagagcaagcatgggagattgccgcttctctgcacaaagagttacgactggagggctactcatctgctcgtaagttctgtcatcctggtgctgacacaacatcctgggttgtaaccatcaaatctagtgaagatattgtaccaactgtgaagccagagacaacgtctttctttttggcagtcaaaagaaaacatggccattcggttttgccattacccatgaaaatgttccaaagatccgagcaacttcatgttttgaagctctaccactgcagcttcagctttgcttcacctccattcctttgttgcctaaacctaagatttcttggacttgatagctgcacggatcatcaatcaatgaaaccgaaagaaaacaaagaagaggagtcggaggaggcaggggcagagggggaggaggagaatacagcaacaatcgaattctttcaaagcctatgggtgcttgacatatgttgcactgattgggaattgactttatccccaaatacaatagtgaaaatggcaacaaacattagggagataaacataaagaggggaagaatctggcacagcagtatttcatggagatttcttggtaacattcacaagcttcgagtgattgagcctacaagtccttgggagacaagtaataaggatgaatttatggacatggtgaagctggagcttcttgacctgtcagggaataccacaatacaatttttgccaagcttgtcaggtgcaatcagcctcagaacccttattctagatggttgtattgaattgcaacatgttgtgcctgaaacactccctccatggcttgaaacatttagctttgatggaggatataaacaagctaaaatctcatgtatctccttggctggttgtgcaagactggtcaacttcagattgtgtgggtcagtacagaaccttgaggagctggacctctcaaacacatcaatcaaaacacttgacctcagtgataaagtggtgcaggtcccatgcctagagcgcatcatcttgctgggatgtgagcggcttcgtgctgtcctgtggccaaaggatggaatgcccaatctaatggtgctaggcattgacactcggggaggcgcagaagcagctagtgcaaaaacagtacatgataactttgccatcagtaaagaacgagaagaaggttgtcgtgcatttgttgctgttatggaaatgaggttccttcagtcgttggtgctagcaagttccaataaactttgctgggacactgaccgtaagtatgatcttaacatctgcttgtcttcctctaggagtagcagcaaaggtgttggacaacacagctacaaggaggagacgatgggccctctgcagaagtcgatgatcacctccaagacttacctgacctacagcgatgtgaatattgacaaggcaggtagtgtgaggcagtttcagccactgcaccgtcatgtagagattggtgagggaataagcaactctagcatggtaaccgttcgtgaaatcagcgctgcgatccttttgataaatagggtctactcattgctcgtgcatgacaattcatccatcaggactgttatccctgaaaacataatgtctatagacacgaagaaggtctattggtcttgtctcaggtggtgctgtgtcgagagatgccccagtttggacagtgtcttcgccactaactacgatgccgtctgctttaatgctctagagaccttctgggcagctgatctcttggtggcccgatgtatctggagtaaaggaagaacaactaatgtgaaggacaccgaatccttcgctaaactgcaggctatacatctccactcctgtcctaggctggcatttgtcctcccactatcgtggttctacaccctgtccagccttgagacccttcacatcgtctattgtgataaccttggtcaggttttccccgtagaggcagagttcttaaacgaaatatctactggccatccaggaggtttgttggaattcccaaagctgaagcacatctggctacaggagctacccaagctgcagcagatatgtgaagccaagatgtttgctccggagctcaggaccatcaccttaagaggatgctggagccttaagcgcctccccgctaccgccgaccgcccaggtgatcgccctgtcgtggactgcgagaagaatttgtgggcgaagctggagtgggacgggaaggaggctggccaccacccttgtctcttcgagccacgccactccaagtaccacaagaagagagttcttagaaccacgcttctccgatgagccaaactgaccctggtaggtaagaataaatatatagcttcctgttgttttttccgtttcacgttggattgtgtatcatatgcaataccataatccataatctactgtactgccgccatggaacatcttttagctatcctgcatgctgttagagatggaactaagaacaaatacttatacacacattgttagatgtgttgtgatcggcttatggtcttcctgagctgcacaagtttgtattttccttttgtttatctcgttagttaatcatttacattatcaattatgtaagtttaatttggtgctgtgctggattgaaggcgacatatctcccagctgcttcctacggtacagtgccgactgcccgagcactcttcctttgtttttgccaaatctttgctatttttttcttacggataaatttgcgaccaggggtggtaatggatcgtgatccaaat

SEQ ID NO: 5803 - DNA, 1237 bp, Zea Mays
gggacgagcatgggaagttattcggggattttcccgttaccatcgtgtggaaatcaaggtgccttgtttggacgggctgggtccgcagccgcagtcattgcagatttgcaggccgaatgcgagagccgggccgagaaaccttcccctacggcagtggaccggtgcttctctcgcattcggcctccccttcccaccctcaacagcgaagagcacacatggataccgccgtcttctcccccgccgatctcttccacggagtcgacgacagcgacgacgaccgagatgagatgcaaatctgctccgatggggagaagccggtggcgttggagtatcaggagagagtccacgacttccctgacatgaaactgagtgtaagggagttctcatgtcatgagcttaacgccaacctgttgtggccggggacattttcatttgctacttggctggttaagaaccggtcaattttggatggacgacgagtcctggaattaggaagtgggacaggagcgcttgcgatctttcttaggaaggcatttgaggtgaacattacaacctctgattatgatgacggcgaaattgaaaagaatatatcttacaattgcagagcgaatgccttagatgtgttacctcatattagacacacgtggggagatccatttccagtttgcacaccaaattgggacattgtcattgcaagtgatatcctactctatgtcaaacagtatgacaacttggtcaagacagtgtcctttcttttgaatgagtacaagcagaaggatcacaaatctggctgcataaccatcactgacaaatcagggacacaaatatctgcaaaaccaccggtgtttctaatgagctggcgcagaagaatcggcaagggtcatcaatcactcttcttcgacgggtgtgagaagacgggcctgcaagtgcagcacctgggtgatcttgtgtaccttattagcaataaacaagaggcggattttgtggaaacgaagtcagacggtggcagtagtgaggggatgattttttgagtaggttttgttaagtcatattttgttcaatttcccccaaacacttgattttttgtttctctgattctatttgggatattctgtttgattctgttgcaagattgtttatgcactgaggtggtttataatggcttaagcatgcagcccagcgaggtgatctatgcaggcttaagcgtgctgctctcagtatctgcttttggctttct

SEQ ID NO: 5804 - DNA, 2070 bp, Zea Mays
caaggtgccttgtttggacgggctgggtccgcagccgcagtcattgcagatttgcaggccgaatgcgagagccgggccgagaaaccttcccctacggcagtggaccggtgcttctctcgcattcggcctccccttcccaccctcaacagcgaagagcacacatggataccgccgtcttctcccccgccgatctcttccacggagtcgacgacagcgacgacgaccgagatgagatgcaaatctgctccgatggggagaagccggtggcgttggagtatcaggagagagtccacgacttccctgacatggtatgacttccacgattcggccgtcttggctcgcatatgtaggaacggtgctcctctggaatccggaaaggcccgggtcttgaagcacagtattatctaggtttcttgccttctcgggtttcagtttggattttcctaatattagagaatggatgaacaagtaatacctagatgggcagaaacgagtaaagaatattttggtatttcgacgtgctgtgttctttttccactgaggcacttacattatgttatgcaaaacgcagcagctatggttcagtttagtaatcctccaattgttaaactacggacagcttagcttccccatgaagtatgttgcgccaaactctgcaaagtataataatgaataagaaacagagtggttgttaattcagtacgaagcatacttactatcatgatcctgtaatgggcagaggaagatttttatatcgttaaatatttgggctggactaattgatgttcatatttggttaggggcttagcatacttttcaaaagtatatgtatctggctatctgttgcttgctcaatatgctgctacattcttggatgcacttgaattttagcctacgttagagttcatggtgctgtgtcagtaaatccacatgcttaaattaaaatggagtggctatttcagttctactatatcaaaggttgcttggcttataactattgttcaacaaaagtgatgtgagtttattgatttcattttcattatggtcatttcttattgcattattatatttttctcaatctaggttgagccattacgcagtgaaagctgctgacttgtgaccacaaggtcctgtgtctgagttgtggaagcctcttgcaaatgcagggaaaggccgtgtactatagacctaatagaaactgagtgtaagggagttctcatgtcatgagcttaacgccaacctgttgtggccggggacattttcatttgctacttggctggttaagaaccggtcaattttggatggacgacgagtcctggaattaggaagtgggacaggagcgcttgcgatctttcttaggaaggcatttgaggtgaacattacaacctctgattatgatgacggcgaaattgaaaagaatatatcttacaattgcagagcgaatgccttagatgtgttacctcatattagacacacgtggggagatccatttccagtttgcacaccaaattgggacattgtcattgcaagtgatatcctactctatgtcaaacagtatgacaacttggtcaagacagtgtcctttcttttgaatgagtacaagcagaaggatcacaaatctggctgcataaccatcactgacaaatcagggacacaaatatctgcaaaaccaccggtgtttctaatgagctggcgcagaagaatcggcaagggtcatcaatcactcttcttcgacgggtgtgagaagacgggcctgcaagtgcagcacctgggtgatcttgtgtaccttattagcaataaacaagaggcggattttgtggaaacgaagtcagacggtggcagtagtgaggggatgattttttgagtaggttttgttaagtcatattttgttcaatttcccccaaacacttgattttttgtttctctgattctatttgggatattctgtttgattctgttgcaagattgtttatgcactgaggtggtttataatggcttaagcatgcagcccagcgaggtgatctatgcaggcttaagcgtgctgctctcagtatctgcttttggctttct

SEQ ID NO: 5805 - DNA, 2427 bp, Zea Mays
tccgcagccgcagtcattgcagatttgcaggccgaatgcgagagccgggccgagaaaccttcccctacggcagtggaccggtgcttctctcgcattcggcctccccttcccaccctcaacagcgaagagcacacatggataccgccgtcttctcccccgccgatctcttccacggagtcgacgacagcgacgacgaccgagatgagatgcaaatctgctccgatggggagaagccggtggcgttggagtatcaggagagagtccacgacttccctgacatggtatgacttccacgattcggccgtcttggctcgcatatgtaggaacggtgctcctctggaatccggaaaggcccgggtcttgaagcacagtattatctaggtttcttgccttctcgggtttcagtttggattttcctaatattagagaatggatgaacaagtaatacctagatgggcagaaacgagtaaagaatattttggtatttcgacgtgctgtgttctttttccactgaggcacttacattatgttatgcaaaacgcagcagctatggttcagtttagtaatcctccaattgttaaactacggacagcttagcttccccatgaagtatgttgcgccaaactctgcaaagtataataatgaataagaaacagagtggttgttaattcagtacgaagcatacttactatcatgatcctgtaatgggcagaggaagatttttatatcgttaaatatttgggctggactaattgatgttcatatttggttaggggcttagcatacttttcaaaagtatatgtatctggctatctgttgcttgctcaatatgctgctacattcttggatgcacttgaattttagcctacgttagagttcatggtgctgtgtcagtaaatccacatgcttaaattaaaatggagtggctatttcagttctactatatcaaaggttgcttggcttataactattgttcaacaaaagtgatgtgagtttattgatttcattttcattatggtcatttcttattgcattattatatttttctcaatctaggttgagccattacgcagtgaaagctgctgacttgtgaccacaaggtcctgtgtctgagttgtggaagcctcttgcaaatgcagggaaaggccgtgtactatagacctaataggtctgaccctttcctggaccccacacaagtggggctgccctaagttgtgttttttctttaatatctatctttttgttcaccattcaaaaatcgacatacagaaactgagtgtaagggagttctcatgtcatgagcttaacgccaacctgttgtggccggggacattttcatttgctacttggctggttaagaaccggtcaattttggatggacgacgagtcctggaattaggaaggtatggatgttatgctctaactctaatgacatggaagaattttttgtctttcttttctaaccaattcagttcgaatggtcactttatatctgactaaaagttttacaattactcttgttatttccctgtcgggctcagtaagtaactcaaaatatggaccatccttctcttggatttttcttctttgctactagcattgacttgaggcatcttttgtgtttttttgtcattctatcaagactttatccaatgtagtcacaagaacatgatgtgtattctacaacttaaatgtttattcctttttgtttattcatgtttttctgcatacatagtgggacaggagcgcttgcgatctttcttaggaaggcatttgaggtgaacattacaacctctgattatgatgacggcgaaattgaaaagaatatatcttacaattgcagagcgaatgccttagatgtgttacctcatattagacacacgtggggagatccatttccagtttgcacaccaaattgggacattgtcattgcaagtgatatcctactctatgtcaaacagtatgacaacttggtcaagacagtgtcctttcttttgaatgagtacaagcagaaggatcacaaatctggctgcataaccatcactgacaaatcagaagaatcggcaagggtcatcaatcactcttcttcgacgggtgtgagaagacgggcctgcaagtgcagcacctgggtgatcttgtgtaccttattagcaataaacaagaggcggattttgtggaaacgaagtcagacggtggcagtagtgaggggatgattttttgagtaggttttgttaagtcatattttgttcaatttcccccaaacacttgattttttgtttctctgattctatttgggatattctgtttgattctgttgcaagattgtttatgcactgaggtggtttataatggcttaagcatgcagcccagcgaggtgatctatgcaggcttaagcgtgctgctctcagtatctgcttttggctttct

SEQ ID NO: 5806 - DNA, 1533 bp, Zea Mays
ggccgaatgcgagagccgggccgagaaaccttcccctacggcagtggaccggtgcttctctcgcattcggcctccccttcccaccctcaacagcgaagagcacacatggataccgccgtcttctcccccgccgatctcttccacggagtcgacgacagcgacgacgaccgagatgagatgcaaatctgctccgatggggagaagccggtggcgttggagtatcaggagagagtccacgacttccctgacatgaaactgagtgtaagggagttctcatgtcatgagcttaacgccaacctgttgtggccggggacattttcatttgctacttggctggttaagaaccggtcaattttggatggacgacgagtcctggaattaggaaggtatggatgttatgctctaactctaatgacatggaagaattttttgtctttcttttctaaccaattcagttcgaatggtcactttatatctgactaaaagttttacaattactcttgttatttccctgtcgggctcagtaagtaactcaaaatatggaccatccttctcttggatttttcttctttgctactagcattgacttgaggcatcttttgtgtttttttgtcattctatcaagactttatccaatgtagtcacaagaacatgatgtgtattctacaacttaaatgtttattcctttttgtttattcatgtttttctgcatacatagtgggacaggagcgcttgcgatctttcttaggaaggcatttgaggtgaacattacaacctctgattatgatgacggcgaaattgaaaagaatatatcttacaattgcagagcgaatgccttagatgtgttacctcatattagacacacgtggggagatccatttccagtttgcacaccaaattgggacattgtcattgcaagtgatatcctactctatgtcaaacagtatgacaacttggtcaagacagtgtcctttcttttgaatgagtacaagcagaaggatcacaaatctggctgcataaccatcactgacaaatcaggtactttctaaaccaatttgatcttgtaaatcattagaggatgctgtgcgaaatgtttctttttcacttggcagggacacaaatatctgcaaaaccaccggtgtttctaatgagctggcgcagaagaatcggcaagggtcatcaatcactcttcttcgacgggtgtgagaagacgggcctgcaagtgcagcacctgggtgatcttgtgtaccttattagcaataaacaagaggcggattttgtggaaacgaagtcagacggtggcagtagtgaggggatgattttttgagtaggttttgttaagtcatattttgttcaatttcccccaaacacttgattttttgtttctctgattctatttgggatattctgtttgattctgttgcaagattgtttatgcactgaggtggtttataatggcttaagcatgcagcccagcgaggtgatctatgcaggcttaagcgtgctgctctcagtatctgcttttggctttct

SEQ ID NO: 5807 - DNA, 1711 bp, Zea Mays
ctacggcagtggaccggtgcttctctcgcattcggcctccccttcccaccctcaacagcgaagagcacacatggataccgccgtcttctcccccgccgatctcttccacggagtcgacgacagcgacgacgaccgagatgagatgcaaatctgctccgatggggagaagccggtggcgttggagtatcaggagagagtccacgacttccctgacatggttgagccattacgcagtgaaagctgctgacttgtgaccacaaggtcctgtgtctgagttgtggaagcctcttgcaaatgcagggaaaggccgtgtactatagacctaataggtctgaccctttcctggaccccacacaagtggggctgccctaagttgtgttttttctttaatatctatctttttgttcaccattcaaaaatcgacatacagaaactgagtgtaagggagttctcatgtcatgagcttaacgccaacctgttgtggccggggacattttcatttgctacttggctggttaagaaccggtcaattttggatggacgacgagtcctggaattaggaaggtatggatgttatgctctaactctaatgacatggaagaattttttgtctttcttttctaaccaattcagttcgaatggtcactttatatctgactaaaagttttacaattactcttgttatttccctgtcgggctcagtaagtaactcaaaatatggaccatccttctcttggatttttcttctttgctactagcattgacttgaggcatcttttgtgtttttttgtcattctatcaagactttatccaatgtagtcacaagaacatgatgtgtattctacaacttaaatgtttattcctttttgtttattcatgtttttctgcatacatagtgggacaggagcgcttgcgatctttcttaggaaggcatttgaggtgaacattacaacctctgattatgatgacggcgaaattgaaaagaatatatcttacaattgcagagcgaatgccttagatgtgttacctcatattagacacacgtggggagatccatttccagtttgcacaccaaattgggacattgtcattgcaagtgatatcctactctatgtcaaacagtatgacaacttggtcaagacagtgtcctttcttttgaatgagtacaagcagaaggatcacaaatctggctgcataaccatcactgacaaatcaggtactttctaaaccaatttgatcttgtaaatcattagaggatgctgtgcgaaatgtttctttttcacttggcagggacacaaatatctgcaaaaccaccggtgtttctaatgagctggcgcagaagaatcggcaagggtcatcaatcactcttcttcgacgggtgtgagaagacgggcctgcaagtgcagcacctgggtgatcttgtgtaccttattagcaataaacaagaggcggattttgtggaaacgaagtcagacggtggcagtagtgaggggatgattttttgagtaggttttgttaagtcatattttgttcaatttcccccaaacacttgattttttgtttctctgattctatttgggatattctgtttgattctgttgcaagattgtttatgcactgaggtggtttataatggcttaagcatgcagcccagcgaggtgatctatgcaggcttaagcgtgctgctctcagtatctgcttttggctttct

SEQ ID NO: 5808 - DNA, 1993 bp, Zea Mays
gcttctctcgcattcggcctccccttcccaccctcaacagcgaagagcacacatggataccgccgtcttctcccccgccgatctcttccacggagtcgacgacagcgacgacgaccgagatgagatgcaaatctgctccgatggggagaagccggtggcgttggagtatcaggagagagtccacgacttccctgacatggtatgacttccacgattcggccgtcttggctcgcatatgtaggaacggtgctcctctggaatccggaaaggcccgggtcttgaagcacagtattatctaggtttcttgccttctcgggtttcagtttggattttcctaatattagagaatggatgaacaagtaatacctagatgggcagaaacgagtaaagaatattttggtatttcgacgtgctgtgttctttttccactgaggcacttacattatgttatgcaaaacgcagcagctatggttcagtttagtaatcctccaattgttaaactacggacagcttagcttccccatgaagtatgttgcgccaaactctgcaaagtataataatgaataagaaacagagtggttgttaattcagtacgaagcatacttactatcatgatcctgtaatgggcagaggaagatttttatatcgttaaatatttgggctggactaattgatgttcatatttggttaggggcttagcatacttttcaaaagtatatgtatctggctatctgttgcttgctcaatatgctgctacattcttggatgcacttgaattttagcctacgttagagttcatggtgctgtgtcagtaaatccacatgcttaaattaaaatggagtggctatttcagttctactatatcaaaggttgcttggcttataactattgttcaacaaaagtgatgtgagtttattgatttcattttcattatggtcatttcttattgcattattatatttttctcaatctaggttgagccattacgcagtgaaagctgctgacttgtgaccacaaggtcctgtgtctgagttgtggaagcctcttgcaaatgcagggaaaggccgtgtactatagacctaataggtctgaccctttcctggaccccacacaagtggggctgccctaagttgtgttttttctttaatatctatctttttgttcaccattcaaaaatcgacatacagaaactgagtgtaagggagttctcatgtcatgagcttaacgccaacctgttgtggccggggacattttcatttgctacttggctggttaagaaccggtcaattttggatggacgacgagtcctggaattaggaagacacgtggggagatccatttccagtttgcacaccaaattgggacattgtcattgcaagtgatatcctactctatgtcaaacagtatgacaacttggtcaagacagtgtcctttcttttgaatgagtacaagcagaaggatcacaaatctggctgcataaccatcactgacaaatcaggtactttctaaaccaatttgatcttgtaaatcattagaggatgctgtgcgaaatgtttctttttcacttggcagggacacaaatatctgcaaaaccaccggtgtttctaatgagctggcgcagaagaatcggcaagggtcatcaatcactcttcttcgacgggtgtgagaagacgggcctgcaagtgcagcacctgggtgatcttgtgtaccttattagcaataaacaagaggcggattttgtggaaacgaagtcagacggtggcagtagtgaggggatgattttttgagtaggttttgttaagtcatattttgttcaatttcccccaaacacttgattttttgtttctctgattctatttgggatattctgtttgattctgttgcaagattgtttatgcactgaggtggtttataatggcttaagcatgcagcccagcgaggtgatctatgcaggcttaagcgtgctgctctcagtatctgcttttggctttct

SEQ ID NO: 5809 - DNA, 1669 bp, Zea Mays
cgtgcaggacgggatttcttggcgggccagagagagatccgaagcaggagcagagaagatgccatcacgccgtacaaatacgaggggagacacaataaaaataaaataaaacaaaaaccgggcggcagccggcagggctacgcaggcgccgaggggaagacgacgcggactcacaaggcgaatatcccccgtccgggacccacccgacagcgacccaacacccccaatcatcatcccctccgcctctcctccactggagacgacgagtgccctcgtctccctctcccctcgccgtcgtcgtcctccctcctctcctccgctcccaccgaggaggggaccctctataagaaggcaggagcgacgaatccgatcgtctgtcgtgtgggagagccgcggccccatcctccgtgtgatgaagttcgggaaggatttccggaaccacctggaggagacgctgccggcgtggagggacaagtacctcgcctacaaggccctcaagaagctcatcaagaacctggtgccacgcgagcccgcagcggcccctcctctccctcctcctgcccccgccgccgccgacgccgaggggccgggggctcctgccgccgcgcacgggaacgtcaacctggccaactggttcgccagcatcctcgacgcggagctgcacaagctcaacgagttctacatcgagagggaggagtggtgctcaaggagaggattgagcgcgtcaaagctaagaagaatgacgcttttacatccaggagtgaatttaccgaagaaatgttagagatacgactagtgaagatactgaagaagtatgacaagagaacaggtggcgtgcttagcctgcctttcactcagcgtgttcgtcaccagccatttttcacaaccgaacctttaacaaggcttgtccgagaatgcgaggctaacctcgaactacttttcccggtcgaagcagaggttcttgagcctagttcatcctcgaatctagaaccgcacgatgtggctaggtgtgacccgacatcgtcccgcgatgtggaaaccgtcgatgtttaccgaagcacactcgcagctatgaaggcgatacagggccttcggagagccagctctacttacaaccccctgtctctgtctaggttcttccacggcgaggatggcgaaccctgctcgggtgccatcacttctgagagctcactgtcagattcctcaacggactcccagattcaggatgctgggaaggatgataaggaggtgcaatcaaattcgagggaccagaatgctgcccaaggggaacagaatgcacaaggcgagccgactgatgaataaacagtttttttcccacacgctgttcaataagacaataaccattgataagtgtaaatgctaataatcttgctggttaaccctcttttgaagtgacacatatgcaatgactccctggtggcgcagtttcatttttcttctttttccttaattaatgggtaaagagtatatgggatgttggatttatcatgttcctatcgtgttgacagcatgccagttgccagaagtttgacacttgataagagctatgatcgtaatcagcatgttggatctattatgtttttgttgtgttgacactacagggaccaccatgtcagtacttcataagcgccatgtaagttttgacggt

SEQ ID NO: 5810 - DNA, 1631 bp, Zea Mays
cgtgcaggacgggatttcttggcgggccagagagagatccgaagcaggagcagagaagatgccatcacgccgtacaaatacgaggggagacacaataaaaataaaataaaacaaaaaccgggcggcagccggcagggctacgcaggcgccgaggggaagacgacgcggactcacaaggcgaatatcccccgtccgggacccacccgacagcgacccaacacccccaatcatcatcccctccgcctctcctccactggagacgacgagtgccctcgtctccctctcccctcgccgtcgtcgtcctccctcctctcctccgctcccaccgaggaggggaccctctataagaaggcaggagcgacgaatccgatcgtctgtcgtgtgggagagccgcggccccatcctccgtgtgatgaagttcgggaaggatttccggaaccacctggaggagacgctgccggcgtggagggacaagtacctcgcctacaaggccctcaagaagctcatcaagaacctggtgccacgcgagcccgcagcggcccctcctctccctcctcctgcccccgccgccgccgacgccgaggggccgggggctcctgccgccgcgcacgggaacgtcaacctggccaactggttcgccagcatcctcgacgcggagctgcacaagctcaacgagttctacatcgagagggaggagtggtacgtcatccgcctccaggtgctcaaggagaggattgagcgcgtcaaagctaagaagaatgacgcttttacatccaggagtgaatttaccgaagaaatgttagagatacgtaaggattttgtgatcatacatggtgaaatgattcttctgcaaacctacagctccctaaattttgctggactagtgaagatactgaagaagtatgacaagagaacaggtggcgtgcttagcctgcctttcactcagcgtgttcgtcaccagccatttttcacaaccgaacctttaacaaggcttgtccgagaatgcgaggctaacctcgaactacttttcccggtcgaagcagaggttcttgagcctagttcatcctcgaatctagaaccgcacgatgtggctaggttcttccacggcgaggatggcgaaccctgctcgggtgccatcacttctgagagctcactgtcagattcctcaacggactcccagattcaggatgctgggaaggatgataaggaggtgcaatcaaattcgagggaccagaatgctgcccaaggggaacagaatgcacaaggcgagccgactgatgaataaacagtttttttcccacacgctgttcaataagacaataaccattgataagtgtaaatgctaataatcttgctggttaaccctcttttgaagtgacacatatgcaatgactccctggtggcgcagtttcatttttcttctttttccttaattaatgggtaaagagtatatgggatgttggatttatcatgttcctatcgtgttgacagcatgccagttgccagaagtttgacacttgataagagctatgatcgtaatcagcatgttggatctattatgtttttgttgtgttgacactacagggaccaccatgtcagtacttcataagcgccatgtaagttttgacggt

SEQ ID NO: 5811 - DNA, 2776 bp, Zea Mays
gttccatttcttatcccctcccctccggtcctccccctccccccgatggcgtccctcacgctcccagcactcgctctcgccctctctaaccccggcgccgtccgcctacgcgccgcggccttccgctgctgggcgctccggcggcgcggctgggcggcggcgggcgccctggcctcgcccaactccgtgcttagcgagcatgccttcaagcggctccagctcgggagcgacgacgaggacggggaagggccgtacgggagcgacgccgacgaggggttcgaggcgggggagggggacaacgaggagctcgccattgccaggctcggcctgcccgacgagctcgtcgccacgctcgagaagcgcgggattacgcacctgttccccatccagagggctgtgttgattcccgctctcgagggccgtgacctgattgctagagcaaagactggaactggaaagacactggcctttggcatacccatgatcaagcaattaatcgagcaagacgatggtcggattacaaggagaggtcgtactcctcgggttctggttctagcacctaccagagagttagccaaacaagtcgagaaggaaataaaggaatcagcacccaagctcggcacagtgtgtgtttatggcggcgtctcatataatgtccagcagaatgcactctctcgtggtgtcgatgttgttgttggaacacctggccgcataatcgatttgataaatggcggaagcctccagttgggagaagttcagtatttggtcctggatgaggctgaccaaatgctcgcagtggggtttgaggaagatgtggaaacaatattacaacagcttcctgcaggcaggcaaagcatgttgttctctgcgacgatgcctagctgggtgaagaaactgtccagacggtacttgaacaaccctttgacgattgacttggttggtgatcaagatgaaaagcttgctgaaggaatcaaactctatgctatcccactcacaacaacatcaaagcgtaccgttcttagtgatctaatcacggtttatgcaaagggtgggaaaaccatagttttcactcgtacaaagaaagatgcagatgaggtatcattggcactgacaaacagtattgcttctgaggcacttcatggtgatatttcacagcatcagcgtgagaggacactaaatggattccgtcaagggaaatttactgttctagtagcaacagatgttgctgcccgtggtcttgatataccaaatgttgatctgattatccattatgaattgccaaatgatccagaaacttttgtccatcgttctggacgcactggacgtgctgggaaagcaggaactgcaatcttgatgtttaccagcagccagaaaaggacagttaagtcacttgagcgtgatgttggttgcaactttgagtttataagccctccgtccatagaagaagtgctggagtcatctgctgagcatgtcattgctacattgcgaggtgtgcacccagaatcaactaaatactttcttggggctgctgagaaattaacagaagaattgggacctcatgctcttgcttctgcactggcacatctgagtggattttctcagccaccttcgtcacgttctctcatcagtcatgagcagggatgggtgacgttgcaactaactagagaacagggatttggcagaggcttcttttctcctagatctgttactggttttctatctgatgtttgttcagctgctgcagatgaagttggcaaaatatacctaacagcagatgagaacgtccaaggagcagtcttcgatttacctgaggaaattgcaaaggacctgcttactatggagctccccccaggaaacacattaaccaaaatttccaagctgcctgcgttgcaagacgatggccctgctactgatagctacggtcgcttttcaaacgaccgaggttccaggaacaacaggcgttctaggggtggcggcgcttcaagaggccggggtggttgggacactgacggcgaggaccgattccgccgtggtggtaggagcttgaggtctgacaatgacagttggtcagatgatgactggtcaggcggtgggagaaaatcaaaccgttcctcatcattcggtagccgctcatcatcctacagcagccgtggctcaccatccttcggtggccgctcatcatccttcggcggtagggagagaagcttcagcggtgcttgtttcaactgcggcgaatccggccaccgcgcaacggactgcccaaacaagtagtaagatggaagagatggcgcggtctccccttgccgcacggggtcgatgatcctgattggccggagcatcaatcaggatgcacgcagagcgaaatcccaaagcccactccacctgctgatcggtgtactacgcccgacacccagccgacgttattactggctacagttttgcgtggtcgtctggcgtcggaaaacagaggaaggttttggcatcctgactacagttactacatcaagcggagttccttcagcttattcatgtcacacggacactactctacactacagggatatgttagtatttctttttttatatgtattttttttgtggtgctcttgatttgaggatctcggtataactgtaaccacacgcactggttacggttgcttctgcttcacaatcgctggcgacggttggattctttgaatgttatagatctgtatgctgtcttgcttcggacgtgaacttccatccctagattagcccccctttcgcttcttttggc

SEQ ID NO: 5812 - DNA, 3666 bp, Zea Mays
ccgccaattcgctcggttcggcgccgcgctgattcgcttcggtactctctttctgcttccccccctggaatgtttccggtgattcgcgcggcatgagctcgggttggaggtggtgcctctgattcccgctggcccgaggcggaggcgcgagggcatgtgggtttctctggtgtggatccggggctgcgtgggcgtcacgttcgtcgatttccagagcgggaggggagccgactagatctctcggctcctgcggttgctgcgctccgtcgggagagttacctgtgaccggagaaggttgccggagggttttgggaggtgaggggacatggaggccgccaggttcggcgcgcggagcagccacttgtacggcagcgggctgggcgagcttgatctcaacaggcgcgagagcagggtgtttggctgggatctcaacgagtggagctgggacagtcagcggtttactgccacgccggtgcctgttgaggcggcgaatggctctggactgaacagctcgccgtcatcgtccgaggaagccggggaagagatggctaagaatggtggcttgggaggtgatactgacaagaggaaaagggccgtggtcattgacgacgacgacgatgatgaaacggaggatcaggacacggtcgtgaatggtggcgggtcgctcagcctgataatagggggtagtgctgctggtgctggagcgatggagaacggcgatgtaaatgaggatgagagaaatggaaagaagatcagggtgcaaggaggcggctcaagtgggccggcatgccaggttgagggctgcggagcagatctgactgcagcgaaggattatcaccgccggcacaaggtctgcgagatgcatgctaaggccaccaccgccgtggtcggaaacactgtccagaggttctgccagcaatgcagtagatttcaccttcttcaagaatttgatgaagggaagcgaagttgccgtcgacgcttagcaggccacaataaacggaggagaaaaacccgccctgatactgcaagttgtgggactgcttcaattgaggacaaaatcagcaattatctactgttgagccttattggaatctgtgctaatttgaactgagttgctatccactcttttgaagaacctagggtctgttgccaaatcactggagccaaaagaactatgtaaactcctggaggcataccaaagcctgcaaaatggatcaaatgctggaacctctggaacagctaatgccacagaagaggctgcagggccatctaactctaagttgcctttcgtgaatggtagtcattgtggacatgcatcatcatctgttgtgccagtacagtcgaaggctaccatagtggtaactccagagcccgcatcatgcaagcttaaggattttgatctgaatgacacttgcaatgatatggaaggctttgaggatggacaagaaggttcacctacacctgcctttaagacagctgactctcctaattgtgcatcatggatgcaacaagattctactcaaagtccaccgcagactagtggcaactcagattcaacatcaacacaatcattgtcaagctcaaatggagacgctcagtgccgaactgataagattgtcttcaagctttttgacaaagttcccagtgatttacccccagttttgcggtcacagattcttggttggttgtcaagtagccctactgatatagagagccatattagacctgggtgtattattctaacaatatatctacggttagttgagtctgcatggcaagagctttctgagaatatgagcctgcacctggataagcttttgagtagctccactgacaacttttgggcatctggcttggtatttgtgatggttcggcgtcgcttagcttttatgctcaatggtcaaattatgttggacagacccctggcacccagttctcatcattactgcaagattttatgtgtcaaacctgttgctgcaccttattctgcaacaataaatttcagagtcgaaggatctaatctactcagtacttcctcaaggctaatttgttcatttgaaggacgttgtatattccaggaagacacagactctgtagcagaaaatgatgagtatgaggatagggccatcgaatgcctcagtttttgttgttccgttcctggtccaagaggaagaggatttatagaggttgaagatagtggttttagcaatggcttcttccccttcataattgctgagaaagacatatgctttgaggtttctgagctggagagcatatttgagtcctccagtatcgaacatgcagatgctaatgataatgccagggaacaagctctggagtttctaaatgagctgggttggcttcttcacagagcgaacagaatgtctaaagagaatgtaactgatacatctgtagctacctttagcatgtggagattcaggaatcttggtgtatttgccatggagcgggagtggtgtgctgtgatcaaaatgctgttagatttcttatttattggccttgtcgatgtgggatcccgatctccagaagaggtggtgctttcagaaaatttgttgcatgctgctgtacggaggaagtctgttaacatggttagatttctgctgagatacagaccaaacaaaaactccaaggggactgcacagacatacttatttagacctgatgctctgggcccgtcaatgattacccccctccatatagcagctgccactagtgatgcagaggatgtgttggatgtgctgaccgatgatcctggactgattggaattagtgcttggagcaatgcacgggacggaacaggttttaccccagaagattatgctcggcagagaggcaatgatgcttacctgaatctggtccaaaagaagattgataagcatcttggcaaaggccgtgttgtcctcggtgttccgagcagtatatgctctgtaataactgatggtgttaagcctggcgatgttagcctcgagatctgcatgccaatgtctgcatcagtgccaggttgcctcctctgcagccgtaaggcacgggtgtatccgaattctacatcgaggaccttcctttacaggccagcgatgttgactgtgatgggagttgctgtggtctgtgtctgcgtgggcatactcctccatacctttcccagggtttatgccgcgcccacattcagatgggagttgctggagcgtggacccatgtaagttttaggatgagccttagctgttgtttgtaacttgtaagttgagagttttagcgttgtggctaagatcaaaggaacatgattaccgtgtgaagaagttcatctgtgtttaacgcaagatgctgttgcggctgtaagctttatatacatcgtcgatttcaactatatttacagcctatcatgctcccattccattcatccattttgttttagaattcattccttgcggagaatttgtgaaccatcagaataaaaaacaggttcttgtatttataatcgttgagacataatatttcttggaatgatgctgaaaaactcatgattgcatttgctgaaagtatatgttacaatccaagctcctgccagtttgcaaggctgaaatgcatgcacttgattttcagcttaatcaacatgtacattttgtgatgagcagacgtcaattttgctttggg

SEQ ID NO: 5813 - DNA, 2698 bp, Zea Mays
aggcttagatcaagataagcgaccgtaatctgttttacaagagtatatgaggtcttaattactcattttgacatgttgggacataaggatgttccacggcatttggtgtgctctgataatgttcagcattcaaatggccaggagttgctatccactcttttgaagaacctagggtctgttgccaaatcactggagccaaaagaactatgtaaactcctggaggcataccaaagcctgcaaaatggatcaaatgctggaacctctggaacagctaatgccacagaagaggctgcagggccatctaactctaagttgcctttcgtgaatggtagtcattgtggacatgcatcatcatctgttgtgccagtacagtcgaaggctaccatagtggtaactccagagcccgcatcatgcaagcttaaggattttgatctgaatgacacttgcaatgatatggaaggctttgaggatggacaagaaggttcacctacacctgcctttaagacagctgactctcctaattgtgcatcatggatgcaacaagattctactcaaagtccaccgcagactagtggcaactcagattcaacatcaacacaatcattgtcaagctcaaatggagacgctcagtgccgaactgataagattgtcttcaagctttttgacaaagttcccagtgatttacccccagttttgcggtcacagattcttggttggttgtcaagtagccctactgatatagagagccatattagacctgggtgtattattctaacaatatatctacggttagttgagtctgcatggcaagagctttctgagaatatgagcctgcacctggataagcttttgagtagctccactgacaacttttgggcatctggcttggtatttgtgatggttcggcgtcgcttagcttttatgctcaatggtcaaattatgttggacagacccctggcacccagttctcatcattactgcaagattttatgtgtcaaacctgttgctgcaccttattctgcaacaataaatttcagagtcgaaggatctaatctactcagtacttcctcaaggctaatttgttcatttgaaggacgttgtatattccaggaagacacagactctgtagcagaaaatgatgagtatgaggatagggccatcgaatgcctcagtttttgttgttccgttcctggtccaagaggaagaggatttatagaggttgaagatagtggttttagcaatggcttcttccccttcataattgctgagaaagacatatgctttgaggtttctgagctggagagcatatttgagtcctccagtatcgaacatgcagatgctaatgataatgccagggaacaagctctggagtttctaaatgagctgggttggcttcttcacagagcgaacagaatgtctaaagagaatgtaactgatacatctgtagctacctttagcatgtggagattcaggaatcttggtgtatttgccatggagcgggagtggtgtgctgtgatcaaaatgctgttagatttcttatttattggccttgtcgatgtgggatcccgatctccagaagaggtggtgctttcagaaaatttgttgcatgctgctgtacggaggaagtctgttaacatggttagatttctgctgagatacagaccaaacaaaaactccaaggggactgcacagacatacttatttagacctgatgctctgggcccgtcaatgattacccccctccatatagcagctgccactagtgatgcagaggatgtgttggatgtgctgaccgatgatcctggactgattggaattagtgcttggagcaatgcacgggacggaacaggttttaccccagaagattatgctcggcagagaggcaatgatgcttacctgaatctggtccaaaagaagattgataagcatcttggcaaaggccgtgttgtcctcggtgttccgagcagtatatgctctgtaataactgatggtgttaagcctggcgatgttagcctcgagatctgcatgccaatgtctgcatcagtgccaggttgcctcctctgcagccgtaaggcacgggtgtatccgaattctacatcgaggaccttcctttacaggccagcgatgttgactgtgatgggagttgctgtggtctgtgtctgcgtgggcatactcctccatacctttcccagggtttatgccgcgcccacattcagatgggagttgctggagcgtggacccatgtaagttttaggatgagccttagctgttgtttgtaacttgtaagttgagagttttagcgttgtggctaagatcaaaggaacatgattaccgtgtgaagaagttcatctgtgtttaacgcaagatgctgttgcggctgtaagctttatatacatcgtcgatttcaactatatttacagcctatcatgctcccattccattcatccattttgttttagaattcattccttgcggagaatttgtgaaccatcagaataaaaaacaggttcttgtatttataatcgttgagacataatatttcttggaatgatgctgaaaaactcatgattgcatttgctgaaagtatatgttacaatccaagctcctgccagtttgcaaggctgaaatgcatgcacttgattttcagcttaatcaacatgtacattttgtgatgagcagacgtcaattttgctttggg

SEQ ID NO: 5814 - DNA, 2124 bp, Zea Mays
ttcatgttaggagccataatcttggcagcactcatgcaaacaccaagatgctaatttgccgaactgataagattgtcttcaagctttttgacaaagttcccagtgatttacccccagttttgcggtcacagattcttggttggttgtcaagtagccctactgatatagagagccatattagacctgggtgtattattctaacaatatatctacggttagttgagtctgcatggcaagagctttctgagaatatgagcctgcacctggataagcttttgagtagctccactgacaacttttgggcatctggcttggtatttgtgatggttcggcgtcgcttagcttttatgctcaatggtcaaattatgttggacagacccctggcacccagttctcatcattactgcaagattttatgtgtcaaacctgttgctgcaccttattctgcaacaataaatttcagagtcgaaggatctaatctactcagtacttcctcaaggctaatttgttcatttgaaggacgttgtatattccaggaagacacagactctgtagcagaaaatgatgagtatgaggatagggccatcgaatgcctcagtttttgttgttccgttcctggtccaagaggaagaggatttatagaggttgaagatagtggttttagcaatggcttcttccccttcataattgctgagaaagacatatgctttgaggtttctgagctggagagcatatttgagtcctccagtatcgaacatgcagatgctaatgataatgccagggaacaagctctggagtttctaaatgagctgggttggcttcttcacagagcgaacagaatgtctaaagagaatgtaactgatacatctgtagctacctttagcatgtggagattcaggaatcttggtgtatttgccatggagcgggagtggtgtgctgtgatcaaaatgctgttagatttcttatttattggccttgtcgatgtgggatcccgatctccagaagaggtggtgctttcagaaaatttgttgcatgctgctgtacggaggaagtctgttaacatggttagatttctgctgagatacagaccaaacaaaaactccaaggggactgcacagacatacttatttagacctgatgctctgggcccgtcaatgattacccccctccatatagcagctgccactagtgatgcagaggatgtgttggatgtgctgaccgatgatcctggactgattggaattagtgcttggagcaatgcacgggacggaacaggttttaccccagaagattatgctcggcagagaggcaatgatgcttacctgaatctggtccaaaagaagattgataagcatcttggcaaaggccgtgttgtcctcggtgttccgagcagtatatgctctgtaataactgatggtgttaagcctggcgatgttagcctcgagatctgcatgccaatgtctgcatcagtgccaggttgcctcctctgcagccgtaaggcacgggtgtatccgaattctacatcgaggaccttcctttacaggccagcgatgttgactgtgatgggagttgctgtggtctgtgtctgcgtgggcatactcctccatacctttcccagggtttatgccgcgcccacattcagatgggagttgctggagcgtggacccatgtaagttttaggatgagccttagctgttgtttgtaacttgtaagttgagagttttagcgttgtggctaagatcaaaggaacatgattaccgtgtgaagaagttcatctgtgtttaacgcaagatgctgttgcggctgtaagctttatatacatcgtcgatttcaactatatttacagcctatcatgctcccattccattcatccattttgttttagaattcattccttgcggagaatttgtgaaccatcagaataaaaaacaggttcttgtatttataatcgttgagacataatatttcttggaatgatgctgaaaaactcatgattgcatttgctgaaagtatatgttacaatccaagctcctgccagtttgcaaggctgaaatgcatgcacttgattttcagcttaatcaacatgtacattttgtgatgagcagacgtcaattttgctttggg

SEQ ID NO: 5815 - DNA, 1511 bp, Zea Mays
tatcaacccaaccgtggagcaaaatatacttgttgaagatagtggttttagcaatggcttcttccccttcataattgctgagaaagacatatgctttgaggtttctgagctggagagcatatttgagtcctccagtatcgaacatgcagatgctaatgataatgccagggaacaagctctggagtttctaaatgagctgggttggcttcttcacagagcgaacagaatgtctaaagagaatgtaactgatacatctgtagctacctttagcatgtggagattcaggaatcttggtgtatttgccatggagcgggagtggtgtgctgtgatcaaaatgctgttagatttcttatttattggccttgtcgatgtgggatcccgatctccagaagaggtggtgctttcagaaaatttgttgcatgctgctgtacggaggaagtctgttaacatggttagatttctgctgagatacagaccaaacaaaaactccaaggggactgcacagacatacttatttagacctgatgctctgggcccgtcaatgattacccccctccatatagcagctgccactagtgatgcagaggatgtgttggatgtgctgaccgatgatcctggactgattggaattagtgcttggagcaatgcacgggacggaacaggttttaccccagaagattatgctcggcagagaggcaatgatgcttacctgaatctggtccaaaagaagattgataagcatcttggcaaaggccgtgttgtcctcggtgttccgagcagtatatgctctgtaataactgatggtgttaagcctggcgatgttagcctcgagatctgcatgccaatgtctgcatcagtgccaggttgcctcctctgcagccgtaaggcacgggtgtatccgaattctacatcgaggaccttcctttacaggccagcgatgttgactgtgatgggagttgctgtggtctgtgtctgcgtgggcatactcctccatacctttcccagggtttatgccgcgcccacattcagatgggagttgctggagcgtggacccatgtaagttttaggatgagccttagctgttgtttgtaacttgtaagttgagagttttagcgttgtggctaagatcaaaggaacatgattaccgtgtgaagaagttcatctgtgtttaacgcaagatgctgttgcggctgtaagctttatatacatcgtcgatttcaactatatttacagcctatcatgctcccattccattcatccattttgttttagaattcattccttgcggagaatttgtgaaccatcagaataaaaaacaggttcttgtatttataatcgttgagacataatatttcttggaatgatgctgaaaaactcatgattgcatttgctgaaagtatatgttacaatccaagctcctgccagtttgcaaggctgaaatgcatgcacttgattttcagcttaatcaacatgtacattttgtgatgagcagacgtcaattttgctttggg

SEQ ID NO: 5816 - DNA, 2356 bp, Zea Mays
ccgcacgccagaaacctcgccgcaggaaaccgccgaccctaccacccgcccaccctaccgccctaccgcccgcccgcaaatccttccgccgcgaaccgcccaaccactcgctcccacgccgcaatcccaccgcgaaagccgcgaacccgacgccttccaccatcccgccggccgggcggcttctggggccaccccgaggacggccaccgctcgggcgacgcgaccttcaagggagggccccacgacgcgcgcctcaaggccttcttcgtctgcaacacccacatgtagccggctcgacgttctccgctaattcgcttggacgcctcgccggccggagggaaaggaagagtcggagtagcctgcccggctgggaaccgacagcttctccgtttcagaagcacgcgggcggggaggtggggtcgggagatcgcggggtgctcctttgtctccagggcagaggagaaacgcgcacggctggggaagaaccgaagaaggaagaggaaggtgccggtggaccaaacacggatctttcagtggagttcgggaagagtactggcacgcacgccaaggttgcatctccgccgtccaccacgaagcgcacgcgaacccgacgccttccaccatcccgccggtcgggcggcttctgggaccaccccgaggacggccaccgcccgggcgacgcgaccttcaagggagctcggcatgttcgacggggaccccgcggccgagccgttcgggcgcctgggccccgcggacgtgtgctccagggagcaccaggacctggcgctcgacgcgccgcgccagggcgtcgtgctcctcaagaaccggagcggtgggtggctacacccatactttgcagctacacccatactttgcagttacttaattcggagcggtgggcggccgctccctgccccgctccatctcgccagagaaggcaaagatctagctgccaagttctggcagctctctctgtgtgaatcaaacgatacgtacaggtagatgtattggtgggcctgcttcttcaacatcatcatctcctcctccgatgctgcttacctctcagtcctcaccactcccctcatggtgaatgacccttctggcagttttcccaaatcaagtctgaatcgagcacttcagttgagagtagtcactctggagtagagcaatggagaattcatttgcacctctacatattcaagaaatcccttgggaaagtgagtacatctgacgtgtttgatgtcaaagactctgatttggtcccaggaaaatatgaaggtgtcaagtgggttgaagctttgggaaggttcattagacttggtgaaggccctgaattctgatatcaaagaatataaattgcgtgtagaaggcaaacacgtattagagcttggatgtggacatggactccgtggcatttttgcaggtctcaagtggagtatagtgaactacatcataagctgtagcattcatcgatccagatccaaacgtccttcggactcttccttctgcatttgtgtggagtggggattcatccggccttcttctcttgcagatgaaaagcgtcatgagaaaggcaaagctgagtttaagaaggttgtagaatcactgggacatgtaatactcgggtggcgtctggttccgactgacaactcagacttgggtgaatctgcactcgagactgagccagtcattgagcaggttttcgttaccaagagctcaagatcagaggctgagtttgagcaacagggcggcggtgggcatgctgctcggcggcgaggacatgcacaggttcccggtgcgctccccgcggatggaccgcggcgacctcatctgcagtcccgccgcgcggcagatcgtgtccaactacttcagcatgttcgggccggtgcaggacgtgcgcatcccgtaccagcagaagcacatgttcggcttcgtcaccttcgtgtacgccgagacggtgaaggtcatcccaagcaagggcaacccgcacttcgtgtgctacgcgcgcgtgctcgtcaagccctacaaggagaagggcaagatccccggcaggttcaggaagctgcagcacgcgcaccatggcggagccgagttcggcgattgcgcgtcgcccaccagattgctggatttcagggacccctacgccctcctgcttctttcaggtgcccaggttttctcctgggcatgaagccattgggctatgatgtgtgaggtgcatagagcaaaaaaaggggaaggggggccctccattcctctaatctgggagggactactaatatggctacatgatggccggccctatcaaccgagcgtagagaagctttgacaaagaaaaaagaaatacctttggagaggt

SEQ ID NO: 5817 - DNA, 3127 bp, Zea Mays
ccgcacgccagaaacctcgccgcaggaaaccgccgaccctaccacccgcccaccctaccgccctaccgcccgcccgcaaatccttccgccgcgaaccgcccaaccactcgctcccacgccgcaatcccaccgcgaaagccgcgaacccgacgccttccaccatcccgccggccgggcggcttctggggccaccccgaggacggccaccgctcgggcgacgcgaccttcaagggagggccccacgacgcgcgcctcaaggccttcttcgtctgcaacacccacatgtagccggctcgacgttctccgctaattcgcttggacgcctcgccggccggagggaaaggaagagtcggagtagcctgcccggctgggaaccgacagcttctccgtttcagaagcacgcgggcggggaggtggggtcgggagatcgcggggtgctcctttgtctccagggcagaggagaaacgcgcacggctggggaagaaccgaagaaggaagaggaaggtgccggtggaccaaacacggatctttcagtggagttcgggaagagtactggcacgcacgccaaggttgcatctccgccgtccaccacgaagcgcacgcgaacccgacgccttccaccatcccgccggtcgggcggcttctgggaccaccccgaggacggccaccgcccgggcgacgcgaccttcaagggagctcggcatgttcgacggggaccccgcggccgagccgttcgggcgcctgggccccgcggacgtgtgctccagggagcaccaggacctggcgctcgacgcgccgcgccagggcgtcgtgctcctcaagaaccggagcggtgggtggctacacccatactttgcagctacacccatactttgcagttacttaattcggagcggtgggcggccgctccctgccccgctccatctcgccagagaaggcaaagatctagctgccaagttctggcagctctctctgtgtgaatcaaacgatacgtacaggtagatgtattggtgggcctgcttcttcaacatcatcatctcctcctccgatgctgcttacctctcagtcctcaccactcccctcatggtgaatgacccttctggcagttttcccaaatcaagtctgaatcgagcacttcagttgagagtagtcactctggagtagagcaatggagaattcatttgcacctctacatattcaagaaatcccttgggaaagtgagtacatctgacgtgtttgatgtcaaagactctgatttggtcccaggaaaatatgaaggtgtcaagtgggttgaagctttgggaaggttcattagacttggtgaaggccctgaattctgatatcaaagaatataaattgcgtgtagaaggcaaacacgtattagagcttggatgtggacatggactccgtggcatttttgcaggtctcaaggaatctggtgtgaaagggattttagtccctcgccactcgcttgatgtggactgatacagacatgatcgatggagtatagtgaactacatcataagctgtagcattcatcgatccagatccaaacgtccttcggactcttccttctgcatttgtgtggagtggggattcatccggccttcttctcttgcagatgaaaagcgtcatgagaaaggcaaagctgagtttaagaaggttgtagaatcactgggacatgtaatactcgggtggcgtctggttccgactgacaactcagacttgggtgaatctgcactcgagactgagccagtcattgagcaggttttcgttaccaagagctcaagatcagaggctgagtttgagcaacaggtaattccataccacttgagatgaggcaaccgacttttctggtcaccttgtaatgctgacactattaggcacaaatgagggaaatgtactgccacattaggcacaaagtagtgtatattgctaggtgcttattcctagaccatgctctgcttttagtttgtatttctcttatttttcttagggtgtgtcgttagctgtttccttcctgtaatcctgtgtagcgtaggaggcttacctgctctgtaagcttccttgtattgttctataaatgctttaatacagtcaggtattatcaagaaaacaaaaagaaaagaaacagatggctactttgaggtaaatatttcagggccatttgtatttacttatgaggtttagatcaaatgatagatgatgtcctgcatgattttggaattgcatttgtattgtataaacctgaatataaatgccatttttgtgaagtagtccgatagcatcaaaaatttgtgaagtagtctgatagcaacagaaactataattaattgagtcttattactcacactagatcttgtcccccaccgcctgatctgactacttttgagctgatttggtcaggaaaggtgccatttttacccagcggctgcctcgccaccaaattaaaggttgcattttgtctccggtctcaccattcccattttattctccgcgtgttgctgcctgctccagggcggcggtgggcatgctgctcggcggcgaggacatgcacaggttcccggtgcgctccccgcggatggaccgcggcgacctcatctgcagtcccgccgcgcggcagatcgtgtccaactacttcagcatgttcgggccggtgcaggacgtgcgcatcccgtaccagcagaagcacatgttcggcttcgtcaccttcgtgtacgccgagacggtgaaggtcatcccaagcaagggcaacccgcacttcgtgtgctacgcgcgcgtgctcgtcaagccctacaaggagaagggcaagatccccggcaggttcaggaagctgcagcacgcgcaccatggcggagccgagttcggcgattgcgcgtcgcccaccagattgctggatttcagggacccctacgccctcctgcttctttcaggtgcccaggttttctcctgggcatgaagccattgggctatgatgtgtgaggtgcatagagcaaaaaaaggggaaggggggccctccattcctctaatctgggagggactactaatatggctacatgatggccggccctatcaaccgagcgtagagaagctttgacaaagaaaaaagaaatacctttggagaggt

SEQ ID NO: 5818 - DNA, 2877 bp, Zea Mays
ccgcacgccagaaacctcgccgcaggaaaccgccgaccctaccacccgcccaccctaccgccctaccgcccgcccgcaaatccttccgccgcgaaccgcccaaccactcgctcccacgccgcaatcccaccgcgaaagccgcgaacccgacgccttccaccatcccgccggccgggcggcttctggggccaccccgaggacggccaccgctcgggcgacgcgaccttcaagggagggccccacgacgcgcgcctcaaggccttcttcgtctgcaacacccacatgtagccggctcgacgttctccgctaattcgcttggacgcctcgccggccggagggaaaggaagagtcggagtagcctgcccggctgggaaccgacagcttctccgtttcagaagcacgcgggcggggaggtggggtcgggagatcgcggggtgctcctttgtctccagggcagaggagaaacgcgcacggctggggaagaaccgaagaaggaagaggaaggtgccggtggaccaaacacggatctttcagtggagttcgggaagagtactggcacgcacgccaaggttgcatctccgccgtccaccacgaagcgcacgcgaacccgacgccttccaccatcccgccggtcgggcggcttctgggaccaccccgaggacggccaccgcccgggcgacgcgaccttcaagggagctcggcatgttcgacggggaccccgcggccgagccgttcgggcgcctgggccccgcggacgtgtgctccagggagcaccaggacctggcgctcgacgcgccgcgccagggcgtcgtgctcctcaagaaccggagcggtgggtggctacacccatactttgcagctacacccatactttgcagttacttaattcggagcggtgggcggccgctccctgccccgctccatctcgccagagaaggcaaagatctagctgccaagttctggcagctctctctgtgtgaatcaaacgatacgtacaggtagatgtattggtgggcctgcttcttcaacatcatcatctcctcctccgatgctgcttacctctcagtcctcaccactcccctcatggtgaatgacccttctggcagttttcccaaatcaagtctgaatcgagcacttcagttgagagtagtcactctggagtagagcaatggagaattcatttgcacctctacatattcaagaaatcccttgggaaagtgagtacatctgacgtgtttgatgtcaaagactctgatttggtcccaggaaaatatgaaggtgtcaagtgggttgaagctttgggaaggttcattagacttggtgaaggccctgaattctgatatcaaagaatataaattgcgtgtagaaggcaaacacgtattagagcttggatgtggacatggactccgtggcatttttgcaggtctcaaggtatcgccttgatccttacctttctgtcatttttaaataattcctcatgtatattgattttcagaaacttgaactgtcagggtgccaacctgattcatttgtgttgggacaacctctagaaaatagatcacactggattattttgaatcacaacaatttagtttcatttgtcgattgagatagaaccatttttccattgtaaagatcgtgaataattcacatgtttcgctttactcaaatcataatctaacaattattttaaagcttcacatttatgagttgatgtaattgctgacgaattaacctcattactatgagcaggaccattagatggttcttcttcgctttcattttcattgcttctatttgtgttataaggcaggcaagagcgctccacattcattaaggcatacattcgtagatggaagcataagtgaactatttgagtattgtgatttagtgcttgctcgttcgtggagtatagtgaactacatcataagctgtagcattcatcgatccagatccaaacgtccttcggactcttccttctgcatttgtgtggagtggggattcatccggccttcttctcttgcagatgaaaagcgtcatgagaaaggcaaagctgagtttaagaaggttgtagaatcactgggacatgtaatactcgggtggcgtctggttccgactgacaactcagacttgggtgaatctgcactcgagactgagccagtcattgagcaggttttcgttaccaagagctcaagatcagaggctgagtttgagcaacaggtattatcaagaaaacaaaaagaaaagaaacagatggctactttgagggcggcggtgggcatgctgctcggcggcgaggacatgcacaggttcccggtgcgctccccgcggatggaccgcggcgacctcatctgcagtcccgccgcgcggcagatcgtgtccaactacttcagcatgttcgggccggtgcaggacgtgcgcatcccgtaccagcagaagcacatgttcggcttcgtcaccttcgtgtacgccgagacggtgaaggtcatcccaagcaagggcaacccgcacttcgtgtgctacgcgcgcgtgctcgtcaagccctacaaggagaagggcaagatccccggcaggttcaggaagctgcagcacgcgcaccatggcggagccgagttcggcgattgcgcgtcgcccaccagattgctggatttcagggacccctacgccctcctgcttctttcaggtgcccaggttttctcctgggcatgaagccattgggctatgatgtgtgaggtgcatagagcaaaaaaaggggaaggggggccctccattcctctaatctgggagggactactaatatggctacatgatggccggccctatcaaccgagcgtagagaagctttgacaaagaaaaaagaaatacctttggagaggt

SEQ ID NO: 5819 - DNA, 2425 bp, Zea Mays
ccgcacgccagaaacctcgccgcaggaaaccgccgaccctaccacccgcccaccctaccgccctaccgcccgcccgcaaatccttccgccgcgaaccgcccaaccactcgctcccacgccgcaatcccaccgcgaaagccgcgaacccgacgccttccaccatcccgccggccgggcggcttctggggccaccccgaggacggccaccgctcgggcgacgcgaccttcaagggagggccccacgacgcgcgcctcaaggccttcttcgtctgcaacacccacatgtagccggctcgacgttctccgctaattcgcttggacgcctcgccggccggagggaaaggaagagtcggagtagcctgcccggctgggaaccgacagcttctccgtttcagaagcacgcgggcggggaggtggggtcgggagatcgcggggtgctcctttgtctccagggcagaggagaaacgcgcacggctggggaagaaccgaagaaggaagaggaaggtgccggtggaccaaacacggatctttcagtggagttcgggaagagtactggcacgcacgccaaggttgcatctccgccgtccaccacgaagcgcacgcgaacccgacgccttccaccatcccgccggtcgggcggcttctgggaccaccccgaggacggccaccgcccgggcgacgcgaccttcaagggagctcggcatgttcgacggggaccccgcggccgagccgttcgggcgcctgggccccgcggacgtgtgctccagggagcaccaggacctggcgctcgacgcgccgcgccagggcgtcgtgctcctcaagaaccggagcggtgggtggctacacccatactttgcagctacacccatactttgcagttacttaattcggagcggtgggcggccgctccctgccccgctccatctcgccagagaaggcaaagatctagctgccaagttctggcagctctctctgtgtgaatcaaacgatacgtacaggtagatgtattggtgggcctgcttcttcaacatcatcatctcctcctccgatgctgcttacctctcagtcctcaccactcccctcatggtgaatgacccttctggcagttttcccaaatcaagtctgaatcgagcacttcagttgagagtagtcactctggagtagagcaatggagaattcatttgcacctctacatattcaagaaatcccttgggaaagtgagtacatctgacgtgtttgatgtcaaagactctgatttggtcccaggaaaatatgaaggtgtcaagtgggttgaagctttgggaaggttcattagacttggtgaaggccctgaattctgatatcaaagaatataaattgcgtgtagaaggcaaacacgtattagagcttggatgtggacatggactccgtggcatttttgcaggtctcaaggaatctggtgtgaaagggattttagtccctcgccactcgcttgatgtggactgatacagacatgatcgatggagtatagtgaactacatcataagctgtagcattcatcgatccagatccaaacgtccttcggactcttccttctgcatttgtgtggagtggggattcatccggccttcttctcttgcagatgaaaagcgtcatgagaaaggcaaagctgagtttaagaaggttgtagaatcactgggacatgtaatactcgggtggcgtctggttccgactgacaactcagacttgggtgaatctgcactcgagactgagccagtcattgagcaggttttcgttaccaagagctcaagatcagaggctgagtttgagcaacagggcggcggtgggcatgctgctcggcggcgaggacatgcacaggttcccggtgcgctccccgcggatggaccgcggcgacctcatctgcagtcccgccgcgcggcagatcgtgtccaactacttcagcatgttcgggccggtgcaggacgtgcgcatcccgtaccagcagaagcacatgttcggcttcgtcaccttcgtgtacgccgagacggtgaaggtcatcccaagcaagggcaacccgcacttcgtgtgctacgcgcgcgtgctcgtcaagccctacaaggagaagggcaagatccccggcaggttcaggaagctgcagcacgcgcaccatggcggagccgagttcggcgattgcgcgtcgcccaccagattgctggatttcagggacccctacgccctcctgcttctttcaggtgcccaggttttctcctgggcatgaagccattgggctatgatgtgtgaggtgcatagagcaaaaaaaggggaaggggggccctccattcctctaatctgggagggactactaatatggctacatgatggccggccctatcaaccgagcgtagagaagctttgacaaagaaaaaagaaatacctttggagaggt

SEQ ID NO: 5820 - DNA, 3058 bp, Zea Mays
ccgcacgccagaaacctcgccgcaggaaaccgccgaccctaccacccgcccaccctaccgccctaccgcccgcccgcaaatccttccgccgcgaaccgcccaaccactcgctcccacgccgcaatcccaccgcgaaagccgcgaacccgacgccttccaccatcccgccggccgggcggcttctggggccaccccgaggacggccaccgctcgggcgacgcgaccttcaagggagggccccacgacgcgcgcctcaaggccttcttcgtctgcaacacccacatgtagccggctcgacgttctccgctaattcgcttggacgcctcgccggccggagggaaaggaagagtcggagtagcctgcccggctgggaaccgacagcttctccgtttcagaagcacgcgggcggggaggtggggtcgggagatcgcggggtgctcctttgtctccagggcagaggagaaacgcgcacggctggggaagaaccgaagaaggaagaggaaggtgccggtggaccaaacacggatctttcagtggagttcgggaagagtactggcacgcacgccaaggttgcatctccgccgtccaccacgaagcgcacgcgaacccgacgccttccaccatcccgccggtcgggcggcttctgggaccaccccgaggacggccaccgcccgggcgacgcgaccttcaagggagctcggcatgttcgacggggaccccgcggccgagccgttcgggcgcctgggccccgcggacgtgtgctccagggagcaccaggacctggcgctcgacgcgccgcgccagggcgtcgtgctcctcaagaaccggagcggtgggtggctacacccatactttgcagctacacccatactttgcagttacttaattcggagcggtgggcggccgctccctgccccgctccatctcgccagagaaggcaaagatctagctgccaagttctggcagctctctctgtgtgaatcaaacgatacgtacaggtagatgtattggtgggcctgcttcttcaacatcatcatctcctcctccgatgctgcttacctctcagtcctcaccactcccctcatggtgaatgacccttctggcagttttcccaaatcaagtctgaatcgagcacttcagttgagagtagtcactctggagtagagcaatggagaattcatttgcacctctacatattcaagaaatcccttgggaaagtgagtacatctgacgtgtttgatgtcaaagactctgatttggtcccaggaaaatatgaaggtgtcaagtgggttgaagctttgggaaggttcattagacttggtgaaggccctgaattctgatatcaaagaatataaattgcgtgtagaaggcaaacacgtattagagcttggatgtggacatggactccgtggcatttttgcaggtctcaagtggagtatagtgaactacatcataagctgtagcattcatcgatccagatccaaacgtccttcggactcttccttctgcatttgtgtggagtggggattcatccggccttcttctcttgcagatgaaaagcgtcatgagaaaggcaaagctgagtttaagaaggttgtagaatcactgggacatgtaatactcgggtggcgtctggttccgactgacaactcagacttgggtgaatctgcactcgagactgagccagtcattgagcaggttttcgttaccaagagctcaagatcagaggctgagtttgagcaacaggtaattccataccacttgagatgaggcaaccgacttttctggtcaccttgtaatgctgacactattaggcacaaatgagggaaatgtactgccacattaggcacaaagtagtgtatattgctaggtgcttattcctagaccatgctctgcttttagtttgtatttctcttatttttcttagggtgtgtcgttagctgtttccttcctgtaatcctgtgtagcgtaggaggcttacctgctctgtaagcttccttgtattgttctataaatgctttaatacagtcaggtattatcaagaaaacaaaaagaaaagaaacagatggctactttgaggtaaatatttcagggccatttgtatttacttatgaggtttagatcaaatgatagatgatgtcctgcatgattttggaattgcatttgtattgtataaacctgaatataaatgccatttttgtgaagtagtccgatagcatcaaaaatttgtgaagtagtctgatagcaacagaaactataattaattgagtcttattactcacactagatcttgtcccccaccgcctgatctgactacttttgagctgatttggtcaggaaaggtgccatttttacccagcggctgcctcgccaccaaattaaaggttgcattttgtctccggtctcaccattcccattttattctccgcgtgttgctgcctgctccagggcggcggtgggcatgctgctcggcggcgaggacatgcacaggttcccggtgcgctccccgcggatggaccgcggcgacctcatctgcagtcccgccgcgcggcagatcgtgtccaactacttcagcatgttcgggccggtgcaggacgtgcgcatcccgtaccagcagaagcacatgttcggcttcgtcaccttcgtgtacgccgagacggtgaaggtcatcccaagcaagggcaacccgcacttcgtgtgctacgcgcgcgtgctcgtcaagccctacaaggagaagggcaagatccccggcaggttcaggaagctgcagcacgcgcaccatggcggagccgagttcggcgattgcgcgtcgcccaccagattgctggatttcagggacccctacgccctcctgcttctttcaggtgcccaggttttctcctgggcatgaagccattgggctatgatgtgtgaggtgcatagagcaaaaaaaggggaaggggggccctccattcctctaatctgggagggactactaatatggctacatgatggccggccctatcaaccgagcgtagagaagctttgacaaagaaaaaagaaatacctttggagaggt

SEQ ID NO: 5821 - DNA, 2651 bp, Zea Mays
ccgcacgccagaaacctcgccgcaggaaaccgccgaccctaccacccgcccaccctaccgccctaccgcccgcccgcaaatccttccgccgcgaaccgcccaaccactcgctcccacgccgcaatcccaccgcgaaagccgcgaacccgacgccttccaccatcccgccggccgggcggcttctggggccaccccgaggacggccaccgctcgggcgacgcgaccttcaagggagggccccacgacgcgcgcctcaaggccttcttcgtctgcaacacccacatgtagccggctcgacgttctccgctaattcgcttggacgcctcgccggccggagggaaaggaagagtcggagtagcctgcccggctgggaaccgacagcttctccgtttcagaagcacgcgggcggggaggtggggtcgggagatcgcggggtgctcctttgtctccagggcagaggagaaacgcgcacggctggggaagaaccgaagaaggaagaggaaggtgccggtggaccaaacacggatctttcagtggagttcgggaagagtactggcacgcacgccaaggttgcatctccgccgtccaccacgaagcgcacgcgaacccgacgccttccaccatcccgccggtcgggcggcttctgggaccaccccgaggacggccaccgcccgggcgacgcgaccttcaagggagctcggcatgttcgacggggaccccgcggccgagccgttcgggcgcctgggccccgcggacgtgtgctccagggagcaccaggacctggcgctcgacgcgccgcgccagggcgtcgtgctcctcaagaaccggagcggtgggtggctacacccatactttgcagctacacccatactttgcagttacttaattcggagcggtgggcggccgctccctgccccgctccatctcgccagagaaggcaaagatctagctgccaagttctggcagctctctctgtgtgaatcaaacgatacgtacaggtagatgtattggtgggcctgcttcttcaacatcatcatctcctcctccgatgctgcttacctctcagtcctcaccactcccctcatggtgaatgacccttctggcagttttcccaaatcaagtctgaatcgagcacttcagttgagagtagtcactctggagtagagcaatggagaattcatttgcacctctacatattcaagaaatcccttgggaaagtgagtacatctgacgtgtttgatgtcaaagactctgatttggtcccaggaaaatatgaaggtgtcaagtgggttgaagctttgggaaggttcattagacttggtgaaggccctgaattctgatatcaaagaatataaattgcgtgtagaaggcaaacacgtattagagcttggatgtggacatggactccgtggcatttttgcaggtctcaagatgaaaagcgtcatgagaaaggcaaagctgagtttaagaaggttgtagaatcactgggacatgtaatactcgggtggcgtctggttccgactgacaactcagacttgggtgaatctgcactcgagactgagccagtcattgagcaggttttcgttaccaagagctcaagatcagaggctgagtttgagcaacaggtattatcaagaaaacaaaaagaaaagaaacagatggctactttgaggtaaatatttcagggccatttgtatttacttatgaggtttagatcaaatgatagatgatgtcctgcatgattttggaattgcatttgtattgtataaacctgaatataaatgccatttttgtgaagtagtccgatagcatcaaaaatttgtgaagtagtctgatagcaacagaaactataattaattgagtcttattactcacactagatcttgtcccccaccgcctgatctgactacttttgagctgatttggtcaggaaaggtgccatttttacccagcggctgcctcgccaccaaattaaaggttgcattttgtctccggtctcaccattcccattttattctccgcgtgttgctgcctgctccagggcggcggtgggcatgctgctcggcggcgaggacatgcacaggttcccggtgcgctccccgcggatggaccgcggcgacctcatctgcagtcccgccgcgcggcagatcgtgtccaactacttcagcatgttcgggccggtgcaggacgtgcgcatcccgtaccagcagaagcacatgttcggcttcgtcaccttcgtgtacgccgagacggtgaaggtcatcccaagcaagggcaacccgcacttcgtgtgctacgcgcgcgtgctcgtcaagccctacaaggagaagggcaagatccccggcaggttcaggaagctgcagcacgcgcaccatggcggagccgagttcggcgattgcgcgtcgcccaccagattgctggatttcagggacccctacgccctcctgcttctttcaggtgcccaggttttctcctgggcatgaagccattgggctatgatgtgtgaggtgcatagagcaaaaaaaggggaaggggggccctccattcctctaatctgggagggactactaatatggctacatgatggccggccctatcaaccgagcgtagagaagctttgacaaagaaaaaagaaatacctttggagaggt

SEQ ID NO: 5822 - DNA, 2235 bp, Zea Mays
ccgcacgccagaaacctcgccgcaggaaaccgccgaccctaccacccgcccaccctaccgccctaccgcccgcccgcaaatccttccgccgcgaaccgcccaaccactcgctcccacgccgcaatcccaccgcgaaagccgcgaacccgacgccttccaccatcccgccggccgggcggcttctggggccaccccgaggacggccaccgctcgggcgacgcgaccttcaagggagggccccacgacgcgcgcctcaaggccttcttcgtctgcaacacccacatgtagccggctcgacgttctccgctaattcgcttggacgcctcgccggccggagggaaaggaagagtcggagtagcctgcccggctgggaaccgacagcttctccgtttcagaagcacgcgggcggggaggtggggtcgggagatcgcggggtgctcctttgtctccagggcagaggagaaacgcgcacggctggggaagaaccgaagaaggaagaggaaggtgccggtggaccaaacacggatctttcagtggagttcgggaagagtactggcacgcacgccaaggttgcatctccgccgtccaccacgaagcgcacgcgaacccgacgccttccaccatcccgccggtcgggcggcttctgggaccaccccgaggacggccaccgcccgggcgacgcgaccttcaagggagctcggcatgttcgacggggaccccgcggccgagccgttcgggcgcctgggccccgcggacgtgtgctccagggagcaccaggacctggcgctcgacgcgccgcgccagggcgtcgtgctcctcaagaaccggagcggtgggtggctacacccatactttgcagctacacccatactttgcagttacttaattcggagcggtgggcggccgctccctgccccgctccatctcgccagagaaggcaaagatctagctgccaagttctggcagctctctctgtgtgaatcaaacgatacgtacaggtagatgtattggtgggcctgcttcttcaacatcatcatctcctcctccgatgctgcttacctctcagtcctcaccactcccctcatggtgaatgacccttctggcagttttcccaaatcaagtctgaatcgagcacttcagttgagagtagtcactctggagtagagcaatggagaattcatttgcacctctacatattcaagaaatcccttgggaaagtgagtacatctgacgtgtttgatgtcaaagactctgatttggtcccaggaaaatatgaaggtgtcaagtgggttgaagctttgggaaggttcattagacttggtgaaggccctgaattctgatatcaaagaatataaattgcgtgtagaaggcaaacacgtattagagcttggatgtggacatggactccgtggcatttttgcaggtctcaagatgaaaagcgtcatgagaaaggcaaagctgagtttaagaaggttgtagaatcactgggacatgtaatactcgggtggcgtctggttccgactgacaactcagacttgggtgaatctgcactcgagactgagccagtcattgagcaggttttcgttaccaagagctcaagatcagaggctgagtttgagcaacagggcggcggtgggcatgctgctcggcggcgaggacatgcacaggttcccggtgcgctccccgcggatggaccgcggcgacctcatctgcagtcccgccgcgcggcagatcgtgtccaactacttcagcatgttcgggccggtgcaggacgtgcgcatcccgtaccagcagaagcacatgttcggcttcgtcaccttcgtgtacgccgagacggtgaaggtcatcccaagcaagggcaacccgcacttcgtgtgctacgcgcgcgtgctcgtcaagccctacaaggagaagggcaagatccccggcaggttcaggaagctgcagcacgcgcaccatggcggagccgagttcggcgattgcgcgtcgcccaccagattgctggatttcagggacccctacgccctcctgcttctttcaggtgcccaggttttctcctgggcatgaagccattgggctatgatgtgtgaggtgcatagagcaaaaaaaggggaaggggggccctccattcctctaatctgggagggactactaatatggctacatgatggccggccctatcaaccgagcgtagagaagctttgacaaagaaaaaagaaatacctttggagaggt

SEQ ID NO: 5823 - DNA, 2346 bp, Zea Mays
ccgcacgccagaaacctcgccgcaggaaaccgccgaccctaccacccgcccaccctaccgccctaccgcccgcccgcaaatccttccgccgcgaaccgcccaaccactcgctcccacgccgcaatcccaccgcgaaagccgcgaacccgacgccttccaccatcccgccggccgggcggcttctggggccaccccgaggacggccaccgctcgggcgacgcgaccttcaagggagggccccacgacgcgcgcctcaaggccttcttcgtctgcaacacccacatgtagccggctcgacgttctccgctaattcgcttggacgcctcgccggccggagggaaaggaagagtcggagtagcctgcccggctgggaaccgacagcttctccgtttcagaagcacgcgggcggggaggtggggtcgggagatcgcggggtgctcctttgtctccagggcagaggagaaacgcgcacggctggggaagaaccgaagaaggaagaggaaggtgccggtggaccaaacacggatctttcagtggagttcgggaagagtactggcacgcacgccaaggttgcatctccgccgtccaccacgaagcgcacgcgaacccgacgccttccaccatcccgccggtcgggcggcttctgggaccaccccgaggacggccaccgcccgggcgacgcgaccttcaagggagctcggcatgttcgacggggaccccgcggccgagccgttcgggcgcctgggccccgcggacgtgtgctccagggagcaccaggacctggcgctcgacgcgccgcgccagggcgtcgtgctcctcaagaaccggagcggtgggtggctacacccatactttgcagctacacccatactttgcagttacttaattcggagcggtgggcggccgctccctgccccgctccatctcgccagagaaggcaaagatctagctgccaagttctggcagctctctctgtgtgaatcaaacgatacgtacaggtagatgtattggtgggcctgcttcttcaacatcatcatctcctcctccgatgctgcttacctctcagtcctcaccactcccctcatggtgaatgacccttctggcagttttcccaaatcaagtctgaatcgagcacttcagttgagagtagtcactctggagtagagcaatggagaattcatttgcacctctacatattcaagaaatcccttgggaaagtgagtacatctgacgtgtttgatgtcaaagactctgatttggtcccaggaaaatatgaaggtgtcaagtgggttgaagctttgggaaggttcattagacttggtgaaggccctgaattctgatatcaaagaatataaattgcgtgtagaaggcaaacacgtattagagcttggatgtggacatggactccgtggcatttttgcaggtctcaagatgaaaagcgtcatgagaaaggcaaagctgagtttaagaaggttgtagaatcactgggacatgtaatactcgggtggcgtctggttccgactgacaactcagacttgggtgaatctgcactcgagactgagccagtcattgagcaggttttcgttaccaagagctcaagatcagaggctgagtttgagcaacaggaaaggtgccatttttacccagcggctgcctcgccaccaaattaaaggttgcattttgtctccggtctcaccattcccattttattctccgcgtgttgctgcctgctccagggcggcggtgggcatgctgctcggcggcgaggacatgcacaggttcccggtgcgctccccgcggatggaccgcggcgacctcatctgcagtcccgccgcgcggcagatcgtgtccaactacttcagcatgttcgggccggtgcaggacgtgcgcatcccgtaccagcagaagcacatgttcggcttcgtcaccttcgtgtacgccgagacggtgaaggtcatcccaagcaagggcaacccgcacttcgtgtgctacgcgcgcgtgctcgtcaagccctacaaggagaagggcaagatccccggcaggttcaggaagctgcagcacgcgcaccatggcggagccgagttcggcgattgcgcgtcgcccaccagattgctggatttcagggacccctacgccctcctgcttctttcaggtgcccaggttttctcctgggcatgaagccattgggctatgatgtgtgaggtgcatagagcaaaaaaaggggaaggggggccctccattcctctaatctgggagggactactaatatggctacatgatggccggccctatcaaccgagcgtagagaagctttgacaaagaaaaaagaaatacctttggagaggt

SEQ ID NO: 5824 - DNA, 2472 bp, Zea Mays
ccgcacgccagaaacctcgccgcaggaaaccgccgaccctaccacccgcccaccctaccgccctaccgcccgcccgcaaatccttccgccgcgaaccgcccaaccactcgctcccacgccgcaatcccaccgcgaaagccgcgaacccgacgccttccaccatcccgccggccgggcggcttctggggccaccccgaggacggccaccgctcgggcgacgcgaccttcaagggagggccccacgacgcgcgcctcaaggccttcttcgtctgcaacacccacatgtagccggctcgacgttctccgctaattcgcttggacgcctcgccggccggagggaaaggaagagtcggagtagcctgcccggctgggaaccgacagcttctccgtttcagaagcacgcgggcggggaggtggggtcgggagatcgcggggtgctcctttgtctccagggcagaggagaaacgcgcacggctggggaagaaccgaagaaggaagaggaaggtgccggtggaccaaacacggatctttcagtggagttcgggaagagtactggcacgcacgccaaggttgcatctccgccgtccaccacgaagcgcacgcgaacccgacgccttccaccatcccgccggtcgggcggcttctgggaccaccccgaggacggccaccgcccgggcgacgcgaccttcaagggagctcggcatgttcgacggggaccccgcggccgagccgttcgggcgcctgggccccgcggacgtgtgctccagggagcaccaggacctggcgctcgacgcgccgcgccagggcgtcgtgctcctcaagaaccggagcggtgggtggctacacccatactttgcagctacacccatactttgcagttacttaattcggagcggtgggcggccgctccctgccccgctccatctcgccagagaaggcaaagatctagctgccaagttctggcagctctctctgtgtgaatcaaacgatacgtacaggtagatgtattggtgggcctgcttcttcaacatcatcatctcctcctccgatgctgcttacctctcagtcctcaccactcccctcatggtgaatgacccttctggcagttttcccaaatcaagtctgaatcgagcacttcagttgagagtagtcactctggagtagagcaatggagaattcatttgcacctctacatattcaagaaatcccttgggaaagtgagtacatctgacgtgtttgatgtcaaagactctgatttggtcccaggaaaatatgaaggtgtcaagtgggttgaagctttgggaaggttcattagacttggtgaaggccctgaattctgatatcaaagaatataaattgcgtgtagaaggcaaacacgtattagagcttggatgtggacatggactccgtggcatttttgcaggtctcaaggaatctggtgtgaaagggattttagtccctcgccactcgcttgatgtggactgatacagacatgatcgatggagtatagtgaactacatcataagctgtagcattcatcgatccagatccaaacgtccttcggactcttccttctgcatttgtgtggagtggggattcatccggccttcttctcttgcagatgaaaagcgtcatgagaaaggcaaagctgagtttaagaaggttgtagaatcactgggacatgtaatactcgggtggcgtctggttccgactgacaactcagacttgggtgaatctgcactcgagactgagccagtcattgagcaggttttcgttaccaagagctcaagatcagaggctgagtttgagcaacaggtattatcaagaaaacaaaaagaaaagaaacagatggctactttgagggcggcggtgggcatgctgctcggcggcgaggacatgcacaggttcccggtgcgctccccgcggatggaccgcggcgacctcatctgcagtcccgccgcgcggcagatcgtgtccaactacttcagcatgttcgggccggtgcaggacgtgcgcatcccgtaccagcagaagcacatgttcggcttcgtcaccttcgtgtacgccgagacggtgaaggtcatcccaagcaagggcaacccgcacttcgtgtgctacgcgcgcgtgctcgtcaagccctacaaggagaagggcaagatccccggcaggttcaggaagctgcagcacgcgcaccatggcggagccgagttcggcgattgcgcgtcgcccaccagattgctggatttcagggacccctacgccctcctgcttctttcaggtgcccaggttttctcctgggcatgaagccattgggctatgatgtgtgaggtgcatagagcaaaaaaaggggaaggggggccctccattcctctaatctgggagggactactaatatggctacatgatggccggccctatcaaccgagcgtagagaagctttgacaaagaaaaaagaaatacctttggagaggt

SEQ ID NO: 5825 - DNA, 3156 bp, Zea Mays
ccgcacgccagaaacctcgccgcaggaaaccgccgaccctaccacccgcccaccctaccgccctaccgcccgcccgcaaatccttccgccgcgaaccgcccaaccactcgctcccacgccgcaatcccaccgcgaaagccgcgaacccgacgccttccaccatcccgccggccgggcggcttctggggccaccccgaggacggccaccgctcgggcgacgcgaccttcaagggagggccccacgacgcgcgcctcaaggccttcttcgtctgcaacacccacatgtagccggctcgacgttctccgctaattcgcttggacgcctcgccggccggagggaaaggaagagtcggagtagcctgcccggctgggaaccgacagcttctccgtttcagaagcacgcgggcggggaggtggggtcgggagatcgcggggtgctcctttgtctccagggcagaggagaaacgcgcacggctggggaagaaccgaagaaggaagaggaaggtgccggtggaccaaacacggatctttcagtggagttcgggaagagtactggcacgcacgccaaggttgcatctccgccgtccaccacgaagcgcacgcgaacccgacgccttccaccatcccgccggtcgggcggcttctgggaccaccccgaggacggccaccgcccgggcgacgcgaccttcaagggagctcggcatgttcgacggggaccccgcggccgagccgttcgggcgcctgggccccgcggacgtgtgctccagggagcaccaggacctggcgctcgacgcgccgcgccagggcgtcgtgctcctcaagaaccggagcggtgggtggctacacccatactttgcagctacacccatactttgcagttacttaattcggagcggtgggcggccgctccctgccccgctccatctcgccagagaaggcaaagatctagctgccaagttctggcagctctctctgtgtgaatcaaacgatacgtacaggtagatgtattggtgggcctgcttcttcaacatcatcatctcctcctccgatgctgcttacctctcagtcctcaccactcccctcatggtgaatgacccttctggcagttttcccaaatcaagtctgaatcgagcacttcagttgagagtagtcactctggagtagagcaatggagaattcatttgcacctctacatattcaagaaatcccttgggaaagtgagtacatctgacgtgtttgatgtcaaagactctgatttggtcccaggaaaatatgaaggtgtcaagtgggttgaagctttgggaaggttcattagacttggtgaaggccctgaattctgatatcaaagaatataaattgcgtgtagaaggcaaacacgtattagagcttggatgtggacatggactccgtggcatttttgcaggtctcaaggaatctggtgtgaaagggattttagtccctcgccactcgcttgatgtggactgatacagacatgatcgatggagtatagtgaactacatcataagctgtagcattcatcgatccagatccaaacgtccttcggactcttccttctgcatttgtgtggagtggggattcatccggccttcttctcttgcaggtttctttggatgttttttatgccaacagatgaaaagcgtcatgagaaaggcaaagctgagtttaagaaggttgtagaatcactgggacatgtaatactcgggtggcgtctggttccgactgacaactcagacttgggtgaatctgcactcgagactgagccagtcattgagcaggttttcgttaccaagagctcaagatcagaggctgagtttgagcaacaggtaattccataccacttgagatgaggcaaccgacttttctggtcaccttgtaatgctgacactattaggcacaaatgagggaaatgtactgccacattaggcacaaagtagtgtatattgctaggtgcttattcctagaccatgctctgcttttagtttgtatttctcttatttttcttagggtgtgtcgttagctgtttccttcctgtaatcctgtgtagcgtaggaggcttacctgctctgtaagcttccttgtattgttctataaatgctttaatacagtcaggtattatcaagaaaacaaaaagaaaagaaacagatggctactttgaggtaaatatttcagggccatttgtatttacttatgaggtttagatcaaatgatagatgatgtcctgcatgattttggaattgcatttgtattgtataaacctgaatataaatgccatttttgtgaagtagtccgatagcatcaaaaatttgtgaagtagtctgatagcaacagaaactataattaattgagtcttattactcacactagatcttgtcccccaccgcctgatctgactacttttgagctgatttggtcaggaaaggtgccatttttacccagcggctgcctcgccaccaaattaaaggttgcattttgtctccggtctcaccattcccattttattctccgcgtgttgctgcctgctccagggcggcggtgggcatgctgctcggcggcgaggacatgcacaggttcccggtgcgctccccgcggatggaccgcggcgacctcatctgcagtcccgccgcgcggcagatcgtgtccaactacttcagcatgttcgggccggtgcaggacgtgcgcatcccgtaccagcagaagcacatgttcggcttcgtcaccttcgtgtacgccgagacggtgaaggtcatcccaagcaagggcaacccgcacttcgtgtgctacgcgcgcgtgctcgtcaagccctacaaggagaagggcaagatccccggcaggttcaggaagctgcagcacgcgcaccatggcggagccgagttcggcgattgcgcgtcgcccaccagattgctggatttcagggacccctacgccctcctgcttctttcaggtgcccaggttttctcctgggcatgaagccattgggctatgatgtgtgaggtgcatagagcaaaaaaaggggaaggggggccctccattcctctaatctgggagggactactaatatggctacatgatggccggccctatcaaccgagcgtagagaagctttgacaaagaaaaaagaaatacctttggagaggt

SEQ ID NO: 5826 - DNA, 2536 bp, Zea Mays
ccgcacgccagaaacctcgccgcaggaaaccgccgaccctaccacccgcccaccctaccgccctaccgcccgcccgcaaatccttccgccgcgaaccgcccaaccactcgctcccacgccgcaatcccaccgcgaaagccgcgaacccgacgccttccaccatcccgccggccgggcggcttctggggccaccccgaggacggccaccgctcgggcgacgcgaccttcaagggagggccccacgacgcgcgcctcaaggccttcttcgtctgcaacacccacatgtagccggctcgacgttctccgctaattcgcttggacgcctcgccggccggagggaaaggaagagtcggagtagcctgcccggctgggaaccgacagcttctccgtttcagaagcacgcgggcggggaggtggggtcgggagatcgcggggtgctcctttgtctccagggcagaggagaaacgcgcacggctggggaagaaccgaagaaggaagaggaaggtgccggtggaccaaacacggatctttcagtggagttcgggaagagtactggcacgcacgccaaggttgcatctccgccgtccaccacgaagcgcacgcgaacccgacgccttccaccatcccgccggtcgggcggcttctgggaccaccccgaggacggccaccgcccgggcgacgcgaccttcaagggagctcggcatgttcgacggggaccccgcggccgagccgttcgggcgcctgggccccgcggacgtgtgctccagggagcaccaggacctggcgctcgacgcgccgcgccagggcgtcgtgctcctcaagaaccggagcggtgggtggctacacccatactttgcagctacacccatactttgcagttacttaattcggagcggtgggcggccgctccctgccccgctccatctcgccagagaaggcaaagatctagctgccaagttctggcagctctctctgtgtgaatcaaacgatacgtacaggtagatgtattggtgggcctgcttcttcaacatcatcatctcctcctccgatgctgcttacctctcagtcctcaccactcccctcatggtgaatgacccttctggcagttttcccaaatcaagtctgaatcgagcacttcagttgagagtagtcactctggagtagagcaatggagaattcatttgcacctctacatattcaagaaatcccttgggaaagtgagtacatctgacgtgtttgatgtcaaagactctgatttggtcccaggaaaatatgaaggtgtcaagtgggttgaagctttgggaaggttcattagacttggtgaaggccctgaattctgatatcaaagaatataaattgcgtgtagaaggcaaacacgtattagagcttggatgtggacatggactccgtggcatttttgcaggtctcaaggaatctggtgtgaaagggattttagtccctcgccactcgcttgatgtggactgatacagacatgatcgatggagtatagtgaactacatcataagctgtagcattcatcgatccagatccaaacgtccttcggactcttccttctgcatttgtgtggagtggggattcatccggccttcttctcttgcagatgaaaagcgtcatgagaaaggcaaagctgagtttaagaaggttgtagaatcactgggacatgtaatactcgggtggcgtctggttccgactgacaactcagacttgggtgaatctgcactcgagactgagccagtcattgagcaggttttcgttaccaagagctcaagatcagaggctgagtttgagcaacaggaaaggtgccatttttacccagcggctgcctcgccaccaaattaaaggttgcattttgtctccggtctcaccattcccattttattctccgcgtgttgctgcctgctccagggcggcggtgggcatgctgctcggcggcgaggacatgcacaggttcccggtgcgctccccgcggatggaccgcggcgacctcatctgcagtcccgccgcgcggcagatcgtgtccaactacttcagcatgttcgggccggtgcaggacgtgcgcatcccgtaccagcagaagcacatgttcggcttcgtcaccttcgtgtacgccgagacggtgaaggtcatcccaagcaagggcaacccgcacttcgtgtgctacgcgcgcgtgctcgtcaagccctacaaggagaagggcaagatccccggcaggttcaggaagctgcagcacgcgcaccatggcggagccgagttcggcgattgcgcgtcgcccaccagattgctggatttcagggacccctacgccctcctgcttctttcaggtgcccaggttttctcctgggcatgaagccattgggctatgatgtgtgaggtgcatagagcaaaaaaaggggaaggggggccctccattcctctaatctgggagggactactaatatggctacatgatggccggccctatcaaccgagcgtagagaagctttgacaaagaaaaaagaaatacctttggagaggt

SEQ ID NO: 5827 - DNA, 2436 bp, Zea Mays
aaggtgccggtggaccaaacacggatctttcagtggagttcgggaagagtactggcacgcacgccaaggttgcatctccgccgtccaccacgaagcgcacgcgaacccgacgccttccaccatcccgccggtcgggcggcttctgggaccaccccgaggacggccaccgcccgggcgacgcgaccttcaagggagctcggcatgttcgacggggaccccgcggccgagccgttcgggcgcctgggccccgcggacgtgtgctccagggagcaccaggacctggcgctcgacgcgccgcgccagggcgtcgtgctcctcaagaaccggagcggtgggtggctacacccatactttgcagctacacccatactttgcagttacttaattcggagcggtgggcggccgctccctgccccgctccatctcgccagagaaggcaaagatctagctgccaagttctggcagctctctctgtgtgaatcaaacgatacgtacaggaggctttggatgcatgtctatctacgcagctggtcattgatatctcctgatgaagttaaactaagccaattttctttctcaatcttattaggggaaagtgagtacatctgacgtgtttgatgtcaaagactctgatttggtcccaggaaaatatgaaggtgtcaagtgggttgaagctttgggaaggttcattagacttggtgaaggccctgaattctgatatcaaagaatataaattgcgtgtagaaggcaaacacgtattagagcttggatgtggacatggactccgtggcatttttgcaggtctcaagtggagtatagtgaactacatcataagctgtagcattcatcgatccagatccaaacgtccttcggactcttccttctgcatttgtgtggagtggggattcatccggccttcttctcttgcagatgaaaagcgtcatgagaaaggcaaagctgagtttaagaaggttgtagaatcactgggacatgtaatactcgggtggcgtctggttccgactgacaactcagacttgggtgaatctgcactcgagactgagccagtcattgagcaggttttcgttaccaagagctcaagatcagaggctgagtttgagcaacaggtaattccataccacttgagatgaggcaaccgacttttctggtcaccttgtaatgctgacactattaggcacaaatgagggaaatgtactgccacattaggcacaaagtagtgtatattgctaggtgcttattcctagaccatgctctgcttttagtttgtatttctcttatttttcttagggtgtgtcgttagctgtttccttcctgtaatcctgtgtagcgtaggaggcttacctgctctgtaagcttccttgtattgttctataaatgctttaatacagtcaggtattatcaagaaaacaaaaagaaaagaaacagatggctactttgaggtaaatatttcagggccatttgtatttacttatgaggtttagatcaaatgatagatgatgtcctgcatgattttggaattgcatttgtattgtataaacctgaatataaatgccatttttgtgaagtagtccgatagcatcaaaaatttgtgaagtagtctgatagcaacagaaactataattaattgagtcttattactcacactagatcttgtcccccaccgcctgatctgactacttttgagctgatttggtcaggaaaggtgccatttttacccagcggctgcctcgccaccaaattaaaggttgcattttgtctccggtctcaccattcccattttattctccgcgtgttgctgcctgctccagggcggcggtgggcatgctgctcggcggcgaggacatgcacaggttcccggtgcgctccccgcggatggaccgcggcgacctcatctgcagtcccgccgcgcggcagatcgtgtccaactacttcagcatgttcgggccggtgcaggacgtgcgcatcccgtaccagcagaagcacatgttcggcttcgtcaccttcgtgtacgccgagacggtgaaggtcatcccaagcaagggcaacccgcacttcgtgtgctacgcgcgcgtgctcgtcaagccctacaaggagaagggcaagatccccggcaggttcaggaagctgcagcacgcgcaccatggcggagccgagttcggcgattgcgcgtcgcccaccagattgctggatttcagggacccctacgccctcctgcttctttcaggtgcccaggttttctcctgggcatgaagccattgggctatgatgtgtgaggtgcatagagcaaaaaaaggggaaggggggccctccattcctctaatctgggagggactactaatatggctacatgatggccggccctatcaaccgagcgtagagaagctttgacaaagaaaaaagaaatacctttggagaggt

SEQ ID NO: 5828 - DNA, 2070 bp, Zea Mays
gccggtcgggcggcttctgggaccaccccgaggacggccaccgcccgggcgacgcgaccttcaagggagctcggcatgttcgacggggaccccgcggccgagccgttcgggcgcctgggccccgcggacgtgtgctccagggagcaccaggacctggcgctcgacgcgccgcgccagggcgtcgtgctcctcaagaaccggagcggtgggtggctacacccatactttgcagctacacccatactttgcagttacttaattcggagcggtgggcggccgctccctgccccgctccatctcgccagagaaggcaaagatctagctgccaagttctggcagctctctctgtgtgaatcaaacgatacgtacaggaggctttggatgcatgtctatctacgcagctggtcattgatatctcctgatgaagttaaactaagccaattttctttctcaatcttattaggggaaactcaaccacaggtgtcaagtgggttgaagctttgggaaggttcattagacttggtgaaggccctgaattctgatatcaaagaatataaattgcgtgtagaaggcaaacacgtattagagcttggatgtggacatggactccgtggcatttttgcaggtctcaaggcaggcaagagcgctccacattcattaaggcatacattcgtagatggaagcataagtgaactatttgagtattgtgatttagtgcttgctcgttcgtggagtatagtgaactacatcataagctgtagcattcatcgatccagatccaaacgtccttcggactcttccttctgcatttgtgtggagtggggattcatccggccttcttctcttgcagatgaaaagcgtcatgagaaaggcaaagctgagtttaagaaggttgtagaatcactgggacatgtaatactcgggtggcgtctggttccgactgacaactcagacttgggtgaatctgcactcgagactgagccagtcattgagcaggttttcgttaccaagagctcaagatcagaggctgagtttgagcaacaggtattatcaagaaaacaaaaagaaaagaaacagatggctactttgaggtaaatatttcagggccatttgtatttacttatgaggtttagatcaaatgatagatgatgtcctgcatgattttggaattgcatttgtattgtataaacctgaatataaatgccatttttgtgaagtagtccgatagcatcaaaaatttgtgaagtagtctgatagcaacagaaactataattaattgagtcttattactcacactagatcttgtcccccaccgcctgatctgactacttttgagctgatttggtcaggaaaggtgccatttttacccagcggctgcctcgccaccaaattaaaggttgcattttgtctccggtctcaccattcccattttattctccgcgtgttgctgcctgctccagggcggcggtgggcatgctgctcggcggcgaggacatgcacaggttcccggtgcgctccccgcggatggaccgcggcgacctcatctgcagtcccgccgcgcggcagatcgtgtccaactacttcagcatgttcgggccggtgcaggacgtgcgcatcccgtaccagcagaagcacatgttcggcttcgtcaccttcgtgtacgccgagacggtgaaggtcatcccaagcaagggcaacccgcacttcgtgtgctacgcgcgcgtgctcgtcaagccctacaaggagaagggcaagatccccggcaggttcaggaagctgcagcacgcgcaccatggcggagccgagttcggcgattgcgcgtcgcccaccagattgctggatttcagggacccctacgccctcctgcttctttcaggtgcccaggttttctcctgggcatgaagccattgggctatgatgtgtgaggtgcatagagcaaaaaaaggggaaggggggccctccattcctctaatctgggagggactactaatatggctacatgatggccggccctatcaaccgagcgtagagaagctttgacaaagaaaaaagaaatacctttggagaggt

SEQ ID NO: 5829 - DNA, 2300 bp, Zea Mays
cttcaagggagctcggcatgttcgacggggaccccgcggccgagccgttcgggcgcctgggccccgcggacgtgtgctccagggagcaccaggacctggcgctcgacgcgccgcgccagggcgtcgtgctcctcaagaaccggagcggtgggtggctacacccatactttgcagctacacccatactttgcagttacttaattcggagcggtgggcggccgctccctgccccgctccatctcgccagagaaggcaaagatctagctgccaagttctggcagctctctctgtgtgaatcaaacgatacgtacaggaggctttggatgcatgtctatctacgcagctggtcattgatatctcctgatgaagttaaactaagccaattttctttctcaatcttattaggggaaactcaaccacaggtgtcaagtgggttgaagctttgggaaggttcattagacttggtgaaggccctgaattctgatatcaaagaatataaattgcgtgtagaaggcaaacacgtattagagcttggatgtggacatggactccgtggcatttttgcaggtctcaaggaatctggtgtgaaagggattttagtccctcgccactcgcttgatgtggactgatacagacatgatcgatggagtatagtgaactacatcataagctgtagcattcatcgatccagatccaaacgtccttcggactcttccttctgcatttgtgtggagtggggattcatccggccttcttctcttgcaggtttctttggatgttttttatgccaacagatgaaaagcgtcatgagaaaggcaaagctgagtttaagaaggttgtagaatcactgggacatgtaatactcgggtggcgtctggttccgactgacaactcagacttgggtgaatctgcactcgagactgagccagtcattgagcaggttttcgttaccaagagctcaagatcagaggctgagtttgagcaacaggtaattccataccacttgagatgaggcaaccgacttttctggtcaccttgtaatgctgacactattaggcacaaatgagggaaatgtactgccacattaggcacaaagtagtgtatattgctaggtgcttattcctagaccatgctctgcttttagtttgtatttctcttatttttcttagggtgtgtcgttagctgtttccttcctgtaatcctgtgtagcgtaggaggcttacctgctctgtaagcttccttgtattgttctataaatgctttaatacagtcaggtattatcaagaaaacaaaaagaaaagaaacagatggctactttgaggtaaatatttcagggccatttgtatttacttatgaggtttagatcaaatgatagatgatgtcctgcatgattttggaattgcatttgtattgtataaacctgaatataaatgccatttttgtgaagtagtccgatagcatcaaaaatttgtgaagtagtctgatagcaacagaaactataattaattgagtcttattactcacactagatcttgtcccccaccgcctgatctgactacttttgagctgatttggtcaggaaaggtgccatttttacccagcggctgcctcgccaccaaattaaaggttgcattttgtctccggtctcaccattcccattttattctccgcgtgttgctgcctgctccagggcggcggtgggcatgctgctcggcggcgaggacatgcacaggttcccggtgcgctccccgcggatggaccgcggcgacctcatctgcagtcccgccgcgcggcagatcgtgtccaactacttcagcatgttcgggccggtgcaggacgtgcgcatcccgtaccagcagaagcacatgttcggcttcgtcaccttcgtgtacgccgagacggtgaaggtcatcccaagcaagggcaacccgcacttcgtgtgctacgcgcgcgtgctcgtcaagccctacaaggagaagggcaagatccccggcaggttcaggaagctgcagcacgcgcaccatggcggagccgagttcggcgattgcgcgtcgcccaccagattgctggatttcagggacccctacgccctcctgcttctttcaggtgcccaggttttctcctgggcatgaagccattgggctatgatgtgtgaggtgcatagagcaaaaaaaggggaaggggggccctccattcctctaatctgggagggactactaatatggctacatgatggccggccctatcaaccgagcgtagagaagctttgacaaagaaaaaagaaatacctttggagaggt

SEQ ID NO: 5830 - DNA, 1663 bp, Zea Mays
atgttcgacggggaccccgcggccgagccgttcgggcgcctgggccccgcggacgtgtgctccagggagcaccaggacctggcgctcgacgcgccgcgccagggcgtcgtgctcctcaagaaccggagcggtgggtggctacacccatactttgcagctacacccatactttgcagttacttaattcggagcggtgggcggccgctccctgccccgctccatctcgccagagaaggcaaagatctagctgccaagttctggcagctctctctgtgtgaatcaaacgatacgtacaggaggctttggatgcatgtctatctacgcagctggtcattgatatctcctgatgaagttaaactaagccaattttctttctcaatcttattaggggaaactcaaccacaggtgtcaagtgggttgaagctttgggaaggttcattagacttggtgaaggccctgaattctgatatcaaagaatataaattgcgtgtagaaggcaaacacgtattagagcttggatgtggacatggactccgtggcatttttgcaggtctcaaggaatctggtgtgaaagggattttagtccctcgccactcgcttgatgtggactgatacagacatgatcgatggagtatagtgaactacatcataagctgtagcattcatcgatccagatccaaacgtccttcggactcttccttctgcatttgtgtggagtggggattcatccggccttcttctcttgcagatgaaaagcgtcatgagaaaggcaaagctgagtttaagaaggttgtagaatcactgggacatgtaatactcgggtggcgtctggttccgactgacaactcagacttgggtgaatctgcactcgagactgagccagtcattgagcaggttttcgttaccaagagctcaagatcagaggctgagtttgagcaacaggaaaggtgccatttttacccagcggctgcctcgccaccaaattaaaggttgcattttgtctccggtctcaccattcccattttattctccgcgtgttgctgcctgctccagggcggcggtgggcatgctgctcggcggcgaggacatgcacaggttcccggtgcgctccccgcggatggaccgcggcgacctcatctgcagtcccgccgcgcggcagatcgtgtccaactacttcagcatgttcgggccggtgcaggacgtgcgcatcccgtaccagcagaagcacatgttcggcttcgtcaccttcgtgtacgccgagacggtgaaggtcatcccaagcaagggcaacccgcacttcgtgtgctacgcgcgcgtgctcgtcaagccctacaaggagaagggcaagatccccggcaggttcaggaagctgcagcacgcgcaccatggcggagccgagttcggcgattgcgcgtcgcccaccagattgctggatttcagggacccctacgccctcctgcttctttcaggtgcccaggttttctcctgggcatgaagccattgggctatgatgtgtgaggtgcatagagcaaaaaaaggggaaggggggccctccattcctctaatctgggagggactactaatatggctacatgatggccggccctatcaaccgagcgtagagaagctttgacaaagaaaaaagaaatacctttggagaggt

SEQ ID NO: 5831 - DNA, 2281 bp, Zea Mays
atgttcgacggggaccccgcggccgagccgttcgggcgcctgggccccgcggacgtgtgctccagggagcaccaggacctggcgctcgacgcgccgcgccagggcgtcgtgctcctcaagaaccggagcggtgggtggctacacccatactttgcagctacacccatactttgcagttacttaattcggagcggtgggcggccgctccctgccccgctccatctcgccagagaaggcaaagatctagctgccaagttctggcagctctctctgtgtgaatcaaacgatacgtacaggaggctttggatgcatgtctatctacgcagctggtcattgatatctcctgatgaagttaaactaagccaattttctttctcaatcttattaggggaaactcaaccacaggtgtcaagtgggttgaagctttgggaaggttcattagacttggtgaaggccctgaattctgatatcaaagaatataaattgcgtgtagaaggcaaacacgtattagagcttggatgtggacatggactccgtggcatttttgcaggtctcaaggcaggcaagagcgctccacattcattaaggcatacattcgtagatggaagcataagtgaactatttgagtattgtgatttagtgcttgctcgttcgtggagtatagtgaactacatcataagctgtagcattcatcgatccagatccaaacgtccttcggactcttccttctgcatttgtgtggagtggggattcatccggccttcttctcttgcagatgaaaagcgtcatgagaaaggcaaagctgagtttaagaaggttgtagaatcactgggacatgtaatactcgggtggcgtctggttccgactgacaactcagacttgggtgaatctgcactcgagactgagccagtcattgagcaggttttcgttaccaagagctcaagatcagaggctgagtttgagcaacaggtaattccataccacttgagatgaggcaaccgacttttctggtcaccttgtaatgctgacactattaggcacaaatgagggaaatgtactgccacattaggcacaaagtagtgtatattgctaggtgcttattcctagaccatgctctgcttttagtttgtatttctcttatttttcttagggtgtgtcgttagctgtttccttcctgtaatcctgtgtagcgtaggaggcttacctgctctgtaagcttccttgtattgttctataaatgctttaatacagtcaggtattatcaagaaaacaaaaagaaaagaaacagatggctactttgaggtaaatatttcagggccatttgtatttacttatgaggtttagatcaaatgatagatgatgtcctgcatgattttggaattgcatttgtattgtataaacctgaatataaatgccatttttgtgaagtagtccgatagcatcaaaaatttgtgaagtagtctgatagcaacagaaactataattaattgagtcttattactcacactagatcttgtcccccaccgcctgatctgactacttttgagctgatttggtcaggaaaggtgccatttttacccagcggctgcctcgccaccaaattaaaggttgcattttgtctccggtctcaccattcccattttattctccgcgtgttgctgcctgctccagggcggcggtgggcatgctgctcggcggcgaggacatgcacaggttcccggtgcgctccccgcggatggaccgcggcgacctcatctgcagtcccgccgcgcggcagatcgtgtccaactacttcagcatgttcgggccggtgcaggacgtgcgcatcccgtaccagcagaagcacatgttcggcttcgtcaccttcgtgtacgccgagacggtgaaggtcatcccaagcaagggcaacccgcacttcgtgtgctacgcgcgcgtgctcgtcaagccctacaaggagaagggcaagatccccggcaggttcaggaagctgcagcacgcgcaccatggcggagccgagttcggcgattgcgcgtcgcccaccagattgctggatttcagggacccctacgccctcctgcttctttcaggtgcccaggttttctcctgggcatgaagccattgggctatgatgtgtgaggtgcatagagcaaaaaaaggggaaggggggccctccattcctctaatctgggagggactactaatatggctacatgatggccggccctatcaaccgagcgtagagaagctttgacaaagaaaaaagaaatacctttggagaggt

SEQ ID NO: 5832 - DNA, 1626 bp, Zea Mays
atgttcgacggggaccccgcggccgagccgttcgggcgcctgggccccgcggacgtgtgctccagggagcaccaggacctggcgctcgacgcgccgcgccagggcgtcgtgctcctcaagaaccggagcggtgggtggctacacccatactttgcagctacacccatactttgcagttacttaattcggagcggtgggcggccgctccctgccccgctccatctcgccagagaaggcaaagatctagctgccaagttctggcagctctctctgtgtgaatcaaacgatacgtacaggaggctttggatgcatgtctatctacgcagctggtcattgatatctcctgatgaagttaaactaagccaattttctttctcaatcttattaggggaaactcaaccacaggtgtcaagtgggttgaagctttgggaaggttcattagacttggtgaaggccctgaattctgatatcaaagaatataaattgcgtgtagaaggcaaacacgtattagagcttggatgtggacatggactccgtggcatttttgcaggtctcaaggcaggcaagagcgctccacattcattaaggcatacattcgtagatggaagcataagtgaactatttgagtattgtgatttagtgcttgctcgttcgtggagtatagtgaactacatcataagctgtagcattcatcgatccagatccaaacgtccttcggactcttccttctgcatttgtgtggagtggggattcatccggccttcttctcttgcagatgaaaagcgtcatgagaaaggcaaagctgagtttaagaaggttgtagaatcactgggacatgtaatactcgggtggcgtctggttccgactgacaactcagacttgggtgaatctgcactcgagactgagccagtcattgagcaggttttcgttaccaagagctcaagatcagaggctgagtttgagcaacaggtattatcaagaaaacaaaaagaaaagaaacagatggctactttgagggcggcggtgggcatgctgctcggcggcgaggacatgcacaggttcccggtgcgctccccgcggatggaccgcggcgacctcatctgcagtcccgccgcgcggcagatcgtgtccaactacttcagcatgttcgggccggtgcaggacgtgcgcatcccgtaccagcagaagcacatgttcggcttcgtcaccttcgtgtacgccgagacggtgaaggtcatcccaagcaagggcaacccgcacttcgtgtgctacgcgcgcgtgctcgtcaagccctacaaggagaagggcaagatccccggcaggttcaggaagctgcagcacgcgcaccatggcggagccgagttcggcgattgcgcgtcgcccaccagattgctggatttcagggacccctacgccctcctgcttctttcaggtgcccaggttttctcctgggcatgaagccattgggctatgatgtgtgaggtgcatagagcaaaaaaaggggaaggggggccctccattcctctaatctgggagggactactaatatggctacatgatggccggccctatcaaccgagcgtagagaagctttgacaaagaaaaaagaaatacctttggagaggt

SEQ ID NO: 5833 - DNA, 2064 bp, Zea Mays
atgttcgacggggaccccgcggccgagccgttcgggcgcctgggccccgcggacgtgtgctccagggagcaccaggacctggcgctcgacgcgccgcgccagggcgtcgtgctcctcaagaaccggagcggtgggtggctacacccatactttgcagctacacccatactttgcagttacttaattcggagcggtgggcggccgctccctgccccgctccatctcgccagagaaggcaaagatctagctgccaagttctggcagctctctctgtgtgaatcaaacgatacgtacaggaggctttggatgcatgtctatctacgcagctggtcattgatatctcctgatgaagttaaactaagccaattttctttctcaatcttattaggggaaactcaaccacaggtgtcaagtgggttgaagctttgggaaggttcattagacttggtgaaggccctgaattctgatatcaaagaatataaattgcgtgtagaaggcaaacacgtattagagcttggatgtggacatggactccgtggcatttttgcaggtctcaagatgaaaagcgtcatgagaaaggcaaagctgagtttaagaaggttgtagaatcactgggacatgtaatactcgggtggcgtctggttccgactgacaactcagacttgggtgaatctgcactcgagactgagccagtcattgagcaggttttcgttaccaagagctcaagatcagaggctgagtttgagcaacaggtaattccataccacttgagatgaggcaaccgacttttctggtcaccttgtaatgctgacactattaggcacaaatgagggaaatgtactgccacattaggcacaaagtagtgtatattgctaggtgcttattcctagaccatgctctgcttttagtttgtatttctcttatttttcttagggtgtgtcgttagctgtttccttcctgtaatcctgtgtagcgtaggaggcttacctgctctgtaagcttccttgtattgttctataaatgctttaatacagtcaggtattatcaagaaaacaaaaagaaaagaaacagatggctactttgaggtaaatatttcagggccatttgtatttacttatgaggtttagatcaaatgatagatgatgtcctgcatgattttggaattgcatttgtattgtataaacctgaatataaatgccatttttgtgaagtagtccgatagcatcaaaaatttgtgaagtagtctgatagcaacagaaactataattaattgagtcttattactcacactagatcttgtcccccaccgcctgatctgactacttttgagctgatttggtcaggaaaggtgccatttttacccagcggctgcctcgccaccaaattaaaggttgcattttgtctccggtctcaccattcccattttattctccgcgtgttgctgcctgctccagggcggcggtgggcatgctgctcggcggcgaggacatgcacaggttcccggtgcgctccccgcggatggaccgcggcgacctcatctgcagtcccgccgcgcggcagatcgtgtccaactacttcagcatgttcgggccggtgcaggacgtgcgcatcccgtaccagcagaagcacatgttcggcttcgtcaccttcgtgtacgccgagacggtgaaggtcatcccaagcaagggcaacccgcacttcgtgtgctacgcgcgcgtgctcgtcaagccctacaaggagaagggcaagatccccggcaggttcaggaagctgcagcacgcgcaccatggcggagccgagttcggcgattgcgcgtcgcccaccagattgctggatttcagggacccctacgccctcctgcttctttcaggtgcccaggttttctcctgggcatgaagccattgggctatgatgtgtgaggtgcatagagcaaaaaaaggggaaggggggccctccattcctctaatctgggagggactactaatatggctacatgatggccggccctatcaaccgagcgtagagaagctttgacaaagaaaaaagaaatacctttggagaggt

SEQ ID NO: 5834 - DNA, 1450 bp, Zea Mays
cgcagataacctaagcccatctcaagttctcaacctcattttcttaaaaaaaatctcaatcgcaacaacacaaaaaagacccgcaatatcgattagcgagagtcgttcctccaccaaaccaaccaattcgcttctccgtcaacttcacttcctcgtcgacgcctccgtcccaccaaccatgccggcggccatggcggctgcggcggcgcagaggctcctcgcggcgagcacgaaaatcatcggcgttgggcgcaactacatagcccacgccaaggagctcggcaatccggtccccaaggagcccgtcctgttcctgaagccgacctcgtcgtttctccacgctggtgtggccaccgccgccgtcgagatcccggagccgctcgagtcgctacaccacgaggtcgagctcgccgtcgtcatctcccggcgtgggcgcgacgttcccgaggcgtccgccatggactttgttggaggttatgcacttgctttggacatgacagcaagggaccttcagtctgttgctaagtctgcaggccttccatggactttggctaaaggacaagacaccttcaccccaattagtgcagtagttccaaaatcagctgtcactaatcccgatgatctcgagctctggctgaaggtagatgatgaactaaggcagaaaggaccgacaagcgacatgctattcaagattccttttctgataagctatatcagttccatcatgacattaatggagggtgatgtgatactaacaggtactcctgagggtgtgggtcctgtccgagtaggtcagaagattacagctggtataactgacctaattgatgttgagttcgatgttcagaggcgcaatcggtcattttccacatgatgcaataagcaagaaagtaatggtgaatacaaagtgcagtactcgtcctcgaccttgaatcgcattactggacctggagccattgcagatagctcttgagccttaccttgatttaatttacctgggttttgagagactatctatgaatatgctaactccgacttgaaacagcttccgagtggggtgcacggccgatctatgtaacgtacgcgcataagaaatggtgtcctacaaaatgccttccacttgcttgaaacgatatgtagatggacagcgacgacgaacaccttaactccctctcgctagatatcgagccagcttagttcggttcgactgagcttgagctgactcgttaaggtaaagagatgacttggttcgttaaacaattgagtcagagaattagcttggctcgtttgcaagtttgggctggctcgtttacctcgcgagtaaaaaaatacatgtatatataaaatagtatagtcaattgctagttaattttatacaaatttaacattagaaaagagtaattatactcataatttcatatatattacatcttttaaaccctatattaac

SEQ ID NO: 5835 - DNA, 1953 bp, Zea Mays
cctaagcccatctcaagttctcaacctcattttcttaaaaaaaatctcaatcgcaacaacacaaaaaagacccgcaatatcgattagcgagagtcgttcctccaccaaaccaaccaattcgcttctccgtcaacttcacttcctcgtcgacgcctccgtcccaccaaccatgccggcggccatggcggctgcggcggcgcagaggctcctcgcggcgagcacgaaaatcatcggcgttgggcgcaactacatagcccacgccaaggagctcggcaatccggtccccaaggtgcggtctgcggctccgcgcgcttcccgtcctcgatcccaaaacactgccgcgcctccaacttccctccctctccttcctgcgcggtctctggtttgatcccccgtgtgtttgggtgtgttgcaggagcccgtcctgttcctgaagccgacctcgtcgtttctccacgctggtgtggccaccgccgccgtcgagatcccggagccgctcgagtcgctacaccacgaggtcgagctcgccgtcgtcatctcccggcgtgggcgcgacgttcccgaggcgtccgccatggactttgttggaggttatgcacttgctttggacatgacagcaagggaccttcagtctgttgctaagtctgcaggccttccatggactttggctaaaggacaagacaccttcaccccaattagtgcagtagtaagcaatgatttttcttccctgtgcttggagttggttggtggtggataaggacaatatgttttatttatttgtactcgcttgttataattacacctcaatgaatcaatgccatagtcaggttagtcatgcagaagtgttgttagatagaaacacttgatctttgttgccttccatgctctccgcaggcatctagtgacatgaaatgtgtaatcccgtcattattacacaccatgtttttacttaagttaacaataatttctccatcaaccaggttccaaaatcagctgtcactaatcccgatgatctcgagctctggctgaaggtagatgatgaactaaggcagaaaggaccgacaagcgacatgctattcaagattccttttctgataagctatatcagttccatcatgacattaatggagggtgatgtgatactaacaggtactcctgagggtgtgggtcctgtccgagtaggtcagaagattacagctggtataactgacctaattgatgttgagttcgatgttcagaggcgcaatcggtcattttccacatgatgcaataagcaagaaagtaatggtgaatacaaagtgcagtactcgtcctcgaccttgaatcgcattactggacctggagccattgcagatagctcttgagccttaccttgatttaatttacctgggttttgagagactatctatgaatatgctaactcgttcgtaaagtatctttttgtcccaattttgattgatggagctttaagcttgcttttctgtatgcaataaaaaaacttatcacatttttctttctttctttctttccagcagcgacttgaaacagcttccgagtggggtgcacggccgatctatgtaacgtacgcgcataagaaatggtgtcctacaaaatgccttccacttgcttgaaacgatatgtagatggacagcgacgacgaacaccttaactccctctcgctagatatcgagccagcttagttcggttcgactgagcttgagctgactcgttaaggtaaagagatgacttggttcgttaaacaattgagtcagagaattagcttggctcgtttgcaagtttgggctggctcgtttacctcgcgagtaaaaaaatacatgtatatataaaatagtatagtcaattgctagttaattttatacaaatttaacattagaaaagagtaattatactcataatttcatatatattacatcttttaaaccctatattaac

SEQ ID NO: 5836 - DNA, 2856 bp, Zea Mays
cttgcattgaccgacgagaaatacgtctctactctctacggcttcatcaagcgagagacggaagacacgaaacaagcagcgtcccgcgcggtgtgacgcgcccaccgcgctctggctccagcccctgcgtctctcctcctcgcctcctcctcgtccgcacgaccacgcacgctcgcgcagtcgcttcgccgctttcagatccaaacccagcgtgttaaaaaagcgctcaaagcgaccaaaaccctaaccctaatcaccgcaattcctcaatccccggcaccgcgcaaaaccctagcccagccccaccgccacatacccgcccctctcgccgctgccgacatggcaggcccatccggcgccgcggcctcctcctccacttctcgtggcgtgccggagaaccggttctacaaccctcctcacgtacgtcgacagcagcagcaggagcaacagcggttgcggtccgcgtccccgtccccgtcaccgtcgccgtcgccgcggtcggcacggcagaagcccccgccgccgccgggggccctggcctcggcggcggatgtggacagtcgggtggattctgacgactcctcgtcgacgacctcgtccaagccgtcggtggcgtccacggcggcggggaatttggagaggtttctcacctccacgacgccttccgtgaccgcgcagtacttgcccaagacaagcctaaggatgcggcggggtggtgattctatggattcacggccttatttcgttctgggagatctttgggaatctttcagggaatggagtgcttacggggctggtgttccactggtgttaaatgacagtgactctgttattcagtattatgtgccatatctttctgctatccaactatttgcggacccatctagaccagcttcaagaaacaggcgtcctggggatgaaagtgatggggaatctatggatactagcagtgagagcagcattgagaatgatgttgagcggctaagagtctcatcattactagaaggtacacatcgattggaaaatggtggcgtacgaagtgatgatggtaaaggtgatgcatcttcaagctttccaatatttgagtatatggagagggatcctccatatggtagagagcctctgacagacaaggcatcaactcttgcacatagatttccagctctgaagacgttcaaaagctgtgatctgctgccatcgagctggatgtctgttgcatggtaccccatatatagaattccaacagggccaacactgaaggatctcgatgcctgttttttgacattccattgcctagcaacgccttgcaaggattgtgaccctcctacgccagcatgccctggctttggggggatcaaccgctgcacagctgcatctgggaagctatctttgcctacctttgggctggcaccgtacaaattccgtgcctccatttggatacctgacggaacccaagaacaggaccgcgtcacctcactgatgcaggaggctgacagctggctccgcagaatacgagtagaccatccggacttccggttcttcgtctcccgttccagtacgatgtggagatgactcgcggctgtaaatggtttttcttttttagtatgattaccgcctcgccgtacaaactgaacccccttctggtgcaccaagtgccctctcgtaacgggggttgtatgaattataagcctgcatttttaacttttttcttttcttccgtgcctccaataagttgtaactgttgtaggtttgttttgtgggaaagtaaagatggatggtggaaaaaggcagatgtagaactggaatgaaagaggcaaaaataggacaaaattgaaagtagaattgggtatatgctgcgaaaacaagatggatgcccggcattggttccacttgcaggcagtcccgggcaagaggagcagctgcgggacggacggggcgcccactgctcctccactctcgctaaaacaattcaattcgcaccagctgctgggatcggagacatcgttcagcgtcagcgcagcgtgccgccctcacctgctcgatatttaaaatttctccagaagaagcggcatgccaatgccaatgccatgccaagcaccagcgacgaaagcagccttttcacgtctcgccgctagatatacgtgcgggcgccacggggcctcccacgtccgtccagagcctgcaagagcgcgatgaggggcctgcaggaggagttccggggcggtgcgcagccggcggcgtcgcacgacgggggcggcagcgaggggcgcgcggcgtcgtggtggtcgtcgggcgaccccgaggcgaagcggcggcggagggtggccgggtacaaggcctacgccgtggaggccagggtcaaggcgtcgctccgcaagggcttccgctggatcaaggaccgctgcaccggcctcgtgcgccgctactgaatctgaccacccgcccatcgacctgcagctgctgcgtcgtcgtgttgttacgatcgtccttttttttttgaaaatttattgaaggcccgtgcttcttcttctcttcttcttttccttctccactgttttcctcgcatgctacatgacagtctctctctctcgttaactctgttggtgttcttattatttgatccggatgcaagtaatactatacaaacaggaatcgggaatgcacgctcccaatttttgacgcctccatgcatgtagtggtggagttccgtaaaattaacgtccgagatgtactattctatcttttgattttttttttcgtgttttatttaaaaataaacaacggatgataaatatttaataacagagagtaacatttaaaacaatccagttaaactatgacaagtagggaaagtgg

SEQ ID NO: 5837 - DNA, 1928 bp, Zea Mays
catcaagcgagagacggaagacacgaaacaagcagcgtcccgcgcggtgtgacgcgcccaccgcgctctggctccagcccctgcgtctctcctcctcgcctcctcctcgtccgcacgaccacgcacgctcgcgcagtcgcttcgccgctttcagatccaaacccagcgtgttaaaaaagcgctcaaagcgaccaaaaccctaaccctaatcaccgcaattcctcaatccccggcaccgcgcaaaaccctagcccagccccaccgccacatacccgcccctctcgccgctgccgacatggcaggcccatccggcgccgcggcctcctcctccacttctcgtggcgtgccggagaaccggttctacaaccctcctcacgtacgtcgacagcagcagcaggagcaacagcggttgcggtccgcgtccccgtccccgtcaccgtcgccgtcgccgcggtcggcacggcagaagcccccgccgccgccgggggccctggcctcggcggcggatgtggacagtcgggtggattctgacgactcctcgtcgacgacctcgtccaagccgtcggtggcgtccacggcggcggggaatttggagaggtttctcacctccacgacgccttccgtgaccgcgcagtacttgcccaagacaagcctaaggatgcggcggggtggtgattctatggattcacggccttatttcgttctgggagatctttgggaatctttcagggaatggagtgcttacggggctggtgttccactggtgttaaatgacagtgactctgttattcagtattatgtgccatatctttctgctatccaactatttgcggacccatctagaccagcttcaagaaacagcagtgagagcagcattgagaatgatgttgagcggctaagagtctcatcattactagaaggtacacatcgattggaaaatggtggcgtacgaagtgatgatggtaaaggtgatgcatcttcaagctttccaatatttgagtatatggagagggatcctccatatggtagagagcctctgacagacaagatttccagctctgaagacgttcaaaagctgtgatctgctgccatcgagctggatgtctgttgcatggtaccccatatatagaattccaacagggccaacactgaaggatctcgatgcctgttttttgacattccattgcctagcaacgccttgcaaggattgtgaccctcctacgccagcatgccctggctttggggggatcaaccgctgcacagctgcatctgggaagctatctttgcctacctttgggctggcaccgtacaaattccgtgcctccatttggatacctgacggaacccaagaacaggaccgcgtcacctcactgatgcaggaggctgacagctggctccgcagaatacgagtagaccatccggacttccggttcttcgtctcccgttccagtacgatgtggagatgactcgcggctgtaaatggtttttcttttttagtatgattaccgcctcgccgtacaaactgaacccccttctggtgcaccaagtgccctctcgtaacgggggttgtatgaattataagcctgcatttttaacttttttcttttcttccgtgcctccaataagttgtaactgttgtaggtttgttttgtgggaaagtaaagatggatggtggaaaaaggcagatgtagaactggaatgaaagaggcaaaaataggacaaaattgaaaggtaactattagagttgagaagtctcagtgtgttcattcatgtattgtattggatgtcgctcaccggagtccagaggtgccatggacgaacatgctgagcctatgttacccccaagtacaacgtttatttgttttcataatataggatgctgatgtatctttctcatgttatagtgcacaagtccgtcagtcacctgt

SEQ ID NO: 5838 - DNA, 1856 bp, Zea Mays
catcaagcgagagacggaagacacgaaacaagcagcgtcccgcgcggtgtgacgcgcccaccgcgctctggctccagcccctgcgtctctcctcctcgcctcctcctcgtccgcacgaccacgcacgctcgcgcagtcgcttcgccgctttcagatccaaacccagcgtgttaaaaaagcgctcaaagcgaccaaaaccctaaccctaatcaccgcaattcctcaatccccggcaccgcgcaaaaccctagcccagccccaccgccacatacccgcccctctcgccgctgccgacatggcaggcccatccggcgccgcggcctcctcctccacttctcgtggcgtgccggagaaccggttctacaaccctcctcacgtacgtcgacagcagcagcaggagcaacagcggttgcggtccgcgtccccgtccccgtcaccgtcgccgtcgccgcggtcggcacggcagaagcccccgccgccgccgggggccctggcctcggcggcggatgtggacagtcgggtggattctgacgactcctcgtcgacgacctcgtccaagccgtcggtggcgtccacggcggcggggaatttggagaggtttctcacctccacgacgccttccgtgaccgcgcagtacttgcccaagacaagcctaaggatgcggcggggtggtgattctatggattcacggccttatttcgttctgggagatctttgggaatctttcagggaatggagtgcttacggggctggtgttccactggtgttaaatgacagtgactctgttattcagtattatgtgccatatctttctgctatccaactatttgcggacccatctagaccagcttcaagaaacagcagtgagagcagcattgagaatgatgttgagcggctaagagtctcatcattactagaaggtacacatcgattggaaaatggtggcgtacgaagtgatgatggtaaaggtgatgcatcttcaagctttccaatatttgagtatatggagagggatcctccatatggtagagagcctctgacagacaaggcatcaactcttgcacatagatttccagctctgaagacgttcaaaagctgtgatctgctgccatcgagctggatgtctgttgcatgattgtgaccctcctacgccagcatgccctggctttggggggatcaaccgctgcacagctgcatctgggaagctatctttgcctacctttgggctggcaccgtacaaattccgtgcctccatttggatacctgacggaacccaagaacaggaccgcgtcacctcactgatgcaggaggctgacagctggctccgcagaatacgagtagaccatccggacttccggttcttcgtctcccgttccagtacgatgtggagatgactcgcggctgtaaatggtttttcttttttagtatgattaccgcctcgccgtacaaactgaacccccttctggtgcaccaagtgccctctcgtaacgggggttgtatgaattataagcctgcatttttaacttttttcttttcttccgtgcctccaataagttgtaactgttgtaggtttgttttgtgggaaagtaaagatggatggtggaaaaaggcagatgtagaactggaatgaaagaggcaaaaataggacaaaattgaaaggtaactattagagttgagaagtctcagtgtgttcattcatgtattgtattggatgtcgctcaccggagtccagaggtgccatggacgaacatgctgagcctatgttacccccaagtacaacgtttatttgttttcataatataggatgctgatgtatctttctcatgttatagtgcacaagtccgtcagtcacctgt

SEQ ID NO: 5839 - DNA, 1948 bp, Zea Mays
catcaagcgagagacggaagacacgaaacaagcagcgtcccgcgcggtgtgacgcgcccaccgcgctctggctccagcccctgcgtctctcctcctcgcctcctcctcgtccgcacgaccacgcacgctcgcgcagtcgcttcgccgctttcagatccaaacccagcgtgttaaaaaagcgctcaaagcgaccaaaaccctaaccctaatcaccgcaattcctcaatccccggcaccgcgcaaaaccctagcccagccccaccgccacatacccgcccctctcgccgctgccgacatggcaggcccatccggcgccgcggcctcctcctccacttctcgtggcgtgccggagaaccggttctacaaccctcctcacgtacgtcgacagcagcagcaggagcaacagcggttgcggtccgcgtccccgtccccgtcaccgtcgccgtcgccgcggtcggcacggcagaagcccccgccgccgccgggggccctggcctcggcggcggatgtggacagtcgggtggattctgacgactcctcgtcgacgacctcgtccaagccgtcggtggcgtccacggcggcggggaatttggagaggtttctcacctccacgacgccttccgtgaccgcgcagtacttgcccaagacaagcctaaggatgcggcggggtggtgattctatggattcacggccttatttcgttctgggagatctttgggaatctttcagggaatggagtgcttacggggctggtgttccactggtgttaaatgacagtgactctgttattcagtattatgtgccatatctttctgctatccaactatttgcggacccatctagaccagcttcaagaaacagcagtgagagcagcattgagaatgatgttgagcggctaagagtctcatcattactagaaggtacacatcgattggaaaatggtggcgtacgaagtgatgatggtaaaggtgatgcatcttcaagctttccaatatttgagtatatggagagggatcctccatatggtagagagcctctgacagacaaggcatcaactcttgcacatagatttccagctctgaagacgttcaaaagctgtgatctgctgccatcgagctggatgtctgttgcatggtaccccatatatagaattccaacagggccaacactgaaggatctcgatgcctgttttttgacattccattgcctagcaacgccttgcaaggattgtgaccctcctacgccagcatgccctggctttggggggatcaaccgctgcacagctgcatctgggaagctatctttgcctacctttgggctggcaccgtacaaattccgtgcctccatttggatacctgacggaacccaagaacaggaccgcgtcacctcactgatgcaggaggctgacagctggctccgcagaatacgagtagaccatccggacttccggttcttcgtctcccgttccagtacgatgtggagatgactcgcggctgtaaatggtttttcttttttagtatgattaccgcctcgccgtacaaactgaacccccttctggtgcaccaagtgccctctcgtaacgggggttgtatgaattataagcctgcatttttaacttttttcttttcttccgtgcctccaataagttgtaactgttgtaggtttgttttgtgggaaagtaaagatggatggtggaaaaaggcagatgtagaactggaatgaaagaggcaaaaataggacaaaattgaaaggtaactattagagttgagaagtctcagtgtgttcattcatgtattgtattggatgtcgctcaccggagtccagaggtgccatggacgaacatgctgagcctatgttacccccaagtacaacgtttatttgttttcataatataggatgctgatgtatctttctcatgttatagtgcacaagtccgtcagtcacctgt

SEQ ID NO: 5840 - DNA, 3099 bp, Zea Mays
tcccctccaatccggcaccctcctctctcctcaccccacctcacgcaggcggcattaatggattccgcagccgcggccacctccctccgccccgcgtcctcccggccgcggcgagagccctgacgtgacgcgcttccccccgcacggatcctcctccctccacgccgtcgtttgctcggggtgttcgttgggggaggttgcggtgaggagaaatggatgtagagaaacctgcttccaaggcgcatggtttctttgcgctcttcgattggggaaagaagtctaagaagcgcctgttcgtcgggagcaccagcagtgatccaaatctgaaggatgctgcagatgggaaggatattgatgatagtacaccaacaacaagtacacgatccttgaagatgccccaagtttgaaggaaagcagtgagcacagctgctcatcttcagtaattgatgaagaagctcagtcaagaagaagtccgactgttgtggctaggcttatgggtttggattctatgcccgcggcaagctcacccgaatccaatcccgttccattaactgtgcaaccccctttccaacccaacagccacgaggatttgatcggcagaagttatgttggtagtccccttaagatgccgggtagtcctattgatcggtttaaaatggaagcactgcctccaagacttgccaagaggacactatctgtcgcacagtataagttgctgtctcccatgaaaaaccctaaccatatatccagcaggaatgcagctgatataatggaagcagcatcaaggatcatcagacctggagtagaaaatatcagttcttacagagttcacgatgttgggaacacaaatgctgcacgtgcctacaacccaggagagctcataggagtccaacaaaggtcacagaagcttaatgaagcactgaggaaacgtgatggctctgcgtcttttaggccgccaagtggaaaaccttcagatggaaggttgagaggttcggagggcacctcgtcttccaggatctcacaggcaaatggatgtgctccagttgctccaaaggtcaaacccggcaatagattagatactgctcgagctatgcatgcccaggaaaaaggggggatgagaaaatttggtaaaaagcttgaaacccacaagaaccctgaaaatagcaatgctgaaagaagtgggctgaacagacaaaaggatagtaaccaactgggcacaagttcgtctagtgtgcttgtgccaaacagcagaaaacagaatgctacagtcaccaaacataaagtgcactcaaacccagcaacccccagtaggcaacggagcaatattcaccaaataaatgcccatccaagaaaagcgagggctgccaacacatttgctggaagcagtagtcaaggtagcagaaaggtggacttgcagccagatgctcgtgcaaatgtaagaaataattctgtatccaaagcaatcccgaagccaagaagattacaagacagaagagtgtactctgatacaagccagtcaagtgatagtattaattctgacaggagccagaggcggattcggcacaatattgtgattgatgagcagtcatctttttcaacaaacaaaaagaaagtcagcactgagattgtttcattcacatttacctcgccagttcataagtcactacatggcacccacttccccaatcattcagtggaaaaacaaatattagggaatcagaacactgtgtcaacttcaagcaatacatcaaacactaaacttgatgtcatagatggaaaatttttgggactcctgttggagcagaaattgagagagttgacatctggtgtgagatcaccctacactaaaccagccgaaggtgctcaagtgtaccacacttcaacagctttggaagatatggcatcagcatgtgaaacatctagcattgcttctactgattatgatagggagtcattacagtctttcagtgatggaaaagctactctgccctatacaaatcttgctactagaagtgtccagtcatctcagcctgtgaagtacgatcatggcgtcacggaccgatcagagctcgagcatcttggccaaagcccccttttcacatgggaggtttctatttcaactgaaacctgcagctcatcagagagctggaggaggcctgcaaatggaggaacaagactgttcagttcgaccgaaggagcgacaacttctgattcgacgcgcttcaacaaactcctagaagcggacgcctcttcagaatactccgacacggcctcatcaatcacagtggccacagcagaaatcgctcgatcagaaagtagcagctcgtggcatatggatagcagacaggaggtggagtttataagagagatactgaacgccagctctcccgcccgccgcatctcctatctggagcggttcggcaacggcaactcttcgggtattttggatccacatctactggaggagttaaatggcggcactaggctgctggccggtgaagagggcaaaggtcacagactgaggcggaggctgctcttcgactgcgtcaatgaatcgctgagcgtgaaatacgcgcactacttcagcgccggctacagcttatggttcacggggatggcggttctgcagagcctgtcggcggcagaaatgcatcgggagatgacgagcctgacggtcgccgaggagtggatggtggacgagctcgtgtacagggagatgagtggtcctatggggagctgggtcgatttcaggactgaagcgtaccaggccggcggagacgtggcggcggagctgctgggttccttggtcgatgaagcggttgctgaacttctgacttccggcggctcgtcgtcgtctttgtagctgatgttggattggattggattgggtccccgcgctaacgataccagttgacagccgcaaggtttttgctccatgtattgttccttgtttgtatcctgtatatcggtaggtcgctcgagaaattcgtgtagcgtagcattcctaagatgaaatgtcactaacttacaattgttcgatggttgatcggtttcctgccgagagtggaaagaagaaacattcttgacctgttcactgtt

SEQ ID NO: 5841 - DNA, 3534 bp, Zea Mays
atggcgctgctggtgcgcgcgcggctctcctcgctggacgacgacgaagacgactgggcctcggcatcctcgctctcctcggccgcctcctccccgccgctctcgcccgccgccgcctcccctccgccgcgtgcagcggtgctcgccgccccgcgggtcgcggcgcagctctcgtccacggaggaggacgtcagcgagcccttcgacggtacctccagctccggcgacgacgccgacctggacgaggaagtgtccaacggcttcttcttcagcgtcgccagggtaccgccgcccgaggaccttagcacggtccccggcggcgaggcggcgagggctgtttctggggcggagcccgagggaggggacggctggggcactgcggaggagccgctggaggacagcttggtgagcgccgagagcgtcttcgaagcgctcgatgccggcgtcattgcggatggcgacggtacgggcgccgagggttctctgggtggtagcttcctcatttccgggagcttcattggcacgcagaacggcaaggaggctgctgcgtcaggtgatttcgtgctcgtttcagatggtgctgtgctgaaggatgatgacaagcagggggaggaggttggcaatgacgctgcgtctgagcctttaatgatgcatgttgccggtgtcgatgacctgggcaccgtggatgttttggaggggatgcttgatcgtgaggttgctgaattgcttcctattcccagtgctacagaaggagatggtgctggtgctgaaattcacagcagtgagtccgatgcagaagctagtacaaccaatgttgatgctagtcctgattatgctgccacacgagatgtcacatctgatgtcgcgcgagttcatggtaaagttgatgacccagactccattgcagacgatggtcatgataaggtagatgaggaagctgatggtgaccatgaagcttctgatgaccttaaattcatgccgatctcttcaagtgaggatgctgtggaacttgcaaaagaattggaggacaacatgcctacttccaaaggcatgcactttggtgtggatgactcagatgatgtggagatctatggtgatgatgaatttgtagaggggatggatggaaaggagatcgagctttttgattatgcagctttaatcaagcttctaagggctgcaagcagctcacctgaacaaggcaaggctaaggttttcccagttgaatcttccgaacccaggcgtctgcctcctactgtagcaagcaatactaggacgagtgtggcttctgctcctgtgccagaagtaactgctgaccttgagaaagagatgacagatgaggaaaataagatatacagaaaggtggacatggcacgaatcaagtacatgcgtcttgttcatagattggggtatgatattaaccatcaggtaccagtacaagtgttgtatcggcttagtcttgttgaaggttttaagcgcggaaggatgacaaaccattcctcagagaccgagaatgcctggaagagggctttgcagcatgaggcagaggcaattgatgaccttgaattctcctgcaatgttttggtccttgggaagactggagtggggaagagtgcaacaataaattccatcttcggggaagataaatgcaaaacaaatgcttttctaccggcaacatcatctgtgaaggagattactggagttgttgatggtgttaagtttcgtgtcattgacacccctgggcttgggacttcgtccaaggatgaaaaatcaaataggaaagttctcaatgctgtcaagaagtatatgacgagatgccctccagatattattctgtatgttgataggcttgatacccagcgagaggaggcaaatagcctattcctcttgcgaagcattaccagtgtgctaggcctgtcaatatggcccagaacaattattactctcagtcactcaggaggtgcccccccagaaggccctaatggttcggaggtgaactatgatattcttgtgactcatcgaactcgtgcaattcagcaaagcatccggcagataactaatgatcctcaaattgagaatccagtggctcttgtggagaatcatcatctgtgtcggaggaatgcagaaggtgaaaaggtccttcctgatggccttatttggaggcggttcctcctcctcctatgctactcactgaagttgattgctgagatcgataacctctcaacccgtcgtgcttcttctacaggttttttaggtcactttttccaagtgcctccaattccttacttcttatcgtctttgttgcaatatagagagcaccctaggcattccaatgaactgaatgttgggagcctggactcagattttgacctagatgaattgttgaatggggaccaagaggatgaagaagatgactatgatcaacttcctcccttcaagccactaagcaaatcccaggttgcaaagctctccaaggagcaacaaaagttgtattttgatgaatatgattaccgaactaagcttcttcagaagaagcacttgaaggaacagcttggaagatttaaggaaatgaagaagaaagagtttgatgataatgatgtaccttctgatgatcatcccgatgatggatatgatacagatagatatcctatgccagaatggaccttgccatcttcatttgattctgatgatcctgtgtaccgctatcggtgccttgtgtctacaccaaacctcatggtgcgtgctgttaacaatcctgatggatgggatcatgattgtggatttgacggtgtgagtgtccaacacaaccataatgttgctaacaaatatccagcttctctgtgggttcaagttaacaaggacaagaggcagttcaccattcatttggattcctcaatgtcagttaagcatggtgactatgcctcgagcctggctggctttgacatccaaacaatgatgaatcagcttgcttacaccctcagaggtgagaccaaattcaaaggcttcaagaaaaacatcactactggtggtttatccatgacttttttgggaaataacatggtagctggagcaaagcttgaagacaagcttttaattggtaacaggctaacactgtcaggcaacactggtgctgtatccatgagaagtgatgctgcatatggagtgaatgtggaggcaactcttcatgaaaaaacctatcctgtaggtcaaggccttgccactttgggtgcatccttagtgaaatggcgaaaagagtggaccatgactgcaaatttagattcccatgtatctatcggaaggtcttcaaacatggcagttcatgttgatgtaaacaacaaactaactggacgggtcagcatcaaggccagcacttcagaacagttgaacattgcccttttaggtacctgttcagtgataatgtatttgtgggacaagatacaccctggtgcagattctaatgatgactagcactggattaaaccacccaacagctgaaaagatcaagaaggcagtaaagaagttttggacagagcatag

SEQ ID NO: 5842 - DNA, 1679 bp, Zea Mays
ctgggccttttgtgataagcacgaggacgtgggcacacgtgcagctgtccccaacccaaggaccgacccatccaaatcagttccgtcacgtctcttcctctcccgtctccgcagacgcctcccttttcttctcactccactccgccgcccggattcagagcgagaggaggcggagagggcggacatggcggcgatgttggtgggcgcgctgcggaggggaagtggatgccgcggcggcttgcgccttatcgctcattcgcttcgcagattcgtgagcacgctcgtcgtagcggagcacgaaggcgggttcgtcaagccgtcgtcgctgagcgcattggccgccgcggaggccattgccaaggacaacaaagtttctgtcctgctgggtggttccgggccggcgcttcacaaggccgccgaccatgccgcgtgcagccatccactggtgtctgaggtgctcgtggccgattcggaagccttggcgcatcctctggctgaaccctgggccgagctactccgttccgttcagcagaaaggaggctactctcatgtcatagcttcatccacatcattcgggaagaatttgcttccacgtgctgcggctctccttgatgtgtcccctgttactgatgtcaccgctgtaaaggagccacacgtctttgtgaggccaatttatgctggaaatgcactttgtactgtgaaatatactggagaggggccttgcatgatgagtattagatcaacttcattttccccagctactgaggctatgtctgaaacaaaggttgcacctatcacccaggttgatctctctttcctcagtgaagggaaatctacatgggtgaatctgacatcacaagacacggagcggcctgatcttgcaaatgcacccgtagtagtcaccggaggcagaggtttaaaaagtgctgaaaattttaaattgttggagcagcttgctgagaaacttggcgcagcagtgggtgcgactcgggctgctgttgatgcaggttatgttccaaatgaccttcaggttggtcagacggggaaaatcgttgcgccggatctttatatggcttttggagtatccggagcaatacaacacttggcaggaatgagagactcgaaggtcattgtggctgttaataaagatgctgatgcccccatatttcagattacggactggttgctgatctgttcgaggttctggatgagttattgaagaagatcccagagaagaaataagtggccgttattagctcttcactcctgcatgttcatttgcccatgtggcgctaataagatctcacgatgtcaatcccgtaaaatctgtaatgctctatttggatgtcgatattgaaaggtatgaattgaattgggttcaatactaaatcagctatggtattaaaattagatgtaattcaaactctattgtttggatgtctctgaattagagtttggaattatgtggtctaattatatgcaatacagagagctcaagctctgtattgggagtgcgagtttgtttttagttatagttcaaatccagagaattgggtctctgattctaaattcaatttcacgtgcaatcaaacaatagtattctagaaagttgatttcaattcttaatttcttactctaatacctacatccaaacgggatacaatgttttgttttctggt

SEQ ID NO: 5843 - DNA, 3631 bp, Zea Mays
ctgggccttttgtgataagcacgaggacgtgggcacacgtgcagctgtccccaacccaaggaccgacccatccaaatcagttccgtcacgtctcttcctctcccgtctccgcagacgcctcccttttcttctcactccactccgccgcccggattcagagcgagaggaggcggagagggcggacatggcggcgatgttggtgggcgcgctgcggaggggaagtggatgccgcggcggcttgcgccttatcgctcattcgcttcgcagattcgtgagcacgctcgtcgtagcggagcacgaaggcgggttcgtcaagccgtcgtcgctgagcgcattggccgccgcggaggccattgccaaggacaacaaagtttctgtcctgctgggtggttccgggccggcgcttcacaaggccgccgaccatgccgcgtgcagccatccactggtgtctgaggtgctcgtggccgattcggaagccttggcgcatcctctggctgaaccctgggccgagctactccgttccgttcagcagaaaggaggctactctcatgtcatagcttcatccacatcattcgggaagaatttgcttccacgtgctgcggctctccttgatgtgtcccctgttactgatgtcaccgctgtaaaggagccacacgtctttgtgaggccaatttatgctggaaatgcactttgtactgtgaaatatactggagaggggccttgcatgatgagtattagatcaacttcattttccccagctactgaggctatgtctgaaacaaaggttgcacctatcacccagggaaatctacatgggtgaatctgacatcacaagacacggagcggcctgatcttgcaaatgcacccgtagtagtcaccggaggcagaggtttaaaaagtgctgaaaattttaaattgttggagcagcttgctgagaaacttggcgcagcagtgggtgcgactcgggctgctgttgatgcaggttatgttccaaatgaccttcaggttggtcagacggggaaaatcgttgcgccggatctttatatggcttttggagtatccggagcaatacaacacttggcaggaatgagagactcgaaggtcattgtggctgttaataaagatgctgatgcccccatatttcaggttgcagattacggactggttgctgatctgttcgaggttctggatgagttattgaagaagatcccagagaagaaataagtggccgttattagctcttcactcctgcatgttcatttgcccatgtggcgctaataagatctcacgatgtcaatcccgtaaaatctgtaatgctctatttggatgtcgatattgaaagactccccgccgtccaccgctcgccgcccccggccgccatccagccgccggtacagggctcatcctcccggtcgcagccgtgtccacttccttcacgaagagaggcgcgtagactggggagctggagcgaggacaaggagacgagggaaaggatgcagcagctgcaaccgaagcagatgcactgggtgagggccgactcctccgacttcgggggcgaccgtcccgccccccgcagcgggcacactgcggttatcattggcaagtccaaggtggtcgtcttcggaggattcgccgacaagcgcttcctcgctgatgtttccgtctacgacgtcgagaataagctatggtacacacctgagtgcactggtaatgggtcggatgggcaggccggcccaagcccaagggcttttcacatagctgttgtcattgactgcaacatgttcatctttggtggccgatctgggggcaagcgtttaggtgatttctggatgctagacactgacttatggcaatggtcggagatgactggctttggtgatttaccgtcaccacgagagtttgctgctgcttcagccataggaaacagaaagattgttatgtatggtggatgggatggcaaaaaatggctttcagatgtatacatcatggacacaatgtcactggagtggacagaattagctgttactggatctgtgccacctccaagatgtgggcattcggcaaccatgattgagaagagactccttatatttggaggcagaggtggagcaggaccaataatgggtgatttatgggctttaaagggtattactgaagaagacaatgaggcgccaggttggacacagttgaaacttccagggcaatctccctcaccacgatgcggtcattcagtaacatctggtggaccttatctcttgctgtttggaggacatggaactggtggttggctaagtagatatgatgtgtactataatgaatgcattattttagacagggtatctgttcaatggaagcgcttaccaacaagcaatgaaccacctcctcctcgggcatatcattccataacttccatagggtctcgatttcttttatttggtggctttgatggaaagaatacatttggtgatttgtggtggcttgttcctgaagacgatcctattgcgaaacgagacttagttcctagcatcgattcaaacagcaaacctagcactgtgactgatgataaccagctattgaacctaaaggagtcacaagctctagaaaatccaataacagaattggccaaacgtctggggattgcactttctgaagaagtttcagcaagttttgttgacgaagccaatgataaagaacttgtggaattgtcatctagacttgctggtcaatcgcttccagctagtgaccaggttgcatcaattcaggtacttcgtgatcattggaaaagttctccagcaagctcactacaactacaggaactaggacctttgctgagggactatcaacgcctcatcttgcgacactatacgggaaattcattgccagcttttcgtgaaatggaagctctccgttttttccatctaaaaagtgcttcacagttgcgcatggatgacattcccgtcctgttgagcgagtatggaaggctgctttcaacatgagatggtgtcttgcaagctgtgccctcctgcttggtcctaacagaacttctgctccatgtaatttgcggagaactttctgcctgacaaaagcacacccgtggagccattccttgccatcagttggtctgttagtgcaagtcatagtcgtagcagcgatagcgcactgagctgaattcctttttcttttgaggactggacgcagacgcacacatatttcgtgcagcctggctgggcgctggaatggggtcatggtcatgggctcatggccatccacacgtggttaggcctagcttaggcgaggagctgggcggcgtggcaaacttggcaggccgcccatggtcgcgtggaattccaagaaaacggggttttgtgtgatgtgaggctggaaacctggggggtcagcagcacatgtttccagtctattgcactccctctgaccgaaagggcgctgcactgcaattttattttactacctttgttcaaaaataatgggcgtctccttttcagatgtcaatcagtttcaactttgattagatttagtaaaaaaatctaacatttgttggatcgtattaaatattagtacttttatgtgtatatttgatcacgtttaagattagttgacctttaaaaacgac

SEQ ID NO: 5844 - DNA, 2319 bp, Zea Mays
ggtgggcctatgtaggggcccagtgacgtgactccccgccgtccaccgctcgccgcccccggccgccatccagccgccggtacagggctcatcctcccggtcgcagccgtgtccacttccttcacgaagagaggcgcgtagactggggagctggagcgaggacaaggagacgagggaaaggatgcagcagctgcaaccgaagcagatgcactgggtgagggccgactcctccgacttcgggggcgaccgtcccgccccccgcagcgggcacactgcggttatcattggcaagtccaaggtggtcgtcttcggaggattcgccgacaagcgcttcctcgctgatgtttccgtctacgacgtcgagaataagctatggtacacacctgagtgcactggtaatgggtcggatgggcaggccggcccaagcccaagggcttttcacatagctgttgtcattgactgcaacatgttcatctttggtggccgatctgggggcaagcgtttaggtgatttctggatgctagacactgacttatggcaatggtcggagatgactggctttggtgatttaccgtcaccacgagagtttgctgctgcttcagccataggaaacagaaagattgttatgtatggtggatgggatggcaaaaaatggctttcagatgtatacatcatggacacaatgtcactggagtggacagaattagctgttactggatctgtgccacctccaagatgtgggcattcggcaaccatgattgagaagagactccttatatttggaggcagaggtggagcaggaccaataatgggtgatttatgggctttaaagggtattactgaagaagacaatgaggcgccaggttggacacagttgaaacttccagggcaatctccctcaccacgatgcggtcattcagtaacatctggtggaccttatctcttgctgtttggaggacatggaactggtggttggctaagtagatatgatgtgtactataatgaatgcattattttagacagggtatctgttcaatggaagcgcttaccaacaagcaatgaaccacctcctcctcgggcatatcattccataacttccatagggtctcgatttcttttatttggtggctttgatggaaagaatacatttggtgatttgtggtggcttgttcctgaagacgatcctattgcgaaacgagacttagttcctagcatcgattcaaacagcaaacctagcactgtgactgatgataaccagctattgaacctaaaggagtcacaagctctagaaaatccaataacagaattggccaaacgtctggggattgcactttctgaagaagtttcagcaagttttgttgacgaagccaatgataaagaacttgtggaattgtcatctagacttgctggtcaatcgcttccagctagtgaccaggttgcatcaattcaggtacttcgtgatcattggaaaagttctccagcaagctcactacaactacaggaactaggacctttgctgagggactatcaacgcctcatcttgcgacactatacgggaaattcattgccagcttttcgtgaaatggaagctctccgttttttccatctaaaaagtgcttcacagttgcgcatggatgacattcccgtcctgttgagcgagtatggaaggctgctttcaacatgagatggtgtcttgcaagctgtgccctcctgcttggtcctaacagaacttctgctccatgtaatttgcggagaactttctgcctgacaaaagcacacccgtggagccattccttgccatcagttggtctgttagtgcaagtcatagtcgtagcagcgatagcgcactgagctgaattcctttttcttttgaggactggacgcagacgcacacatatttcgtgcagcctggctgggcgctggaatggggtcatggtcatgggctcatggccatccacacgtggttaggcctagcttaggcgaggagctgggcggcgtggcaaacttggcaggccgcccatggtcgcgtggaattccaagaaaacggggttttgtgtgatgtgaggctggaaacctggggggtcagcagcacatgtttccagtctattgcactccctctgaccgaaagggcgctgcactgcaattttattttactacctttgttcaaaaataatgggcgtctccttttcagatgtcaatcagtttcaactttgattagatttagtaaaaaaatctaacatttgttggatcgtattaaatattagtacttttatgtgtatatttgatcacgtttaagattagttgacctttaaaaacgac

SEQ ID NO: 5845 - DNA, 1489 bp, Zea Mays
aaacggacaattttcagaatctgaaaccaaacgtcacgtgagaaggcgcaggaaactaacagatggtttagggtctcttcctcctgatcacacaacggacagagatgaggctcttgctgtttggaggacatggaactggtggttggctaagtagatatgatgtgtactataatgaatgcattattttagacagggtatctgttcaatggaagcgcttaccaacaagcaatgaaccacctcctcctcgggcatatcattccataacttccatagggtctcgatttcttttatttggtggctttgatggaaagaatacatttggtgatttgtggtggcttgttcctgaagacgatcctattgcgaaacgagacttagttcctagcatcgattcaaacagcaaacctagcactgtgactgatgataaccagctattgaacctaaaggagtcacaagctctagaaaatccaataacagaattggccaaacgtctggggattgcactttctgaagaagtttcagcaagttttgttgacgaagccaatgataaagaacttgtggaattgtcatctagacttgctggtcaatcgcttccagctagtgaccaggttgcatcaattcaggtacttcgtgatcattggaaaagttctccagcaagctcactacaactacaggaactaggacctttgctgagggactatcaacgcctcatcttgcgacactatacgggaaattcattgccagcttttcgtgaaatggaagctctccgttttttccatctaaaaagtgcttcacagttgcgcatggatgacattcccgtcctgttgagcgagtatggaaggctgctttcaacatgagatggtgtcttgcaagctgtgccctcctgcttggtcctaacagaacttctgctccatgtaatttgcggagaactttctgcctgacaaaagcacacccgtggagccattccttgccatcagttggtctgttagtgcaagtcatagtcgtagcagcgatagcgcactgagctgaattcctttttcttttgaggactggacgcagacgcacacatatttcgtgcagcctggctgggcgctggaatggggtcatggtcatgggctcatggccatccacacgtggttaggcctagcttaggcgaggagctgggcggcgtggcaaacttggcaggccgcccatggtcgcgtggaattccaagaaaacggggttttgtgtgatgtgaggctggaaacctggggggtcagcagcacatgtttccagtctattgcactccctctgaccgaaagggcgctgcactgcaattttattttactacctttgttcaaaaataatgggcgtctccttttcagatgtcaatcagtttcaactttgattagatttagtaaaaaaatctaacatttgttggatcgtattaaatattagtacttttatgtgtatatttgatcacgtttaagattagttgacctttaaaaacgac

SEQ ID NO: 5846 - DNA, 1078 bp, Zea Mays
gatggcgtgtgcccattctcctccttggtagaaatactattgggatacatcagcagcccctgtctgtgtctactgtctataaaaggccaggttgtcaggattcaatatgtcgaccagcacattcgctacttcctgcacgctgttgggcaatgttagaacaacgcaggcctcccagacagcggtgaagagcccttcgtctctaagcttcttcagccaagttacgaaggttccaagcctgaagacctccaagaaactggatgtctccgccatggctgtatacaaggtgaagcttgtcgggcctgaaggtgaagagcacgagtttgatgctccagacgacgcctacatccttgacgcagccgagactgccggtgtggagttgccatactcgtgccgtgctggggcttgctccacctgtgccggcaaaatcgagtctggttcggttgaccagtcggatgggtccttccttgatgacgggcagcaggaggaaggttatgtgctgacatgcgtctcctacccaaagtccgactgcgtcatccacacccacaaggaaggcgacctgtactagggctagggattttcaatttggcgagggaccaaaaatgctctcgagtggtgctttgtcaagcaaagctccatctgcgcgccctaccccgttgtgcgaactgtttggcatcaaacttgtgtggttgctgtcttctatgttctgctagtttatgttcggagtccgtgggaatatactagctgattaataaaaagaaaaaactgatgtgatgccataatagtataatttcatggctttttgttatgttgggagaagtgatgttgtaagctattgattctgaatgccactgtggcatgctggcatccttctatttccaaacacttgtttttgccaaattggagggtgtctggatgcaggcgcaactgcggacgaaatgagaacgaaacaaaaatatgcatgacatgctgagccacaacgacccaagacatgttttgtgtgccaggaatcttagaatttctcgttaggcggggatgctgaaggcaacagcttgctcgctcgcgtcatctctgacagcga

SEQ ID NO: 5847 - DNA, 1583 bp, Zea Mays
ctggtcaaacccagaaatcacgaccaaatctgaatagagccacagcgcagacgtgaatgaatcttacaaaacgaaaacagatcgagcaaagagagatctactacctactacgcgtaaagaaatccataagcgatgaagaacaggacgtaggtacctgcgaccgagagcgagcgaggaagaggaagcgcacgtcaaatcgaagatgcctctgcctcgttatttttagcaaagggaggacaagatggagaatagatcgagggaaggaggcagtcgcccgccccaggattggattggagtggagtcggcccgggctagaagtagaaccctaataaatcccagcggcggcgcagacgagatgtagatatttccctggttcgcgcgacaggcgggacccgcccgggggacaagcgggctggccgcaacgcgcacggcatattccgttggcgcggcttggacgcgtcaggcgtcacccagccagaatgggccgcgggcaggctgagttggcccacggccgataggaaggccggattggtccagggccgtcgacgcttcacggtcgggtgggtttcggggccacctcagccgccagcagctagacggccctatcctcgctcccgcggccgccgtctccctatcctgccgcggcggcgagcacgtgcggagctgcgggcgccaccagacaaacccgctcattcgttcagcccccctgcccggagcaatggaggcgctgcgggcgtggagggcctcctccaatctcatcggcttcgcggcctcccgcgccgccgcctccgcttcaaggccccttggcctccgtatccgctgctgctccgcggccgccgccaccacgaacccgccggcgcagcctcaggaccgccgacgccgtagtgcctcctcatccgcctccacctccgaccgcgactccatccgcgccatccgcctcaaaaaagttgatgagctcagagggaagggttatgagccgtacgcgtacaggtgggacaggactcacacgaccaaggcgcttcaggaacagtacactcatcttatgaacggtgaagtctgcgaggacgtgtcggtgtccgttgctggccggattgttgcccgaagagcatttggaaagcttgtttttatgactgtaagagatgatgcggggactgtgcagctttattgtgagaaagacagccttacggaggaccaatttgagcaactaaaggcgtttattgatattggtgatatattaggtgcaagtggatccattaaaaagacagagaaaggggagctatctgtttatgtgaaaaatttcgaaattctcacaaaatcattactcccactaccagataagtatcatggattaactgatgtggacaaacgttatcgtcaaaggtatgttgacatgattgcaaaccctaaggtcgctgatgtattccgaactagggcaaaggtattgactacatgtgatgctaaatctgtattttgaaactgttgggcaattaactacacctattactaatttactattatagtttagtttggaaactcttatatcattttaagggcccgtttggcaaagctccagctcctgcttc

SEQ ID NO: 5848 - DNA, 874 bp, Zea Mays
cggccctatcctcgctcccgcggccgccgtctccctatcctgccgcggcggcgagcacgtgcggagctgcgggcgccaccagacaaacccgctcattcgttcagcccccctgcccggagcaatggaggcgctgcgggcgtggagggcctcctccaatctcatcggcttcgcggcctcccgcgccgccgcctccgcttcaaggccccttggcctccgtatccgctgctgctccgcggccgccgccaccacgaacccgccggcgcagcctcaggaccgccgacgccgtagtgcctcctcatccgcctccacctccgaccgcgactccatccgcgccatccgcctcaaaaaagttgatgagctcagagggaagggttatgagccgtacgcgtacaggtgggacaggactcacacgaccaaggcgcttcaggaacagtacactcatcttatgaacggtgaagtctgcgaggacgtgtcggtgtccgttgctggccggattgttgcccgaagagcatttggaaagcttgtttttatgactgtaagagatgatgcggggactgtgcaggggagctatctgtttatgtgaaaaatttcgaaattctcacaaaatcattactcccactaccagataagtatcatggattaactgatgtggacaaacgttatcgtcaaaggtatgttgacatgattgcaaaccctaaggtcgctgatgtattccgaactagggcaaaggtattgactacatgtgatgctaaatctgtattttgaaactgttgggcaattaactacacctattactaatttactattatagtttagtttggaaactcttatatcattttaagggcccgtttggcaaagctccagctcctgcttc

SEQ ID NO: 5849 - DNA, 1933 bp, Zea Mays
ccgccgtctccctatcctgccgcggcggcgagcacgtgcggagctgcgggcgccaccagacaaacccgctcattcgttcagcccccctgcccggagcaatggaggcgctgcgggcgtggagggcctcctccaatctcatcggcttcgcggcctcccgcgccgccgcctccgcttcaaggccccttggcctccgtatccgctgctgctccgcggccgccgccaccacgaacccgccggcgcagcctcaggaccgccgacgccgtagtgcctcctcatccgcctccacctccgaccgcgactccatccgcgccatccgcctcaaaaaagttgatgagctcagagggaagggttatgagccgtacgcgtacaggtgggacaggactcacacgaccaaggcgcttcaggaacagtacactcatcttatgaacggtgaagtctgcgaggacgtgtcggtgtccgttgctggccggattgttgcccgaagagcatttggaaagcttgtttttatgactgtaagagatgatgcggggactgtgcaggggagctatctgtttatgtgaaaaatttcgaaattctcacaaaatcattactcccactaccagataagtatcatggattaactgatgtggacaaacgttatcgtcaaagggagcagcaggtggtgctgaagctagaccttttataacctaccataactcacttcaaagagatctttacttgaggattgcaacagagctgcatttgaaaaggatgttggttggaggacttgagaaagtctatgagattgggagaatattccggaatgaaggcatttctactcgtcataatcctgaatttaccactattgaaatgtatgaagcatattcagactatgaaagcatgatgaatatggccgaagaaattgttactcgatgtgctatggctactcatggcaagcttaaggttgactatgagggaactgaaatctctctcgaaagaccatggaggagggagaccatgcattctcttgtcaaagaagcaactggaatcgactttaacagctttggacaagacgttgaatctgctaaaagagctgtgaggggactgccaggtttcgttgtagggaacagtgaaagtacttcactgcaagcctgttcatctgttggacatgttctcaatgaggtgtttgaaacatttgttgaatctactcttgtacaaccaacatttgtccttgactatccagttgagatatcaccattggcaaaaccacatcggagtcatgttggccttactgagcgattcgaacttttcatttgtggtcgtgagattggcaatgcgttttctgagctcacagacccaattgatcagagaagccgttttgaaaatcaaataaaacagcacaatgctaagcgtgctgcaatggctaaggaggtcaaatctaccgagggtgaaggcgacgacgattactcgtatgaagtttctttagacgaggacttcttgacttcattggaatacggaatgccaccggcatcaggaatgggcctcggtatcgaccggttagtaatgcttttgacgaactcttctagcataagggacgttattgcctttcctgtcttgaagattcagcaatagatccccttcattctgtgaagaggcgtggctgctgaagaaaacaccagcagccttccttttgtgcttggttcagtacagcaggttttatatctgctgacctttttatagctcatagatgtggccatttattatttgatgatgtaattgagatgtactatagttcagagtccaagccgatattaaaaactttatagatgtttgaataataatggaatccacattttacaattaatgtgctgcaaaacagctatctccactggatactctgattcttcagtgacatggttgccttgaactaccatttaagagattctttggtcta

SEQ ID NO: 5850 - DNA, 2113 bp, Zea Mays
cgccgtctccctatcctgccgcggcggcgagcacgtgcggagctgcgggcgccaccagacaaacccgctcattcgttcagcccccctgcccggagcaatggaggcgctgcgggcgtggagggcctcctccaatctcatcggcttcgcggcctcccgcgccgccgcctccgcttcaaggccccttggcctccgtatccgctgctgctccgcggccgccgccaccacgaacccgccggcgcagcctcaggaccgccgacgccgtagtgcctcctcatccgcctccacctccgaccgcgactccatccgcgccatccgcctcaaaaaagttgatgagctcagagggaagggttatgagccgtacgcgtacaggtgggacaggactcacacgaccaaggcgcttcaggaacagtacactcatcttatgaacggtgaagtctgcgaggacgtgtcggtgtccgttgctggccggattgttgcccgaagagcatttggaaagcttgtttttatgactgtaagagatgatgcggggactgtgcagctttattgtgagaaagacagccttacggaggaccaatttgagcaactaaaggcgtttattgatattggtgatatattaggtgcaagtggatccattaaaaagacagagaaaggggagctatctgtttatgtgaaaaatttcgaaattctcacaaaatcattactcccactaccagataagtatcatggattaactgatgtggacaaacgttatcgtcaaaggtggtttctgaaatccgcaagacaatggaatcatttggttttattgaagtcgaaactccagttctacagggagcagcaggtggtgctgaagctagaccttttataacctaccataactcacttcaaagagatctttacttgaggattgcaacagagctgcatttgaaaaggatgttggttggaggacttgagaaagtctatgagattgggagaatattccggaatgaaggcatttctactcgtcataatcctgaatttaccactattgaaatgtatgaagcatattcagactatgaaagcatgatgaatatggccgaagaaattgttactcgatgtgctatggctactcatggcaagcttaaggttgactatgagggaactgaaatctctctcgaaagaccatggaggagggagaccatgcattctcttgtcaaagaagcaactggaatcgactttaacagctttggacaagacgttgaatctgctaaaagagctgtgaggggactgccaggtttcgttgtagggaacagtgaaagtacttcactgcaagcctgttcatctgttggacatgttctcaatgaggtgtttgaaacatttgttgaatctactcttgtacaaccaacatttgtccttgactatccagttgagatatcaccattggcaaaaccacatcggagtcatgttggccttactgagcgattcgaacttttcatttgtggtcgtgagattggcaatgcgttttctgagctcacagacccaattgatcagagaagccgttttgaaaatcaaataaaacagcacaatgctaagcgtgctgcaatggctaaggaggtcaaatctaccgagggtgaaggcgacgacgattactcgtatgaagtttctttagacgaggacttcttgacttcattggaatacggaatgccaccggcatcaggaatgggcctcggtatcgaccggttagtaatgcttttgacgaactcttctagcataagggacgttattgcctttcctgtcttgaagattcagcaatagatccccttcattctgtgaagaggcgtggctgctgaagaaaacaccagcagccttccttttgtgcttggttcagtacagcaggttttatatctgctgacctttttatagctcatagatgtggccatttattatttgatgatgtaattgagatgtactatagttcagagtccaagccgatattaaaaactttatagatgtttgaataataatggaatccacattttacaattaatgtgctgcaaaacagctatctccactggatactctgattcttcagtgacatggttgccttgaactaccatttaagagattctttggtcta

SEQ ID NO: 5851 - DNA, 853 bp, Zea Mays
cgccgtctccctatcctgccgcggcggcgagcacgtgcggagctgcgggcgccaccagacaaacccgctcattcgttcagcccccctgcccggagcaatggaggcgctgcgggcgtggagggcctcctccaatctcatcggcttcgcggcctcccgcgccgccgcctccgcttcaaggccccttggcctccgtatccgctgctgctccgcggccgccgccaccacgaacccgccggcgcagcctcaggaccgccgacgccgtagtgcctcctcatccgcctccacctccgaccgcgactccatccgcgccatccgcctcaaaaaagttgatgagctcagagggaagggttatgagccgtacgcgtacaggtgggacaggactcacacgaccaaggcgcttcaggaacagtacactcatcttatgaacggtgaagtctgcgaggacgtgtcggtgtccgttgctggccggattgttgcccgaagagcatttggaaagcttgtttttatgactgtaagagatgatgcggggactgtgcagctttattgtgagaaagacagccttacggaggaccaatttgagcaactaaaggcgtttattgatattggtgatatattaggtgcaagtggatccattaaaaagacagagaaaggtatgttgacatgattgcaaaccctaaggtcgctgatgtattccgaactagggcaaaggtattgactacatgtgatgctaaatctgtattttgaaactgttgggcaattaactacacctattactaatttactattatagtttagtttggaaactcttatatcattttaagggcccgtttggcaaagctccagctcctgcttc

SEQ ID NO: 5852 - DNA, 2116 bp, Zea Mays
gccgtctccctatcctgccgcggcggcgagcacgtgcggagctgcgggcgccaccagacaaacccgctcattcgttcagcccccctgcccggagcaatggaggcgctgcgggcgtggagggcctcctccaatctcatcggcttcgcggcctcccgcgccgccgcctccgcttcaaggccccttggcctccgtatccgctgctgctccgcggccgccgccaccacgaacccgccggcgcagcctcaggaccgccgacgccgtagtgcctcctcatccgcctccacctccgaccgcgactccatccgcgccatccgcctcaaaaaagttgatgagctcagagggaagggttatgagccgtacgcgtacaggtgggacaggactcacacgaccaaggcgcttcaggaacagtacactcatcttatgaacggtgaagtctgcgaggacgtgtcggtgtccgttgctggccggattgttgcccgaagagcatttggaaagcttgtttttatgactgtaagagatgatgcggggactgtgcagctttattgtgagaaagacagccttacggaggaccaatttgagcaactaaaggcgtttattgatattggtgatatattaggtgcaagtggatccattaaaaagacagagaaaggggagctatctgtttatgtgaaaaatttcgaaattctcacaaaatcattactcccactaccagataagtatcatggattaactgatgtggacaaacgttatcgtcaaagataggtggtttctgaaatccgcaagacaatggaatcatttggttttattgaagtcgaaactccagttctacagggagcagcaggtggtgctgaagctagaccttttataacctaccataactcacttcaaagagatctttacttgaggattgcaacagagctgcatttgaaaaggatgttggttggaggacttgagaaagtctatgagattgggagaatattccggaatgaaggcatttctactcgtcataatcctgaatttaccactattgaaatgtatgaagcatattcagactatgaaagcatgatgaatatggccgaagaaattgttactcgatgtgctatggctactcatggcaagcttaaggttgactatgagggaactgaaatctctctcgaaagaccatggaggagggagaccatgcattctcttgtcaaagaagcaactggaatcgactttaacagctttggacaagacgttgaatctgctaaaagagctgtgaggggactgccaggtttcgttgtagggaacagtgaaagtacttcactgcaagcctgttcatctgttggacatgttctcaatgaggtgtttgaaacatttgttgaatctactcttgtacaaccaacatttgtccttgactatccagttgagatatcaccattggcaaaaccacatcggagtcatgttggccttactgagcgattcgaacttttcatttgtggtcgtgagattggcaatgcgttttctgagctcacagacccaattgatcagagaagccgttttgaaaatcaaataaaacagcacaatgctaagcgtgctgcaatggctaaggaggtcaaatctaccgagggtgaaggcgacgacgattactcgtatgaagtttctttagacgaggacttcttgacttcattggaatacggaatgccaccggcatcaggaatgggcctcggtatcgaccggttagtaatgcttttgacgaactcttctagcataagggacgttattgcctttcctgtcttgaagattcagcaatagatccccttcattctgtgaagaggcgtggctgctgaagaaaacaccagcagccttccttttgtgcttggttcagtacagcaggttttatatctgctgacctttttatagctcatagatgtggccatttattatttgatgatgtaattgagatgtactatagttcagagtccaagccgatattaaaaactttatagatgtttgaataataatggaatccacattttacaattaatgtgctgcaaaacagctatctccactggatactctgattcttcagtgacatggttgccttgaactaccatttaagagattctttggtcta

SEQ ID NO: 5853 - DNA, 2041 bp, Zea Mays
cgtctccctatcctgccgcggcggcgagcacgtgcggagctgcgggcgccaccagacaaacccgctcattcgttcagcccccctgcccggagcaatggaggcgctgcgggcgtggagggcctcctccaatctcatcggcttcgcggcctcccgcgccgccgcctccgcttcaaggccccttggcctccgtatccgctgctgctccgcggccgccgccaccacgaacccgccggcgcagcctcaggaccgccgacgccgtagtgcctcctcatccgcctccacctccgaccgcgactccatccgcgccatccgcctcaaaaaagttgatgagctcagagggaagggttatgagccgtacgcgtacaggtgggacaggactcacacgaccaaggcgcttcaggaacagtacactcatcttatgaacggtgaagtctgcgaggacgtgtcggtgtccgttgctggccggattgttgcccgaagagcatttggaaagcttgtttttatgactgtaagagatgatgcggggactgtgcagctttattgtgagaaagacagccttacggaggaccaatttgagcaactaaaggcgtttattgatattggtgatatattaggtgcaagtggatccattaaaaagacagagaaaggggagctatctgtttatgtgaaaaatttcgaaattctcacaaaatcattactcccactaccagataagtatcatggattaactgatgtggacaaacgttatcgtcaaagggagcagcaggtggtgctgaagctagaccttttataacctaccataactcacttcaaagagatctttacttgaggattgcaacagagctgcatttgaaaaggatgttggttggaggacttgagaaagtctatgagattgggagaatattccggaatgaaggcatttctactcgtcataatcctgaatttaccactattgaaatgtatgaagcatattcagactatgaaagcatgatgaatatggccgaagaaattgttactcgatgtgctatggctactcatggcaagcttaaggttgactatgagggaactgaaatctctctcgaaagaccatggaggagggagaccatgcattctcttgtcaaagaagcaactggaatcgactttaacagctttggacaagacgttgaatctgctaaaagagctgtgaggggactgccaggtttcgttgtagggaacagtgaaagtacttcactgcaagcctgttcatctgttggacatgttctcaatgaggtgtttgaaacatttgttgaatctactcttgtacaaccaacatttgtccttgactatccagttgagatatcaccattggcaaaaccacatcggagtcatgttggccttactgagcgattcgaacttttcatttgtggtcgtgagattggcaatgcgttttctgagctcacagacccaattgatcagagaagccgttttgaaaatcaaataaaacagcacaatgctaagcgtgctgcaatggctaaggaggtcaaatctaccgagggtgaaggcgacgacgattactcgtatgaagtttctttagacgaggacttcttgacttcattggaatacggaatgccaccggcatcaggaatgggcctcggtatcgaccggttagtaatgcttttgacgaactcttctagcataagggacgttattgcctttcctgtcttgaagattcagcaatagatccccttcattctgtgaagaggcgtggctgctgaagaaaacaccagcagccttccttttgtgcttggttcagtacagcaggttttatatctgctgacctttttatagctcatagatgtggccatttattatttgatgatgtaattgagatgtactatagttcagagtccaagccgatattaaaaactttatagatgtttgaataataatggaatccacattttacaattaatgtgctgcaaaacagctatctccactggatactctgattcttcagtgacatggttgccttgaactaccatttaagagattctttggtcta

SEQ ID NO: 5854 - DNA, 1267 bp, Zea Mays
ataggtggtttctgaaatccgcaagacaatggaatcatttggttttattgaagtcgaaactccagttctacagggagcagcaggtggtgctgaagctagaccttttataacctaccataactcacttcaaagagatctttacttgaggattgcaacagagctgcatttgaaaaggatgttggttggaggacttgagaaagtctatgagattgggagaatattccggaatgaaggcatttctactcgtcataatcctgaatttaccactattgaaatgtatgaagcatattcagactatgaaagcatgatgaatatggccgaagaaattgttactcgatgtgctatggctactcatggcaagcttaaggttgactatgagggaactgaaatctctctcgaaagaccatggaggagggagaccatgcattctcttgtcaaagaagcaactggaatcgactttaacagctttggacaagacgttgaatctgctaaaagagctgtgaggggactgccaggtttcgttgtagggaacagtgaaagtacttcactgcaagcctgttcatctgttggacatgttctcaatgaggtgtttgaaacatttgttgaatctactcttgtacaaccaacatttgtccttgactatccagttgagatatcaccattggcaaaaccacatcggagagaagccgttttgaaaatcaaataaaacagcacaatgctaagcgtgctgcaatggctaaggaggtcaaatctaccgagggtgaaggcgacgacgattactcgtatgaagtttctttagacgaggacttcttgacttcattggaatacggaatgccaccggcatcaggaatgggcctcggtatcgaccggttagtaatgcttttgacgaactcttctagcataagggacgttattgcctttcctgtcttgaagattcagcaatagatccccttcattctgtgaagaggcgtggctgctgaagaaaacaccagcagccttccttttgtgcttggttcagtacagcaggttttatatctgctgacctttttatagctcatagatgtggccatttattatttgatgatgtaattgagatgtactatagttcagagtccaagccgatattaaaaactttatagatgtttgaataataatggaatccacattttacaattaatgtgctgcaaaacagctatctccactggatactctgattcttcagtgacatggttgccttgaactaccatttaagagattctttggtcta

SEQ ID NO: 5855 - DNA, 1316 bp, Zea Mays
atggctgatgtcgacgagtaccgttgcttcattgggaacctgtcctggtcaacgactgatgaaagcctcaaggatgcgttcagcaaattcggcaacctcactgaggcaaaggtggttcttgacaaattttcaggacgttctcgtggtttcggctttgtaacttttgatgagaagcaagccatggaggatgctattgagggaatgaatggactggacttggacgggaggaacatcactgttgataaagctcagccacaaggacctggtagagaccgtaatggtgaccgtgattatgaccgcgagcgtggatctcgttatgaacgtggtcgtgactatggtggtgggcgtgcaccgcgaggtggtggtggtggtggtggtggtggtgactgcttcaagtgtgggaaacctggtcattttgctagagagtgcccatctggggatggtgggagaggggacagatatggtgggagagatgacaggtatggtggcggtggcggtggcggtggcggtcgttatggttctgaccgtggtggtgaccgatactctggccgtagccgagatggcggcagctatgggggtggcgatcgctacagccgtgaccgatcaggtccttactgatggccttagttcttgattgagaagtatgtgccatccagctacaagaaaaaactatgttcttgttacctcttctgaaagcaagtgatgaatcgtccattagagaaaattaactggcttctttttggttatttgttcttgttgtggattggttgatactgtggttctggatttggttacttgcgtcctaagatcattttagtctggccagttgatccacgaatgcaaagagattatcctttggttccattctatgtgcctttagcattggagggcctctatttatggttgcttgatgaactggttatgtttgcttcgccatgttggtggggtgttccttgagctgtcccgtgttccttgtgacttgtgagaacaccagaggttatgcttgcctgagtggatgtgatgctacctggttgctgttcctttgacaatgcaccaatgtcctatcgcagcttatatactctggttccagattaattactggtgcccctttgagaggagttatgatgatgttattattcatcagcagcattctaattgcccttgatttagtgtagcctttttttcttagttcaccgaatctcaggatgcaaacgttaggttacttttactgttcgtactaaccaattgagcttttgtactaaaaaaagtatgttacattaagctgctccaggttccgttttctcccggctttgaac

SEQ ID NO: 5856 - DNA, 3952 bp, Zea Mays
cccgggcctcgccaggcaggcgcctgccccacacggccacgcccacccaccaggagccaaagccccacacgggacgggcggggacacgggcagcgaagcgcgccgcgcaggcgcaacgcaacaaagggaaaccccagccggaggagcaaaagctagcaagcgtgtccctccccctccctcactcccgtttcattccattcccccccagacgccgctaccgccgccgccgcacgcacgcttgccccgggatctggagatctggtagcgccagggggatggaggccagcgccgggctggtcgccggctcgcacaaccggaacgagctcgtcgtcatccgccgcgatggcgagccagggccgaagcccatggaccagcggaacggccaggtgtgccagatttgcggcgacgacgtggggcgcaaccccgacggggagccgttcgtggcctgcaacgagtgcgccttccccatctgccgggactgctacgagtacgagcgccgcgagggcacgcagaactgcccccagtgcaagacccgcttcaagcgcctcaaggggtgcgcgcgcgtgcccggggacgaggaggaggacggcgtcgacgacctggagaacgagttcaactggagcgacaagcacgactcccagtacctcgccgagtccatgctccacgcccacatgagctacggccgcggcgccgacctcgacggcgtgccgcagccattccaccccatccccaatgttcccctcctcaccaacggacagatggtcgatgacatcccgccggaccagcacgcccttgtgccctcgttcgtgggtggcggggggaagaggattcaccctctcccgtacgcggatcccaaccttcctgtgcaaccgaggtctatggacccttccaaggatctcgccgcatatggctacgggagcgtagcatggaaggagaggatggagagctggaagcagaagcaggagaggatgcaccagacgaggaacgatggcggcggcgatgatggtgatgatgcagatctaccactaatggatgaagctagacagccattgtccagaaagatcccgcttccttcaagccaaatcaacccctataggatgattataataattcggctagtggttttgtgtttcttcttccactaccgagtgatgcatccggtgcctgatgcatttgctttatggctcatatctgtgatctgtgaaatttggtttgccatgtcttggattcttgaccagtttccaaagtggtttcctatcgagagggaaacctatcttgaccggctgagtttaaggtttgacaaggaagggcatccttctcaactcgcccctgtcgatttctttgtcagtacggttgatcccttgaaggaacctccattggtcactgctaatactgttctatctatcctttcggtggattatccagttgataaggtttcatgctacgtttctgatgatggtgctgccatgctgacatttgaagcattgtctgaaacatctgaatttgcaaagaaatgggttcctttctgcaaaagatatagccttgagcctcgtgctccagagtggtacttccaacagaagatagactacctgaaagacaaggtggcgccaaactttgttagagaacggagagcaatgaagagagagtatgaggaattcaaggtcagaatcaatgccttggttgctaaagcccaaaaggttcctgaggaaggatggacaatgcaggatggaactccatggcccggaaataatgtccgtgatcatcctggaatgattcaggttttccttggtcaaagtggtggccatgatgtggaaggaaatgagctgcctcgattggtttatgtttcaagagaaaaacggccaggctacaaccatcacaagaaggctggtgctatgaatgcattggtccgagtctctgctgtactaactaatgctccttatttgctgaacttggattgtgatcactatatcaataatagtaaggctataaaggaagcaatgtgttttatgatggatcctttgcttggaaataaagtttgctatgtgcagtttcctcaaagatttgatgggattgatcgccatgatcgatatgctaacagaaatgttgtctttttcgatatcaacatgaaaggtttggatggtatccagggcccaatttatgtgggtactggatgtgtcttcagaaggcaggcattatatggctacgatgctcccaaaacaaagaagccaccatcaagaacttgcaactgctggccaaagtggtgcatttgctgttgctgttttggtaacaggaagaccaagaagaagaccaagacctctaaacctaaatttgagaagataaagaaactttttaagaaaaaggaaaatcaagcccctgcatatgctcttggtgaaattgatgaagctgctccaggagctgaaaatgaaaaggctagtattgtaaatcaacagaagttggaaaagaaatttggccagtcttcagtttttgttgcatccacacttcttgagaatggtggaaccctgaagagtgccagtccagcttctcttctgaaggaagctatacatgtcatcagctgtggatatgaagacaaaacaggctggggaaaagatattggttggatttatggatcagtcacagaagatattcttactgggtttaagatgcactgccatggttggcggtcaatttactgcatacctaaacgggccgccttcaaaggttccgcacctctcaatctttccgatcgtcttcaccaggttcttcggtgggctcttggttcaattgaaattttcttcagcaaccactgccctctctggtatgggtatggtggtggactaaagttcctggaaaggttttcgtacattaactccatcgtatacccttggacatctatcccgctcttggcctattgcacattgcctgccatctgcttgctgacagggaaatttatcacgccagagggactcctcaaggtcatagctggtgtagacacgagcttcactgtgacatccaagggcggagacgacgaggagttctcagagctgtacacattcaaatggacgacccttctgatacctccgacaaccctgctcctactgaacttcattggagtggtagctggcatctccaatgcgatcaacaacggatatgaatcatggggccccctgttcgggaagctcttctttgcattttgggtgatcgtccatctttacccgttcctcaagggtctggttgggaggcagaacaggacgccaacgattgtcattgtctggtccatcctcctggcttcgatcttctcgctgctttgggtccggatcgacccgttccttgcgaaggatgatggtcccctgttggaggagtgtggtctggattgcaactaggagatagaaacaaggggagaaggggaaaaaaagtacttgtatttcttttgttccatggtggtggtggtggtgggcggctcagcctcgtgagtgcagtattgggcaaaccggaggctgcggcaaccttgtgcagttcggccacgaatatactagggaagatcgcgaccaatcaatcaatcgatgaccgagttcaattgttcagcattctttattagttttggtgggtggatacttcaatcggtgagccgaacagacagttgttttgagtatgaattgctctgcatctgcaaagttgttgtttgtcatccgtcgtctcaatgaggcgagggtggaactggaatagatggtgctgtctggaacaggggaagcgcattgtttgtttgttttgtttatgtagtaagatgcgtgcgttccttcccttgctcctcgtcctggtgcatttctcctttactaggacacacaaactccattggtgagtgtctagtgatctagcgtagcagcgtcgtcaggcaatgtaatatgtaaacgtgccattttgtcgatcaacttcatgcgcaaagaaccgaatggaa

SEQ ID NO: 5857 - DNA, 3957 bp, Zea Mays
gcagcgaagcgcgccgcgcaggcgcaacgcaacaaagggaaaccccagccggaggagcaaaagctagcaagcgtgtccctccccctccctcactcccgtttcattccattcccccccagacgccgctaccgccgccgccgcacgcacgcttgccccgggatctggagatctggtagcgccagggggatggaggccagcgccgggctggtcgccggctcgcacaaccggaacgagctcgtcgtcatccgccgcgatggcgagccagggccgaagcccatggaccagcggaacggccaggtgtgccagatttgcggcgacgacgtggggcgcaaccccgacggggagccgttcgtggcctgcaacgagtgcgccttccccatctgccgggactgctacgagtacgagcgccgcgagggcacgcagaactgcccccagtgcaagacccgcttcaagcgcctcaaggggtgcgcgcgcgtgcccggggacgaggaggaggacggcgtcgacgacctggagaacgagttcaactggagcgacaagcacgactcccagtacctcgccgagtccatgctccacgcccacatgagctacggccgcggcgccgacctcgacggcgtgccgcagccattccaccccatccccaatgttcccctcctcaccaacggacagatggtcgatgacatcccgccggaccagcacgcccttgtgccctcgttcgtgggtggcggggggaagaggattcaccctctcccgtacgcggatcccaaccttcctgtgcaaccgaggtctatggacccttccaaggatctcgccgcatatggctacgggagcgtagcatggaaggagaggatggagagctggaagcagaagcaggagaggatgcaccagacgaggaacgatggcggcggcgatgatggtgatgatgcagatctaccactaatggatgaagctagacagccattgtccagaaagatcccgcttccttcaagccaaatcaacccctataggatgattataataattcggctagtggttttgtgtttcttcttccactaccgagtgatgcatccggtgcctgatgcatttgctttatggctcatatctgtgatctgtgaaatttggtttgccatgtcttggattcttgaccagtttccaaagtggtttcctatcgagagggaaacctatcttgaccggctgagtttaaggtttgacaaggaagggcatccttctcaactcgcccctgtcgatttctttgtcagtacggttgatcccttgaaggaacctccattggtcactgctaatactgttctatctatcctttcggtggattatccagttgataaggtttcatgctacgtttctgatgatggtgctgccatgctgacatttgaagcattgtctgaaacatctgaatttgcaaagaaatgggttcctttctgcaaaagatatagccttgagcctcgtgctccagagtggtacttccaacagaagatagactacctgaaagacaaggtggcgccaaactttgttagagaacggagagcaatgaagagagagtatgaggaattcaaggtcagaatcaatgccttggttgctaaagcccaaaaggttcctgaggaaggatggacaatgcaggatggaactccatggcccggaaataatgtccgtgatcatcctggaatgattcaggttttccttggtcaaagtggtggccatgatgtggaaggaaatgagctgcctcgattggtttatgtttcaagagaaaaacggccaggctacaaccatcacaagaaggctggtgctatgaatgcattggtccgagtctctgctgtactaactaatgctccttatttgctgaacttggattgtgatcactatatcaataatatttcctcaaagatttgatgggattgatcgccatgatcgatatgctaacagaaatgttgtctttttcgatatcaacatgaaaggtttggatggtatccagggcccaatttatgtgggtactggatgtgtcttcagaaggcaggcattatatggctacgatgctcccaaaacaaagaagccaccatcaagaacttgcaactgctggccaaagtggtgcatttgctgttgctgttttggtaacaggaagaccaagaagaagaccaagacctctaaacctaaatttgagaagataaagaaactttttaagaaaaaggaaaatcaagcccctgcatatgctcttggtgaaattgatgaagctgctccaggagctgaaaatgaaaaggctagtattgtaaatcaacagaagttggaaaagaaatttggccagtcttcagtttttgttgcatccacacttcttgagaatggtggaaccctgaagagtgccagtccagcttctcttctgaaggaagctatacatgtcatcagctgtggatatgaagacaaaacaggctggggaaaagatattggttggatttatggatcagtcacagaagatattcttactgggtttaagatgcactgccatggttggcggtcaatttactgcatacctaaacgggccgccttcaaaggttccgcacctctcaatctttccgatcgtcttcaccaggttcttcggtgggctcttggttcaattgaaattttcttcagcaaccactgccctctctggtatgggtatggtggtggactaaagttcctggaaaggttttcgtacattaactccatcgtatacccttggacatctatcccgctcttggcctattgcacattgcctgccatctgcttgctgacagggaaatttatcacgccagagcttaacaatgttgccagcctgtggttcatgtcacttttcatctgcatttttgctacgagcatcctggaaatgagatggagtggtgtaggcatcgatgactggtggagaaacgagcagttttgggtcattggaggcgtgtcttcacatctctttgctgtgttccagggactcctcaaggtcatagctggtgtagacacgagcttcactgtgacatccaagggcggagacgacgaggagttctcagagctgtacacattcaaatggacgacccttctgatacctccgacaaccctgctcctactgaacttcattggagtggtagctggcatctccaatgcgatcaacaacggatatgaatcatggggccccctgttcgggaagctcttctttgcattttgggtgatcgtccatctttacccgttcctcaagggtctggttgggaggcagaacaggacgccaacgattgtcattgtctggtccatcctcctggcttcgatcttctcgctgctttgggtccggatcgacccgttccttgcgaaggatgatggtcccctgttggaggagtgtggtctggattgcaactaggagatagaaacaaggggagaaggggaaaaaaagtacttgtatttcttttgttccatggtggtggtggtggtgggcggctcagcctcgtgagtgcagtattgggcaaaccggaggctgcggcaaccttgtgcagttcggccacgaatatactagggaagatcgcgaccaatcaatcaatcgatgaccgagttcaattgttcagcattctttattagttttggtgggtggatacttcaatcggtgagccgaacagacagttgttttgagtatgaattgctctgcatctgcaaagttgttgtttgtcatccgtcgtctcaatgaggcgagggtggaactggaatagatggtgctgtctggaacaggggaagcgcattgtttgtttgttttgtttatgtagtaagatgcgtgcgttccttcccttgctcctcgtcctggtgcatttctcctttactaggacacacaaactccattggtgagtgtctagtgatctagcgtagcagcgtcgtcaggcaatgtaatatgtaaacgtgccattttgtcgatcaacttcatgcgcaaagaaccgaatggaa

SEQ ID NO: 5858 - DNA, 3346 bp, Zea Mays
gtttcaggtgctagcataccttctgatatcgtcatcagcaactgctcgagcaagtgatttgactgagaactgggggagcgattccttcccgaacatggcgaactgctcgagcatgacatcacaatggtcatcagttggtgtgcaatcagccaatcaccacatacatatactacggatcaaggttcataaaccataatgcagctccaacaacaccgtttacaagttgcaacagctggaactggcaagaattgcaaagatacgcaggctactacagcctaactatctggattttgtgtatgctgttaactgagagttcttaaaaattaatgaattaacgaatccccaaggcccagccggatgaactgcatgcattgtcatctgcttgcagctgcctctgcaacggcttggagctccacgtgagctcctgcacggcggccgggaagatgaccgtaggtttcctcctgctctcctccaggtacgggaagtcctcggtgaagtgcaggccgcggctctcgcgcctggccagcgcgctcctgacgacgagcttggcgcagcagaagaggttgcgcatctcgcagacctcgacgcccttcagccgccccgttgagcgcacgatgccgacatactcccacatcacctactgcagctccatcctggcctgcctcgtctgccccacgatgtccgacagcgcgccgtcgcccagcgccgaccgtggcagcgtcagccgtgcccacctcgccgccagcgacggtcgtggagaactctcgcgctctggagagattttgcgcccgtggatccgtcgtaagaaacagactgccgtaacaacaaggattactgggctaaaactgactcggatactaaaattccgaatttcaatggattataatactacaattccaattgctctgttcgggataccaatttttagaagcccgaatgttcgggatatcacggttccaaaaagctcctcctcgagcgcgtgcgcagcggctctcctccccacaggcagtcgcgcggcggcctcatccccgccggcgagcctccactcccctccgccggtacgcctctatcgccggtggcctcccctcggcagacagcctcgcctcgcttgcttctattgctgtgctccaccacagagccctaggtggagctacgaaccccgtgatccccgacggtgtggcaccggagctcggcggcgacagcgggcacatccccctcatgccctaggtggagcaacgaaccccctgacttcccgacgccaccctcgcacaagatcccgatgtggcaatggcgaccagcgacgggcgctcaacgccaccgcgccgcctgcgaacccatggtgagaagtgtggtatcgatctagagccgaaggacttccccaacaccccttcctccatcggcgtgacatcggccagctcatctgcgacgacgaggcatcttcgaccgacttctcgacaccccatcctccatcaatgcggctccagtaccccttcctccatcggcgcagcagcatccaattcatctacgatgacaaggcatcttcgaccaaccacgccctactacaagtggtgtcagtccatctcagataagtggagtaatttgtttgtatctgtatcttctattttatttcttccctaatcctgattaatagcctaatcacgcgacaactaatacatgttgatttctttccttagtcggtgtcgtgcgcatgtgagatctagggagaggaagaggaggaagggttgtggggaccgggggtgcaagatggcggattcacctgcaactacaagaaaagaaagagcgagagatttacagaaaccttcagagccgcggaggaggagaaggagattaggaggatctctacggcgctgacggattagttaaggaacgaaatatcacatcgtgtccggtaaccagattcagatgtgggcaccatgcgtgggtgcagggccaggccgaggtgaaagagattcgacgattgagaatacatcaaagaataaaaatgtggaactcggattttcagatgaagagcgtgaccaagaatttcccgattttccatcatttattccattcttacctcctctgagtgcagctaacctaaaggtctactatgccacacgtttcaccatcatagttgggataatggtgttcggtggttttcttgcaccaatcttaaacttggtctaggggcacatcttatgaagactccatctgcagcgttcatctgtcgacgtagttgagatgaattctctatgcctacttctagagtgatgttcaaagaggttgacgctccttcaccatccccagctttgtggaatgggccacaggtagccatttaggatgacaaagccacaagggtgtccttcatcaaggctatgctagaagcctcagacttgtgtctgaggaaaattcataaaaatggtacacagaagctgggaagaaagtggaagaggaatttagcacttgccctctgtcagtcctaatgatgagcgttaagaacaacaccaagtcgggcagcggcagcagaggggatggggccaatgacggaggcggagaggagaacccatcgatttggtggcgtaagtgggagctcatcgaggccgccaccggccggtccacctcttcaataatcgtccttcatcgcccttcagttaggggcgagggttgttcagtgctttgacatgtgtgcaactattcaagcacaatggttagatgatatccccattcattttagattattacattgtggtgttcggcttcttcagtcaagcagcaatcatgcaacatgccttactgtagttttttatcactgcacatgttgctggacaaatttatggactggaggattatagaggactaacaagtgctactgggagattctcgagcaccattgaactaagagattccaaatagttctttggagtctattgttgatgttggcggggataatctagcagagatttgtcagattttttgtgcaacacggaggctacatgaggcagcaacgatcccattcttctcgcatgccactttacacaagctaaggatagcttctggtctcactcatggttgtggcagggaaagccgagtcagtagggtttgtcatgtagctggagttatctcagaccacatattagatgcagtgatgatgttaatggaggatgtttacatttaccgtgcaagcaagatgacttatattatgccttaggacaataagtattgttttcactctaatgaaatacttggtaaaaagttgtctctgtagttgtatatttgactgtgaatatttgaacccactgttacaattgttgctaattgaggtcagatttcagaggccaaataattc

SEQ ID NO: 5859 - DNA, 3406 bp, Zea Mays
gtttcaggtgctagcataccttctgatatcgtcatcagcaactgctcgagcaagtgatttgactgagaactgggggagcgattccttcccgaacatggcgaactgctcgagcatgacatcacaatggtcatcagttggtgtgcaatcagccaatcaccacatacatatactacggatcaaggttcataaaccataatgcagctccaacaacaccgtttacaagttgcaacagctggaactggcaagaattgcaaagatacgcaggctactacagcctaactatctggattttgtgtatgctgttaactgagagttcttaaaaattaatgaattaacgaatccccaaggcccagccggatgaactgcatgcattgtcatctgcttgcagctgcctctgcaacggcttggagctccacgtgagctcctgcacggcggccgggaagatgaccgtaggtttcctcctgctctcctccaggtacgggaagtcctcggtgaagtgcaggccgcggctctcgcgcctggccagcgcgctcctgacgacgagcttggcgcagcagaagaggttgcgcatctcgcagacctcgacgcccttcagccgccccgttgagcgcacgatgccgacatactcccacatcacctactgcagctccatcctggcctgcctcgtctgccccacgatgtccgacagcgcgccgtcgcccagcgccgaccgtggcagcgtcagccgtgcccacctcgccgccagcgacggtcgtggagaactctcgcgctctggagagattttgcgcccgtggatccgtcgtaagaaacagactgccgtaacaacaaggattactgggctaaaactgactcggatactaaaattccgaatttcaatggattataatactacaattccaattgctctgttcgggataccaatttttagaagcccgaatgttcgggatatcacggttccaaaaagctcctcctcgagcgcgtgcgcagcggctctcctccccacaggcagtcgcgcggcggcctcatccccgccggcgagcctccactcccctccgccggtacgcctctatcgccggtggcctcccctcggcagacagcctcgcctcgcttgcttctattgctgtgctccaccacagagccctaggtggagctacgaaccccgtgatccccgacggtgtggcaccggagctcggcggcgacagcgggcacatccccctcatgccctaggtggagcaacgaaccccctgacttcccgacgccaccctcgcacaagatcccgatgtggcaatggcgaccagcgacgggcgctcaacgccaccgcgccgcctgcgaacccatggtgagaagtgtggtatcgatctagagccgaaggacttccccaacaccccttcctccatcggcgtgacatcggccagctcatctgcgacgacgaggcatcttcgaccgacttctcgacaccccatcctccatcaatgcggctccagtaccccttcctccatcggcgcagcagcatccaattcatctacgatgacaaggcatcttcgaccaaccacgccctactacaagtggtgtcagtccatctcagataagtggagtaatttgtttgtatctgtatcttctattttatttcttccctaatcctgattaatagcctaatcacgcgacaactaatacatgttgatttctttccttagtcggtgtcgtgcgcatgtgagatctagggagaggaagaggaggaagggttgtggggaccgggggtgcaagatggcggattcacctgcaactacaagaaaagaaagagcgagagatttacagaaaccttcagagccgcggaggaggagaaggagattaggaggatctctacggcgctgacggattagttaaggaacgaaatatcacatcgtgtccggtaaccagattcagatgtgggcaccatgcgtgggtgcagggccaggccgaggtgaaagagattcgacgattgagaatacatcaaagaataaaaatgtggaactcggattttcagatgaagagcgtgaccaagaatttcccgattttccatcatttattccattcttacctcctctgagtgcagctaacctaaaggtctactatgccacacgtttcaccatcatagttgggataatggtgttcggtggttttcttgcaccaatcttaaacttggtctaggggcacatcttatgaagactccatctgcagcgttcatctgtcgacgtagttgagatgaattctctatgcctacttctagagtgatgttcaaagaggttgacgctccttcaccatccccagctttgtggaatgggccacaggtagccatttaggatgacaaagccacaagggtgtccttcatcaaggctatgctagaagcctcagacttgtgtctgaggaaaattcataaaaatggtacacagaagctgggaagaaagtggaagaggaatttagcacttgccctctgtcagtcctaatgatgagcgttaagaacaacaccaagatactgaaagcaaacatggcttgttcagtcgggcagcggcagcagaggggatggggccaatgacggaggcggagaggagaacccatcgatttggtggcgtaagtgggagctcatcgaggccgccaccggccggtccacctcttcaataatcgtccttcatcgcccttcagttgacctgagatctagaaggacacaacaggcaagaggggcgagggttgttcagtgctttgacatgtgtgcaactattcaagcacaatggttagatgatatccccattcattttagattattacattgtggtgttcggcttcttcagtcaagcagcaatcatgcaacatgccttactgtagttttttatcactgcacatgttgctggacaaatttatggactggaggattatagaggactaacaagtgctactgggagattctcgagcaccattgaactaagagattccaaatagttctttggagtctattgttgatgttggcggggataatctagcagagatttgtcagattttttgtgcaacacggaggctacatgaggcagcaacgatcccattcttctcgcatgccactttacacaagctaaggatagcttctggtctcactcatggttgtggcagggaaagccgagtcagtagggtttgtcatgtagctggagttatctcagaccacatattagatgcagtgatgatgttaatggaggatgtttacatttaccgtgcaagcaagatgacttatattatgccttaggacaataagtattgttttcactctaatgaaatacttggtaaaaagttgtctctgtagttgtatatttgactgtgaatatttgaacccactgttacaattgttgctaattgaggtcagatttcagaggccaaataattc

SEQ ID NO: 5860 - DNA, 4380 bp, Zea Mays
gtttcaggtgctagcataccttctgatatcgtcatcagcaactgctcgagcaagtgatttgactgagaactgggggagcgattccttcccgaacatggcgaactgctcgagcatgacatcacaatggtcatcagttggtgtgcaatcagccaatcaccacatacatatactacggatcaaggttcataaaccataatgcagctccaacaacaccgtttacaagttgcaacagctggaactggcaagaattgcaaagatacgcaggctactacagcctaactatctggattttgtgtatgctgttaactgagagttcttaaaaattaatgaattaacgaatccccaaggcccagccggatgaactgcatgcattgtcatctgcttgcagctgcctctgcaacggcttggagctccacgtgagctcctgcacggcggccgggaagatgaccgtaggtttcctcctgctctcctccaggtacgggaagtcctcggtgaagtgcaggccgcggctctcgcgcctggccagcgcgctcctgacgacgagcttggcgcagcagaagaggttgcgcatctcgcagacctcgacgcccttcagccgccccgttgagcgcacgatgccgacatactcccacatcacctactgcagctccatcctggcctgcctcgtctgccccacgatgtccgacagcgcgccgtcgcccagcgccgaccgtggcagcgtcagccgtgcccacctcgccgccagcgacggtcgtggagaactctcgcgctctggagagattttgcgcccgtggatccgtcgtaagaaacagactgccgtaacaacaaggattactgggctaaaactgactcggatactaaaattccgaatttcaatggattataatactacaattccaattgctctgttcgggataccaatttttagaagcccgaatgttcgggatatcacggttccaaaaagctcctcctcgagcgcgtgcgcagcggctctcctccccacaggcagtcgcgcggcggcctcatccccgccggcgagcctccactcccctccgccggtacgcctctatcgccggtggcctcccctcggcagacagcctcgcctcgcttgcttctattgctgtgctccaccacagagccctaggtggagctacgaaccccgtgatccccgacggtgtggcaccggagctcggcggcgacagcgggcacatccccctcatgccctaggtggagcaacgaaccccctgacttcccgacgccaccctcgcacaagatcccgatgtggcaatggcgaccagcgacgggcgctcaacgccaccgcgccgcctgcgaacccatggtgagaagtgtggtatcgatctagagccgaaggacttccccaacaccccttcctccatcggcgtgacatcggccagctcatctgcgacgacgaggcatcttcgaccgacttctcgacaccccatcctccatcaatgcggctccagtaccccttcctccatcggcgcagcagcatccaattcatctacgatgacaaggcatcttcgaccaaccacgccctactacaagtggtgtcagtccatctcagataagtggagtaatttgtttgtatctgtatcttctattttatttcttccctaatcctgattaatagcctaatcacgcgacaactaatacatgttgatttctttccttagtcggtgtcgtgcgcatgtgagatctagggagaggaagaggaggaagggttgtggggaccgggggtgcaagatggcggattcacctgcaactacaagaaaagaaagagcgagagatttacagaaaccttcagagccgcggaggaggagaaggagattaggaggatctctacggcgctgacggattagttaaggaacgaaatatcacatcgtgtccggtaaccagattcagatgtgggcaccatgcgtgggtgcagggccaggccgaggtgaaagagattcgacgattgagaatacatcaaagaataaaaatgtggaactcggattttcagatgaagagcgtgaccaagaatttcccgattttccatcatttattccattcttacctcctctgagtgcagctaacctaaaggtctactatgccacacgtttcaccatcatagttgggataatggtgttcggtggttttcttgcaccaatcttaaacttggtctaggggcacatcttatgaagactccatctgcagcgttcatctgtcgacgtagttgagatgaattctctatgcctacttctagagtgatgttcaaagaggttgacgctccttcaccatccccagctttgtggaatgggccacaggtagccatttaggatgacaaagccacaagggtgtccttcatcaaggctatgctagaagcctcagacttgtgtctgaggaaaattcataaaaatggtacacagaagctgggaagaaagtggaagaggaatttagcacttgccctctgtcagtcctaatgatgagcgttaagaacaacaccaagatactgaaagcaaacatggcttgttcagtcgggcagcggcagcagaggggatggggccaatgacggaggcggagaggagaacccatcgatttggtggcgtaagtgggagctcatcgaggccggtgcgtttgggcaggtctaccgcatgatttatttgcccttatagggatcagcagatcccacacctattacatgatctgtccttctagaatagaatccgctctctatcttctgaaccggtactgccttcttcaatatcagccaccggccggtccacctcttcaataatcgtccttcatcgcccttcagttttccacacgtgaaatagccatatggatatgtaacaacataaatctgttcagtgggaaataagtttctataatacatttatgcacccaggtgacaagaaaaaaatattttgtcatttctataaaacatgatgcattttttttcaattcatattgtgatgttattcctcttttgcctttagagaagcccataatacaaatggataagaagtcaccaaacatttctaaatcactggtcttcatccagtgacaacctttagtgtcgagctggtgtttgtgcttgagctttagtgtgtctgcaacaagcctttaggaatgtcgatatgctcatatgcttagttgtgcatgagtatttttgttgcaaggtttagatgcagtgttctggtctttagtgcatgtattttatagaatataacacttctatattgtagaatgcaatctgatagtttacatagaaactgataaacttgattgatccttggcattatagtacaaaaagtgcaataccttgtgaattaattttgtacctcattgtcatttacgggttaactatccatacattgtattacatgttttctacaacctgttcttatttctcaacgaatagtagcaatcattggtcaggacatgtagcttcattggtcaggacatgtagcttaatgctatcttgttgttttctactgttcataaacgcaggacctgagatctagaaggacacaacaggcaaggtggatgtattcgtagttgattatatgttaaaagcaaattttggatgacattggtggagattgcttatctctaagacacatctactcattctttgaatggaaatcacatccacgttctagaaagtctatttttacttcaaaaaggggcgagggttgttcagtgctttgacatgtgtgcaactattcaagcacaatggttagatgatatccccattcattttagattattacattgtggtgttcggcttcttcagtcaagcagcaatcatgcaacatgccttactgtagttttttatcactgcacatgttgctggacaaatttatggactggaggattatagaggactaacaagtgctactgggagattctcgagcaccattgaactaagagattccaaatagttctttggagtctattgttgatgttggcggggataatctagcagagatttgtcagattttttgtgcaacacggaggctacatgaggcagcaacgatcccattcttctcgcatgccactttacacaagctaaggatagcttctggtctcactcatggttgtggcagggaaagccgagtcagtagggtttgtcatgtagctggagttatctcagaccacatattagatgcagtgatgatgttaatggaggatgtttacatttaccgtgcaagcaagatgacttatattatgccttaggacaataagtattgttttcactctaatgaaatacttggtaaaaagttgtctctgtagttgtatatttgactgtgaatatttgaacccactgttacaattgttgctaattgaggtcagatttcagaggccaaataattc

SEQ ID NO: 5861 - DNA, 3539 bp, Zea Mays
gtttcaggtgctagcataccttctgatatcgtcatcagcaactgctcgagcaagtgatttgactgagaactgggggagcgattccttcccgaacatggcgaactgctcgagcatgacatcacaatggtcatcagttggtgtgcaatcagccaatcaccacatacatatactacggatcaaggttcataaaccataatgcagctccaacaacaccgtttacaagttgcaacagctggaactggcaagaattgcaaagatacgcaggctactacagcctaactatctggattttgtgtatgctgttaactgagagttcttaaaaattaatgaattaacgaatccccaaggcccagccggatgaactgcatgcattgtcatctgcttgcagctgcctctgcaacggcttggagctccacgtgagctcctgcacggcggccgggaagatgaccgtaggtttcctcctgctctcctccaggtacgggaagtcctcggtgaagtgcaggccgcggctctcgcgcctggccagcgcgctcctgacgacgagcttggcgcagcagaagaggttgcgcatctcgcagacctcgacgcccttcagccgccccgttgagcgcacgatgccgacatactcccacatcacctactgcagctccatcctggcctgcctcgtctgccccacgatgtccgacagcgcgccgtcgcccagcgccgaccgtggcagcgtcagccgtgcccacctcgccgccagcgacggtcgtggagaactctcgcgctctggagagattttgcgcccgtggatccgtcgtaagaaacagactgccgtaacaacaaggattactgggctaaaactgactcggatactaaaattccgaatttcaatggattataatactacaattccaattgctctgttcgggataccaatttttagaagcccgaatgttcgggatatcacggttccaaaaagctcctcctcgagcgcgtgcgcagcggctctcctccccacaggcagtcgcgcggcggcctcatccccgccggcgagcctccactcccctccgccggtacgcctctatcgccggtggcctcccctcggcagacagcctcgcctcgcttgcttctattgctgtgctccaccacagagccctaggtggagctacgaaccccgtgatccccgacggtgtggcaccggagctcggcggcgacagcgggcacatccccctcatgccctaggtggagcaacgaaccccaccgtgctcaacattgccgccaagaatgcgactctcctcgccgcactgctctatctcggggacctcgcctagcattgccccctgccccgcatcgacgaggtggagtccttcctcgcccgcaccttccggatgatccagctgacttcccgacgccaccctcgcacaagatcccgatgtggcaatggcgaccagcgacgggcgctcaacgccaccgcgccgcctgcgaacccatggtgagaagtgtggtatcgatctagagccgaaggacttccccaacaccccttcctccatcggcgtgacatcggccagctcatctgcgacgacgaggcatcttcgaccgacttctcgacaccccatcctccatcaatgcggctccagtaccccttcctccatcggcgcagcagcatccaattcatctacgatgacaaggcatcttcgaccaaccacgccctactacaagtggtgtcagtccatctcagataagtggagtaatttgtttgtatctgtatcttctattttatttcttccctaatcctgattaatagcctaatcacgcgacaactaatacatgttgatttctttccttagtcggtgtcgtgcgcatgtgagatctagggagaggaagaggaggaagggttgtggggaccgggggtgcaagatggcggattcacctgcaactacaagaaaagaaagagcgagagatttacagaaaccttcagagccgcggaggaggagaaggagattaggaggatctctacggcgctgacggattagttaaggaacgaaatatcacatcgtgtccggtaaccagattcagatgtgggcaccatgcgtgggtgcagggccaggccgaggtgaaagagattcgacgattgagaatacatcaaagaataaaaatgtggaactcggattttcagatgaagagcgtgaccaagaatttcccgattttccatcatttattccattcttacctcctctgagtgcagctaacctaaaggtctactatgccacacgtttcaccatcatagttgggataatggtgttcggtggttttcttgcaccaatcttaaacttggtctaggggcacatcttatgaagactccatctgcagcgttcatctgtcgacgtagttgagatgaattctctatgcctacttctagagtgatgttcaaagaggttgacgctccttcaccatccccagctttgtggaatgggccacaggtagccatttaggatgacaaagccacaagggtgtccttcatcaaggctatgctagaagcctcagacttgtgtctgaggaaaattcataaaaatggtacacagaagctgggaagaaagtggaagaggaatttagcacttgccctctgtcagtcctaatgatgagcgttaagaacaacaccaagatactgaaagcaaacatggcttgttcagtcgggcagcggcagcagaggggatggggccaatgacggaggcggagaggagaacccatcgatttggtggcgtaagtgggagctcatcgaggccgccaccggccggtccacctcttcaataatcgtccttcatcgcccttcagttgacctgagatctagaaggacacaacagaggggcgagggttgttcagtgctttgacatgtgtgcaactattcaagcacaatggttagatgatatccccattcattttagattattacattgtggtgttcggcttcttcagtcaagcagcaatcatgcaacatgccttactgtagttttttatcactgcacatgttgctggacaaatttatggactggaggattatagaggactaacaagtgctactgggagattctcgagcaccattgaactaagagattccaaatagttctttggagtctattgttgatgttggcggggataatctagcagagatttgtcagattttttgtgcaacacggaggctacatgaggcagcaacgatcccattcttctcgcatgccactttacacaagctaaggatagcttctggtctcactcatggttgtggcagggaaagccgagtcagtagggtttgtcatgtagctggagttatctcagaccacatattagatgcagtgatgatgttaatggaggatgtttacatttaccgtgcaagcaagatgacttatattatgccttaggacaataagtattgttttcactctaatgaaatacttggtaaaaagttgtctctgtagttgtatatttgactgtgaatatttgaacccactgttacaattgttgctaattgaggtcagatttcagaggccaaataattc

SEQ ID NO: 5862 - DNA, 3499 bp, Zea Mays
gtttcaggtgctagcataccttctgatatcgtcatcagcaactgctcgagcaagtgatttgactgagaactgggggagcgattccttcccgaacatggcgaactgctcgagcatgacatcacaatggtcatcagttggtgtgcaatcagccaatcaccacatacatatactacggatcaaggttcataaaccataatgcagctccaacaacaccgtttacaagttgcaacagctggaactggcaagaattgcaaagatacgcaggctactacagcctaactatctggattttgtgtatgctgttaactgagagttcttaaaaattaatgaattaacgaatccccaaggcccagccggatgaactgcatgcattgtcatctgcttgcagctgcctctgcaacggcttggagctccacgtgagctcctgcacggcggccgggaagatgaccgtaggtttcctcctgctctcctccaggtacgggaagtcctcggtgaagtgcaggccgcggctctcgcgcctggccagcgcgctcctgacgacgagcttggcgcagcagaagaggttgcgcatctcgcagacctcgacgcccttcagccgccccgttgagcgcacgatgccgacatactcccacatcacctactgcagctccatcctggcctgcctcgtctgccccacgatgtccgacagcgcgccgtcgcccagcgccgaccgtggcagcgtcagccgtgcccacctcgccgccagcgacggtcgtggagaactctcgcgctctggagagattttgcgcccgtggatccgtcgtaagaaacagactgccgtaacaacaaggattactgggctaaaactgactcggatactaaaattccgaatttcaatggattataatactacaattccaattgctctgttcgggataccaatttttagaagcccgaatgttcgggatatcacggttccaaaaagctcctcctcgagcgcgtgcgcagcggctctcctccccacaggcagtcgcgcggcggcctcatccccgccggcgagcctccactcccctccgccggtacgcctctatcgccggtggcctcccctcggcagacagcctcgcctcgcttgcttctattgctgtgctccaccacagagccctaggtggagctacgaaccccgtgatccccgacggtgtggcaccggagctcggcggcgacagcgggcacatccccctcatgccctaggtggagcaacgaaccccctgacttcccgacgccaccctcgcacaagatcccgatgtggcaatggcgaccagcgacgggcgctcaacgccaccgcgccgcctgcgaacccatggtgagaagtgtggtatcgatctagagccgaaggacttccccaacaccccttcctccatcggcgtgacatcggccagctcatctgcgacgacgaggcatcttcgaccgacttctcgacaccccatcctccatcaatgcggctccagtaccccttcctccatcggcgcagcagcatccaattcatctacgatgacaaggcatcttcgaccaaccacgccctactacaagtggtgtcagtccatctcagataagtggagtaatttgtttgtatctgtatcttctattttatttcttccctaatcctgattaatagcctaatcacgcgacaactaatacatgttgatttctttccttagtcggtgtcgtgcgcatgtgagatctagggagaggaagaggaggaagggttgtggggaccgggggtgcaagatggcggattcacctgcaactacaagaaaagaaagagcgagagatttacagaaaccttcagagccgcggaggaggagaaggagattaggaggatctctacggcgctgacggattagttaaggaacgaaatatcacatcgtgtccggtaaccagattcagatgtgggcaccatgcgtgggtgcagggccaggccgaggtgaaagagattcgacgattgagaatacatcaaagaataaaaatgtggaactcggattttcagatgaagagcgtgaccaagaatttcccgattttccatcatttattccattcttacctcctctgagtgcagctaacctaaaggtctactatgccacacgtttcaccatcatagttgggataatggtgttcggtggttttcttgcaccaatcttaaacttggtctaggggcacatcttatgaagactccatctgcagcgttcatctgtcgacgtagttgagaagtgcactcaggttatacatccagtaaagagcaagacatttgaaagcttatgggccaactgtgttgctattgatgcaagcgaaagttggctgatgaattctctatgcctacttctagagtgatgttcaaagaggttgacgctccttcaccatccccagctttgtggaatgggccacaggtagccatttaggatgacaaagccacaagggtgtccttcatcaaggctatgctagaagcctcagacttgtgtctgaggaaaattcataaaaatggtacacagaagctgggaagaaagtggaagaggaatttagcacttgccctctgtcagtcctaatgatgagcgttaagaacaacaccaagatactgaaagcaaacatggcttgttcagtcgggcagcggcagcagaggggatggggccaatgacggaggcggagaggagaacccatcgatttggtggcgtaagtgggagctcatcgaggccgccaccggccggtccacctcttcaataatcgtccttcatcgcccttcagttgacctgagatctagaaggacacaacaggcaagaggggcgagggttgttcagtgctttgacatgtgtgcaactattcaagcacaatggttagatgatatccccattcattttagattattacattgtggtgttcggcttcttcagtcaagcagcaatcatgcaacatgccttactgtagttttttatcactgcacatgttgctggacaaatttatggactggaggattatagaggactaacaagtgctactgggagattctcgagcaccattgaactaagagattccaaatagttctttggagtctattgttgatgttggcggggataatctagcagagatttgtcagattttttgtgcaacacggaggctacatgaggcagcaacgatcccattcttctcgcatgccactttacacaagctaaggatagcttctggtctcactcatggttgtggcagggaaagccgagtcagtagggtttgtcatgtagctggagttatctcagaccacatattagatgcagtgatgatgttaatggaggatgtttacatttaccgtgcaagcaagatgacttatattatgccttaggacaataagtattgttttcactctaatgaaatacttggtaaaaagttgtctctgtagttgtatatttgactgtgaatatttgaacccactgttacaattgttgctaattgaggtcagatttcagaggccaaataattc

SEQ ID NO: 5863 - DNA, 5068 bp, Zea Mays
gtttcaggtgctagcataccttctgatatcgtcatcagcaactgctcgagcaagtgatttgactgagaactgggggagcgattccttcccgaacatggcgaactgctcgagcatgacatcacaatggtcatcagttggtgtgcaatcagccaatcaccacatacatatactacggatcaaggttcataaaccataatgcagctccaacaacaccgtttacaagttgcaacagctggaactggcaagaattgcaaagatacgcaggctactacagcctaactatctggattttgtgtatgctgttaactgagagttcttaaaaattaatgaattaacgaatccccaaggcccagccggatgaactgcatgcattgtcatctgcttgcagctgcctctgcaacggcttggagctccacgtgagctcctgcacggcggccgggaagatgaccgtaggtttcctcctgctctcctccaggtacgggaagtcctcggtgaagtgcaggccgcggctctcgcgcctggccagcgcgctcctgacgacgagcttggcgcagcagaagaggttgcgcatctcgcagacctcgacgcccttcagccgccccgttgagcgcacgatgccgacatactcccacatcacctactgcagctccatcctggcctgcctcgtctgccccacgatgtccgacagcgcgccgtcgcccagcgccgaccgtggcagcgtcagccgtgcccacctcgccgccagcgacggtcgtggagaactctcgcgctctggagagattttgcgcccgtggatccgtcgtaagaaacagactgccgtaacaacaaggattactgggctaaaactgactcggatactaaaattccgaatttcaatggattataatactacaattccaattgctctgttcgggataccaatttttagaagcccgaatgttcgggatatcacggttccaaaaagctcctcctcgagcgcgtgcgcagcggctctcctccccacaggcagtcgcgcggcggcctcatccccgccggcgagcctccactcccctccgccggtacgcctctatcgccggtggcctcccctcggcagacagcctcgcctcgcttgcttctattgctgtgctccaccacagagccctaggtggagctacgaaccccgtgatccccgacggtgtggcaccggagctcggcggcgacagcgggcacatccccctcatgccctaggtggagcaacgaaccccctgacttcccgacgccaccctcgcacaagatcccgatgtggcaatggcgaccagcgacgggcgctcaacgccaccgcgccgcctgcgaacccatggtgagaagtgtggtatcgatctagagccgaaggacttccccaacaccccttcctccatcggcgtgacatcggccagctcatctgcgacgacgaggcatcttcgaccgacttctcgacaccccatcctccatcaatgcggctccagtaccccttcctccatcggcgcagcagcatccaattcatctacgatgacaaggcatcttcgaccaaccacgccctactacaagtggtgtcagtccatctcagataagtggagtaatttgtttgtatctgtatcttctattttatttcttccctaatcctgattaatagcctaatcacgcgacaactaatacatgttgatttctttccttagtcggtgtcgtgcgcatgtgagatctagggagaggaagaggaggaagggttgtggggaccgggggtgcaagatggcggattcacctgcaactacaagaaaagaaagagcgagagatttacagaaaccttcagagccgcggaggaggagaaggagattaggaggatctctacggcgctgacggattagttaaggaacgaaatatcacatcgtgtccggtaaccagattcagatgtgggcaccatgcgtgggtgcagggccaggccgaggtgaaagagatgaagagcgtgaccaagaatttcccgattttccatcatttattccattcttacctcctctgagtgcagctaacctaaaggtctactatgccacacgtttcaccatcatagttgggataatggtgttcggtggttttcttgcaccaatcgggcacatcttatgaagactccatctgcagcgttcatctgtcgacgtagttgagaagtgcactcaggttatacatccagtaaagagcaagacatttgaaagcttatgggccaactgtgttgctattgatgcaagcgaaagttggctgatgaattctctatgcctacttctagagtgatgttcaaagaggttgacgctccttcaccatccccagctttgtggaatgggccacaggtagccatttaggatgacaaagccacaagggtgtccttcatcaaggctatgctagaagcctcagacttgtgtctgaggaaaattcataaaaatggtacacagaagctgggaagaaagtggaagaggaatttagcacttgccctctgtcagtcctaatgatgagcgttaagaacaacaccaagatactgaaagcaaacatggcttgttcagtcgggcagcggcagcagaggggatggggccaatgacggaggcggagaggagaacccatcgatttggtggcgtaagtgggagctcatcgaggccggtgcgtttgggcaggtctaccgcatgatttatttgcccttatagggatcagcagatcccacacctattacatgatctgtccttctagaatagaatccgctctctatcttctgaaccggtactgccttcttcaatatcagccaccggccggtccacctcttcaataatcgtccttcatcgcccttcagttttccacacgtgaaatagccatatggatatgtaacaacataaatctgttcagtgggaaataagtttctataatacatttatgcacccaggtgacaagaaaaaaatattttgtcatttctataaaacatgatgcattttttttcaattcatattgtgatgttattcctcttttgcctttagagaagcccataatacaaatggataagaagtcaccaaacatttctaaatcactggtcttcatccagtgacaacctttagtgtcgagctggtgtttgtgcttgagctttagtgtgtctgcaacaagcctttaggaatgtcgatatgctcatatgcttagttgtgcatgagtatttttgttgcaaggtttagatgcagtgttctggtctttagtgcatgtattttatagaatataacacttctatattgtagaatgcaatctgatagtttacatagaaactgataaacttgattgatccttggcattatagtacaaaaagtgcaataccttgtgaattaattttgtacctcattgtcatttacgggttaactatccatacattgtattacatgttttctacaacctgttcttatttctcaacgaatagtagcaatcattggtcaggacatgtagcttcattggtcaggacatgtagcttaatgctatcttgttgttttctactgttcataaacgcaggacctgagatctagaaggacacaacaggcaaggtggatgtattcgtagttgattatatgttaaaagcaaattttggatgacattggtggagattgcttatctctaagacacatctactcattctttgaatggaaatcacatccacgttctagaaagtctatttttacttcaaaagtactccttctgttccaaataaattagtgttagcatctctgcactctattgcccacttcccccctcatcggtgttttttattgttgcatatcaattttgtggctcaaatgcccctttgaaacatatagcaccaaaattatcctaattaattaattggtttctaactggctactctatttgcaacaatggggatatataaccttaccatgtctgtttatcacagtgcatcttagattgcatcgtattgtaattgttttagttccttgacatactgtttgtgcaacaggaactgcttgatgtacttacggttgggtatctgtgtagctgtagctgccaagttgcctaaagaaaagttcccgacctttcacatgctgccacattgccacaataccttaagagcttttctatacttctatgatttgtgttttcgagatctgagttatttaaatgttgtctgctattttgaatttttatatgaagatcaaagttctcaattgataaagtaattaatataacaagcgaacaacacatagacaaactaattaatgtagcatatagacgaataaggaatcctgaaacattgaccgtgaagaaaattattgtgcacatatgcactctttctccaaaatttggcatttaatcttattgcaacatacttgtacagaggggcgagggttgttcagtgctttgacatgtgtgcaactattcaagcacaatggttagatgatatccccattcattttagattattacattgtggtgttcggcttcttcagtcaagcagcaatcatgcaacatgccttactgtagttttttatcactgcacatgttgctggacaaatttatggactggaggattatagaggactaacaagtgctactgggagattctcgagcaccattgaactaagagattccaaatagttctttggagtctattgttgatgttggcggggataatctagcagagatttgtcagattttttgtgcaacacggaggctacatgaggcagcaacgatcccattcttctcgcatgccactttacacaagctaaggatagcttctggtctcactcatggttgtggcagggaaagccgagtcagtagggtttgtcatgtagctggagttatctcagaccacatattagatgcagtgatgatgttaatggaggatgtttacatttaccgtgcaagcaagatgacttatattatgccttaggacaataagtattgttttcactctaatgaaatacttggtaaaaagttgtctctgtagttgtatatttgactgtgaatatttgaacccactgttacaattgttgctaattgaggtcagatttcagaggccaaataattc

SEQ ID NO: 5864 - DNA, 3775 bp, Zea Mays
gtttcaggtgctagcataccttctgatatcgtcatcagcaactgctcgagcaagtgatttgactgagaactgggggagcgattccttcccgaacatggcgaactgctcgagcatgacatcacaatggtcatcagttggtgtgcaatcagccaatcaccacatacatatactacggatcaaggttcataaaccataatgcagctccaacaacaccgtttacaagttgcaacagctggaactggcaagaattgcaaagatacgcaggctactacagcctaactatctggattttgtgtatgctgttaactgagagttcttaaaaattaatgaattaacgaatccccaaggcccagccggatgaactgcatgcattgtcatctgcttgcagctgcctctgcaacggcttggagctccacgtgagctcctgcacggcggccgggaagatgaccgtaggtttcctcctgctctcctccaggtacgggaagtcctcggtgaagtgcaggccgcggctctcgcgcctggccagcgcgctcctgacgacgagcttggcgcagcagaagaggttgcgcatctcgcagacctcgacgcccttcagccgccccgttgagcgcacgatgccgacatactcccacatcacctactgcagctccatcctggcctgcctcgtctgccccacgatgtccgacagcgcgccgtcgcccagcgccgaccgtggcagcgtcagccgtgcccacctcgccgccagcgacggtcgtggagaactctcgcgctctggagagattttgcgcccgtggatccgtcgtaagaaacagactgccgtaacaacaaggattactgggctaaaactgactcggatactaaaattccgaatttcaatggattataatactacaattccaattgctctgttcgggataccaatttttagaagcccgaatgttcgggatatcacggttccaaaaagctcctcctcgagcgcgtgcgcagcggctctcctccccacaggcagtcgcgcggcggcctcatccccgccggcgagcctccactcccctccgccggtacgcctctatcgccggtggcctcccctcggcagacagcctcgcctcgcttgcttctattgctgtgctccaccacagagccctaggtggagctacgaaccccgtgatccccgacggtgtggcaccggagctcggcggcgacagcgggcacatccccctcatgccctaggtggagcaacgaaccccctgacttcccgacgccaccctcgcacaagatcccgatgtggcaatggcgaccagcgacgggcgctcaacgccaccgcgccgcctgcgaacccatggtgagaagtgtggtatcgatctagagccgaaggacttccccaacaccccttcctccatcggcgtgacatcggccagctcatctgcgacgacgaggcatcttcgaccgacttctcgacaccccatcctccatcaatgcggctccagtaccccttcctccatcggcgcagcagcatccaattcatctacgatgacaaggcatcttcgaccaaccacgccctactacaagtggtgtcagtccatctcagataagtggagtaatttgtttgtatctgtatcttctattttatttcttccctaatcctgattaatagcctaatcacgcgacaactaatacatgttgatttctttccttagtcggtgtcgtgcgcatgtgagatctagggagaggaagaggaggaagggttgtggggaccgggggtgcaagatggcggattcacctgcaactacaagaaaagaaagagcgagagatttacagaaaccttcagagccgcggaggaggagaaggagattaggaggatctctacggcgctgacggattagttaaggaacgaaatatcacatcgtgtccggtaaccagattcagatgtgggcaccatgcgtgggtgcagggccaggccgaggtgaaagagattcgacgattgagaatacatcaaagaataaaaatgtggaactcggattttcagatgaagagcgtgaccaagaatttcccgattttccatcatttattccattcttacctcctctgagtgcagctaacctaaaggtctactatgccacacgtttcaccatcatagttgggataatggtgttcggtggttttcttgcaccaatcttaaacttggtctaggggcacatcttatgaagactccatctgcagcgttcatctgtcgacgtagttgagatgaattctctatgcctacttctagagtgatgttcaaagaggttgacgctccttcaccatccccagctttgtggaatgggccacaggtagccatttaggatgacaaagccacaagggtgtccttcatcaaggctatgctagaagcctcagacttgtgtctgaggaaaattcataaaaatggtacacagaagctgggaagaaagtggaagaggaatttagcacttgccctctgtcagtcctaatgatgagcgttaagaacaacaccaagatactgaaagcaaacatggcttgttcagtcgggcagcggcagcagaggggatggggccaatgacggaggcggagaggagaacccatcgatttggtggcgtaagtgggagctcatcgaggccggtgcgtttgggcaggtctaccgcatgatttatttgcccttatagggatcagcagatcccacacctattacatgatctgtccttctagaatagaatccgctctctatcttctgaaccggtactgccttcttcaatatcagccaccggccggtccacctcttcaataatcgtccttcatcgcccttcagttttccacacgtgaaatagccatatggatatgtaacaacataaatctgttcagtgggaaataagtttctataatacatttatgcacccaggacctgagatctagaaggacacaacaggcaaggtggatgtattcgtagttgattatatgttaaaagcaaattttggatgacattggtggagattgcttatctctaagacacatctactcattctttgaatggaaatcacatccacgttctagaaagtctatttttacttcaaaaaggggcgagggttgttcagtgctttgacatgtgtgcaactattcaagcacaatggttagatgatatccccattcattttagattattacattgtggtgttcggcttcttcagtcaagcagcaatcatgcaacatgccttactgtagttttttatcactgcacatgttgctggacaaatttatggactggaggattatagaggactaacaagtgctactgggagattctcgagcaccattgaactaagagattccaaatagttctttggagtctattgttgatgttggcggggataatctagcagagatttgtcagattttttgtgcaacacggaggctacatgaggcagcaacgatcccattcttctcgcatgccactttacacaagctaaggatagcttctggtctcactcatggttgtggcagggaaagccgagtcagtagggtttgtcatgtagctggagttatctcagaccacatattagatgcagtgatgatgttaatggaggatgtttacatttaccgtgcaagcaagatgacttatattatgccttaggacaataagtattgttttcactctaatgaaatacttggtaaaaagttgtctctgtagttgtatatttgactgtgaatatttgaacccactgttacaattgttgctaattgaggtcagatttcagaggccaaataattc

SEQ ID NO: 5865 - DNA, 3751 bp, Zea Mays
gtttcaggtgctagcataccttctgatatcgtcatcagcaactgctcgagcaagtgatttgactgagaactgggggagcgattccttcccgaacatggcgaactgctcgagcatgacatcacaatggtcatcagttggtgtgcaatcagccaatcaccacatacatatactacggatcaaggttcataaaccataatgcagctccaacaacaccgtttacaagttgcaacagctggaactggcaagaattgcaaagatacgcaggctactacagcctaactatctggattttgtgtatgctgttaactgagagttcttaaaaattaatgaattaacgaatccccaaggcccagccggatgaactgcatgcattgtcatctgcttgcagctgcctctgcaacggcttggagctccacgtgagctcctgcacggcggccgggaagatgaccgtaggtttcctcctgctctcctccaggtacgggaagtcctcggtgaagtgcaggccgcggctctcgcgcctggccagcgcgctcctgacgacgagcttggcgcagcagaagaggttgcgcatctcgcagacctcgacgcccttcagccgccccgttgagcgcacgatgccgacatactcccacatcacctactgcagctccatcctggcctgcctcgtctgccccacgatgtccgacagcgcgccgtcgcccagcgccgaccgtggcagcgtcagccgtgcccacctcgccgccagcgacggtcgtggagaactctcgcgctctggagagattttgcgcccgtggatccgtcgtaagaaacagactgccgtaacaacaaggattactgggctaaaactgactcggatactaaaattccgaatttcaatggattataatactacaattccaattgctctgttcgggataccaatttttagaagcccgaatgttcgggatatcacggttccaaaaagctcctcctcgagcgcgtgcgcagcggctctcctccccacaggcagtcgcgcggcggcctcatccccgccggcgagcctccactcccctccgccggtacgcctctatcgccggtggcctcccctcggcagacagcctcgcctcgcttgcttctattgctgtgctccaccacagagccctaggtggagctacgaaccccgtgatccccgacggtgtggcaccggagctcggcggcgacagcgggcacatccccctcatgccctaggtggagcaacgaaccccaccgtgctcaacattgccgccaagaatgcgactctcctcgccgcactgctctatctcggggacctcgcctagcattgccccctgccccgcatcgacgaggtggagtccttcctcgcccgcaccttccggatgatccagctgacttcccgacgccaccctcgcacaagatcccgatgtggcaatggcgaccagcgacgggcgctcaacgccaccgcgccgcctgcgaacccatggtgagaagtgtggtatcgatctagagccgaaggacttccccaacaccccttcctccatcggcgtgacatcggccagctcatctgcgacgacgaggcatcttcgaccgacttctcgacaccccatcctccatcaatgcggctccagtaccccttcctccatcggcgcagcagcatccaattcatctacgatgacaaggcatcttcgaccaaccacgccctactacaagtggtgtcagtccatctcagataagtggagtaatttgtttgtatctgtatcttctattttatttcttccctaatcctgattaatagcctaatcacgcgacaactaatacatgttgatttctttccttagtcggtgtcgtgcgcatgtgagatctagggagaggaagaggaggaagggttgtggggaccgggggtgcaagatggcggattcacctgcaactacaagaaaagaaagagcgagagatttacagaaaccttcagagccgcggaggaggagaaggagattaggaggatctctacggcgctgacggattagttaaggaacgaaatatcacatcgtgtccggtaaccagattcagatgtgggcaccatgcgtgggtgcagggccaggccgaggtgaaagagattcgacgattgagaatacatcaaagaataaaaatgtggaactcggattttcagatgaagagcgtgaccaagaatttcccgattttccatcatttattccattcttacctcctctgagtgcagctaacctaaaggtctactatgccacacgtttcaccatcatagttgggataatggtgttcggtggttttcttgcaccaatcttaaacttggtctaggggcacatcttatgaagactccatctgcagcgttcatctgtcgacgtagttgagaagtgcactcaggttatacatccagtaaagagcaagacatttgaaagcttatgggccaactgtgttgctattgatgcaagcgaaagttggctgatgaattctctatgcctacttctagagtgatgttcaaagaggttgacgctccttcaccatccccagctttgtggaatgggccacaggtagccatttaggatgacaaagccacaagggtgtccttcatcaaggctatgctagaagcctcagacttgtgtctgaggaaaattcataaaaatggtacacagaagctgggaagaaagtggaagaggaatttagcacttgccctctgtcagtcctaatgatgagcgttaagaacaacaccaagtcgggcagcggcagcagaggggatggggccaatgacggaggcggagaggagaacccatcgatttggtggcgtaagtgggagctcatcgaggccgccaccggccggtccacctcttcaataatcgtccttcatcgcccttcagttgacctgagatctagaaggacacaacaggcaaggtggatgtattcgtagttgattatatgttaaaagcaaattttggatgacattggtggagattgcttatctctaagacacatctactcattctttgaatggaaatcacatccacgttctagaaagtctatttttacttcaaaaaggggcgagggttgttcagtgctttgacatgtgtgcaactattcaagcacaatggttagatgatatccccattcattttagattattacattgtggtgttcggcttcttcagtcaagcagcaatcatgcaacatgccttactgtagttttttatcactgcacatgttgctggacaaatttatggactggaggattatagaggactaacaagtgctactgggagattctcgagcaccattgaactaagagattccaaatagttctttggagtctattgttgatgttggcggggataatctagcagagatttgtcagattttttgtgcaacacggaggctacatgaggcagcaacgatcccattcttctcgcatgccactttacacaagctaaggatagcttctggtctcactcatggttgtggcagggaaagccgagtcagtagggtttgtcatgtagctggagttatctcagaccacatattagatgcagtgatgatgttaatggaggatgtttacatttaccgtgcaagcaagatgacttatattatgccttaggacaataagtattgttttcactctaatgaaatacttggtaaaaagttgtctctgtagttgtatatttgactgtgaatatttgaacccactgttacaattgttgctaattgaggtcagatttcagaggccaaataattc

SEQ ID NO: 5866 - DNA, 3513 bp, Zea Mays
gtttcaggtgctagcataccttctgatatcgtcatcagcaactgctcgagcaagtgatttgactgagaactgggggagcgattccttcccgaacatggcgaactgctcgagcatgacatcacaatggtcatcagttggtgtgcaatcagccaatcaccacatacatatactacggatcaaggttcataaaccataatgcagctccaacaacaccgtttacaagttgcaacagctggaactggcaagaattgcaaagatacgcaggctactacagcctaactatctggattttgtgtatgctgttaactgagagttcttaaaaattaatgaattaacgaatccccaaggcccagccggatgaactgcatgcattgtcatctgcttgcagctgcctctgcaacggcttggagctccacgtgagctcctgcacggcggccgggaagatgaccgtaggtttcctcctgctctcctccaggtacgggaagtcctcggtgaagtgcaggccgcggctctcgcgcctggccagcgcgctcctgacgacgagcttggcgcagcagaagaggttgcgcatctcgcagacctcgacgcccttcagccgccccgttgagcgcacgatgccgacatactcccacatcacctactgcagctccatcctggcctgcctcgtctgccccacgatgtccgacagcgcgccgtcgcccagcgccgaccgtggcagcgtcagccgtgcccacctcgccgccagcgacggtcgtggagaactctcgcgctctggagagattttgcgcccgtggatccgtcgtaagaaacagactgccgtaacaacaaggattactgggctaaaactgactcggatactaaaattccgaatttcaatggattataatactacaattccaattgctctgttcgggataccaatttttagaagcccgaatgttcgggatatcacggttccaaaaagctcctcctcgagcgcgtgcgcagcggctctcctccccacaggcagtcgcgcggcggcctcatccccgccggcgagcctccactcccctccgccggtacgcctctatcgccggtggcctcccctcggcagacagcctcgcctcgcttgcttctattgctgtgctccaccacagagccctaggtggagctacgaaccccgtgatccccgacggtgtggcaccggagctcggcggcgacagcgggcacatccccctcatgccctaggtggagcaacgaaccccctgacttcccgacgccaccctcgcacaagatcccgatgtggcaatggcgaccagcgacgggcgctcaacgccaccgcgccgcctgcgaacccatggtgagaagtgtggtatcgatctagagccgaaggacttccccaacaccccttcctccatcggcgtgacatcggccagctcatctgcgacgacgaggcatcttcgaccgacttctcgacaccccatcctccatcaatgcggctccagtaccccttcctccatcggcgcagcagcatccaattcatctacgatgacaaggcatcttcgaccaaccacgccctactacaagtggtgtcagtccatctcagataagtggagtaatttgtttgtatctgtatcttctattttatttcttccctaatcctgattaatagcctaatcacgcgacaactaatacatgttgatttctttccttagtcggtgtcgtgcgcatgtgagatctagggagaggaagaggaggaagggttgtggggaccgggggtgcaagatggcggattcacctgcaactacaagaaaagaaagagcgagagatttacagaaaccttcagagccgcggaggaggagaaggagattaggaggatctctacggcgctgacggattagttaaggaacgaaatatcacatcgtgtccggtaaccagattcagatgtgggcaccatgcgtgggtgcagggccaggccgaggtgaaagagattcgacgattgagaatacatcaaagaataaaaatgtggaactcggattttcagatgaagagcgtgaccaagaatttcccgattttccatcatttattccattcttacctcctctgagtgcagctaacctaaaggtctactatgccacacgtttcaccatcatagttgggataatggtgttcggtggttttcttgcaccaatcttaaacttggtctaggggcacatcttatgaagactccatctgcagcgttcatctgtcgacgtagttgagatgaattctctatgcctacttctagagtgatgttcaaagaggttgacgctccttcaccatccccagctttgtggaatgggccacaggtagccatttaggatgacaaagccacaagggtgtccttcatcaaggctatgctagaagcctcagacttgtgtctgaggaaaattcataaaaatggtacacagaagctgggaagaaagtggaagaggaatttagcacttgccctctgtcagtcctaatgatgagcgttaagaacaacaccaagatactgaaagcaaacatggcttgttcagtcgggcagcggcagcagaggggatggggccaatgacggaggcggagaggagaacccatcgatttggtggcgtaagtgggagctcatcgaggccggtgcgtttgggcaggtctaccgcatgatttatttgcccttatagggatcagcagatcccacacctattacatgatctgtccttctagaatagaatccgctctctatcttctgaaccggtactgccttcttcaatatcagccaccggccggtccacctcttcaataatcgtccttcatcgcccttcagttaggggcgagggttgttcagtgctttgacatgtgtgcaactattcaagcacaatggttagatgatatccccattcattttagattattacattgtggtgttcggcttcttcagtcaagcagcaatcatgcaacatgccttactgtagttttttatcactgcacatgttgctggacaaatttatggactggaggattatagaggactaacaagtgctactgggagattctcgagcaccattgaactaagagattccaaatagttctttggagtctattgttgatgttggcggggataatctagcagagatttgtcagattttttgtgcaacacggaggctacatgaggcagcaacgatcccattcttctcgcatgccactttacacaagctaaggatagcttctggtctcactcatggttgtggcagggaaagccgagtcagtagggtttgtcatgtagctggagttatctcagaccacatattagatgcagtgatgatgttaatggaggatgtttacatttaccgtgcaagcaagatgacttatattatgccttaggacaataagtattgttttcactctaatgaaatacttggtaaaaagttgtctctgtagttgtatatttgactgtgaatatttgaacccactgttacaattgttgctaattgaggtcagatttcagaggccaaataattc

SEQ ID NO: 5867 - DNA, 3700 bp, Zea Mays
gtttcaggtgctagcataccttctgatatcgtcatcagcaactgctcgagcaagtgatttgactgagaactgggggagcgattccttcccgaacatggcgaactgctcgagcatgacatcacaatggtcatcagttggtgtgcaatcagccaatcaccacatacatatactacggatcaaggttcataaaccataatgcagctccaacaacaccgtttacaagttgcaacagctggaactggcaagaattgcaaagatacgcaggctactacagcctaactatctggattttgtgtatgctgttaactgagagttcttaaaaattaatgaattaacgaatccccaaggcccagccggatgaactgcatgcattgtcatctgcttgcagctgcctctgcaacggcttggagctccacgtgagctcctgcacggcggccgggaagatgaccgtaggtttcctcctgctctcctccaggtacgggaagtcctcggtgaagtgcaggccgcggctctcgcgcctggccagcgcgctcctgacgacgagcttggcgcagcagaagaggttgcgcatctcgcagacctcgacgcccttcagccgccccgttgagcgcacgatgccgacatactcccacatcacctactgcagctccatcctggcctgcctcgtctgccccacgatgtccgacagcgcgccgtcgcccagcgccgaccgtggcagcgtcagccgtgcccacctcgccgccagcgacggtcgtggagaactctcgcgctctggagagattttgcgcccgtggatccgtcgtaagaaacagactgccgtaacaacaaggattactgggctaaaactgactcggatactaaaattccgaatttcaatggattataatactacaattccaattgctctgttcgggataccaatttttagaagcccgaatgttcgggatatcacggttccaaaaagctcctcctcgagcgcgtgcgcagcggctctcctccccacaggcagtcgcgcggcggcctcatccccgccggcgagcctccactcccctccgccggtacgcctctatcgccggtggcctcccctcggcagacagcctcgcctcgcttgcttctattgctgtgctccaccacagagccctaggtggagctacgaaccccgtgatccccgacggtgtggcaccggagctcggcggcgacagcgggcacatccccctcatgccctaggtggagcaacgaaccccaccgtgctcaacattgccgccaagaatgcgactctcctcgccgcactgctctatctcggggacctcgcctagcattgccccctgccccgcatcgacgaggtggagtccttcctcgcccgcaccttccggatgatccagctgacttcccgacgccaccctcgcacaagatcccgatgtggcaatggcgaccagcgacgggcgctcaacgccaccgcgccgcctgcgaacccatggtgagaagtgtggtatcgatctagagccgaaggacttccccaacaccccttcctccatcggcgtgacatcggccagctcatctgcgacgacgaggcatcttcgaccgacttctcgacaccccatcctccatcaatgcggctccagtaccccttcctccatcggcgcagcagcatccaattcatctacgatgacaaggcatcttcgaccaaccacgccctactacaagtggtgtcagtccatctcagataagtggagtaatttgtttgtatctgtatcttctattttatttcttccctaatcctgattaatagcctaatcacgcgacaactaatacatgttgatttctttccttagtcggtgtcgtgcgcatgtgagatctagggagaggaagaggaggaagggttgtggggaccgggggtgcaagatggcggattcacctgcaactacaagaaaagaaagagcgagagatttacagaaaccttcagagccgcggaggaggagaaggagattaggaggatctctacggcgctgacggattagttaaggaacgaaatatcacatcgtgtccggtaaccagattcagatgtgggcaccatgcgtgggtgcagggccaggccgaggtgaaagagattcgacgattgagaatacatcaaagaataaaaatgtggaactcggattttcagatgaagagcgtgaccaagaatttcccgattttccatcatttattccattcttacctcctctgagtgcagctaacctaaaggtctactatgccacacgtttcaccatcatagttgggataatggtgttcggtggttttcttgcaccaatcttaaacttggtctaggggcacatcttatgaagactccatctgcagcgttcatctgtcgacgtagttgagatgaattctctatgcctacttctagagtgatgttcaaagaggttgacgctccttcaccatccccagctttgtggaatgggccacaggtagccatttaggatgacaaagccacaagggtgtccttcatcaaggctatgctagaagcctcagacttgtgtctgaggaaaattcataaaaatggtacacagaagctgggaagaaagtggaagaggaatttagcacttgccctctgtcagtcctaatgatgagcgttaagaacaacaccaagatactgaaagcaaacatggcttgttcagtcgggcagcggcagcagaggggatggggccaatgacggaggcggagaggagaacccatcgatttggtggcgtaagtgggagctcatcgaggccggtgcgtttgggcagccaccggccggtccacctcttcaataatcgtccttcatcgcccttcagttgacctgagatctagaaggacacaacaggcaaggtggatgtattcgtagttgattatatgttaaaagcaaattttggatgacattggtggagattgcttatctctaagacacatctactcattctttgaatggaaatcacatccacgttctagaaagtctatttttacttcaaaaaggggcgagggttgttcagtgctttgacatgtgtgcaactattcaagcacaatggttagatgatatccccattcattttagattattacattgtggtgttcggcttcttcagtcaagcagcaatcatgcaacatgccttactgtagttttttatcactgcacatgttgctggacaaatttatggactggaggattatagaggactaacaagtgctactgggagattctcgagcaccattgaactaagagattccaaatagttctttggagtctattgttgatgttggcggggataatctagcagagatttgtcagattttttgtgcaacacggaggctacatgaggcagcaacgatcccattcttctcgcatgccactttacacaagctaaggatagcttctggtctcactcatggttgtggcagggaaagccgagtcagtagggtttgtcatgtagctggagttatctcagaccacatattagatgcagtgatgatgttaatggaggatgtttacatttaccgtgcaagcaagatgacttatattatgccttaggacaataagtattgttttcactctaatgaaatacttggtaaaaagttgtctctgtagttgtatatttgactgtgaatatttgaacccactgttacaattgttgctaattgaggtcagatttcagaggccaaataattc

SEQ ID NO: 5868 - DNA, 4300 bp, Zea Mays
gtttcaggtgctagcataccttctgatatcgtcatcagcaactgctcgagcaagtgatttgactgagaactgggggagcgattccttcccgaacatggcgaactgctcgagcatgacatcacaatggtcatcagttggtgtgcaatcagccaatcaccacatacatatactacggatcaaggttcataaaccataatgcagctccaacaacaccgtttacaagttgcaacagctggaactggcaagaattgcaaagatacgcaggctactacagcctaactatctggattttgtgtatgctgttaactgagagttcttaaaaattaatgaattaacgaatccccaaggcccagccggatgaactgcatgcattgtcatctgcttgcagctgcctctgcaacggcttggagctccacgtgagctcctgcacggcggccgggaagatgaccgtaggtttcctcctgctctcctccaggtacgggaagtcctcggtgaagtgcaggccgcggctctcgcgcctggccagcgcgctcctgacgacgagcttggcgcagcagaagaggttgcgcatctcgcagacctcgacgcccttcagccgccccgttgagcgcacgatgccgacatactcccacatcacctactgcagctccatcctggcctgcctcgtctgccccacgatgtccgacagcgcgccgtcgcccagcgccgaccgtggcagcgtcagccgtgcccacctcgccgccagcgacggtcgtggagaactctcgcgctctggagagattttgcgcccgtggatccgtcgtaagaaacagactgccgtaacaacaaggattactgggctaaaactgactcggatactaaaattccgaatttcaatggattataatactacaattccaattgctctgttcgggataccaatttttagaagcccgaatgttcgggatatcacggttccaaaaagctcctcctcgagcgcgtgcgcagcggctctcctccccacaggcagtcgcgcggcggcctcatccccgccggcgagcctccactcccctccgccggtacgcctctatcgccggtggcctcccctcggcagacagcctcgcctcgcttgcttctattgctgtgctccaccacagagccctaggtggagctacgaaccccgtgatccccgacggtgtggcaccggagctcggcggcgacagcgggcacatccccctcatgccctaggtggagcaacgaaccccctgacttcccgacgccaccctcgcacaagatcccgatgtggcaatggcgaccagcgacgggcgctcaacgccaccgcgccgcctgcgaacccatggtgagaagtgtggtatcgatctagagccgaaggacttccccaacaccccttcctccatcggcgtgacatcggccagctcatctgcgacgacgaggcatcttcgaccgacttctcgacaccccatcctccatcaatgcggctccagtaccccttcctccatcggcgcagcagcatccaattcatctacgatgacaaggcatcttcgaccaaccacgccctactacaagtggtgtcagtccatctcagataagtggagtaatttgtttgtatctgtatcttctattttatttcttccctaatcctgattaatagcctaatcacgcgacaactaatacatgttgatttctttccttagtcggtgtcgtgcgcatgtgagatctagggagaggaagaggaggaagggttgtggggaccgggggtgcaagatggcggattcacctgcaactacaagaaaagaaagagcgagagatttacagaaaccttcagagccgcggaggaggagaaggagattaggaggatctctacggcgctgacggattagttaaggaacgaaatatcacatcgtgtccggtaaccagattcagatgtgggcaccatgcgtgggtgcagggccaggccgaggtgaaagagattcgacgattgagaatacatcaaagaataaaaatgtggaactcggattttcagatgaagagcgtgaccaagaatttcccgattttccatcatttattccattcttacctcctctgagtgcagctaacctaaaggtctactatgccacacgtttcaccatcatagttgggataatggtgttcggtggttttcttgcaccaatcttaaacttggtctaggggcacatcttatgaagactccatctgcagcgttcatctgtcgacgtagttgagatgaattctctatgcctacttctagagtgatgttcaaagaggttgacgctccttcaccatccccagctttgtggaatgggccacaggtagccatttaggatgacaaagccacaagggtgtccttcatcaaggctatgctagaagcctcagacttgtgtctgaggaaaattcataaaaatggtacacagaagctgggaagaaagtggaagaggaatttagcacttgccctctgtcagtcctaatgatgagcgttaagaacaacaccaagatactgaaagcaaacatggcttgttcagtcgggcagcggcagcagaggggatggggccaatgacggaggcggagaggagaacccatcgatttggtggcgtaagtgggagctcatcgaggccgccaccggccggtccacctcttcaataatcgtccttcatcgcccttcagttttccacacgtgaaatagccatatggatatgtaacaacataaatctgttcagtgggaaataagtttctataatacatttatgcacccaggacctgagatctagaaggacacaacaggcaaggtggatgtattcgtagttgattatatgttaaaagcaaattttggatgacattggtggagattgcttatctctaagacacatctactcattctttgaatggaaatcacatccacgttctagaaagtctatttttacttcaaaagtactccttctgttccaaataaattagtgttagcatctctgcactctattgcccacttcccccctcatcggtgttttttattgttgcatatcaattttgtggctcaaatgcccctttgaaacatatagcaccaaaattatcctaattaattaattggtttctaactggctactctatttgcaacaatggggatatataaccttaccatgtctgtttatcacagtgcatcttagattgcatcgtattgtaattgttttagttccttgacatactgtttgtgcaacaggaactgcttgatgtacttacggttgggtatctgtgtagctgtagctgccaagttgcctaaagaaaagttcccgacctttcacatgctgccacattgccacaataccttaagagcttttctatacttctatgatttgtgttttcgagatctgagttatttaaatgttgtctgctattttgaatttttatatgaagatcaaagttctcaattgataaagtaattaatataacaagcgaacaacacatagacaaactaattaatgtagcatatagacgaataaggaatcctgaaacattgaccgtgaagaaaattattgtgcacatatgcactctttctccaaaatttggcatttaatcttattgcaacatacttgtacagaggggcgagggttgttcagtgctttgacatgtgtgcaactattcaagcacaatggttagatgatatccccattcattttagattattacattgtggtgttcggcttcttcagtcaagcagcaatcatgcaacatgccttactgtagttttttatcactgcacatgttgctggacaaatttatggactggaggattatagaggactaacaagtgctactgggagattctcgagcaccattgaactaagagattccaaatagttctttggagtctattgttgatgttggcggggataatctagcagagatttgtcagattttttgtgcaacacggaggctacatgaggcagcaacgatcccattcttctcgcatgccactttacacaagctaaggatagcttctggtctcactcatggttgtggcagggaaagccgagtcagtagggtttgtcatgtagctggagttatctcagaccacatattagatgcagtgatgatgttaatggaggatgtttacatttaccgtgcaagcaagatgacttatattatgccttaggacaataagtattgttttcactctaatgaaatacttggtaaaaagttgtctctgtagttgtatatttgactgtgaatatttgaacccactgttacaattgttgctaattgaggtcagatttcagaggccaaataattc

SEQ ID NO: 5869 - DNA, 2429 bp, Zea Mays
tcgcccgcaccttccggatgatccagctgacttcccgacgccaccctcgcacaagatcccgatgtggcaatggcgaccagcgacgggcgctcaacgccaccgcgccgcctgcgaacccatggtgagaagtgtggtatcgatctagagccgaaggacttccccaacaccccttcctccatcggcgtgacatcggccagctcatctgcgacgacgaggcatcttcgaccgacttctcgacaccccatcctccatcaatgcggctccagtaccccttcctccatcggcgcagcagcatccaattcatctacgatgacaaggcatcttcgaccaaccacgccctactacaagtggtgtcagtccatctcagataagtggagtaatttgtttgtatctgtatcttctattttatttcttccctaatcctgattaatagcctaatcacgcgacaactaatacatgttgatttctttccttagtcggtgtcgtgcgcatgtgagatctagggagaggaagaggaggaagggttgtggggaccgggggtgcaagatggcggattcacctgcaactacaagaaaagaaagagcgagagatttacagaaaccttcagagccgcggaggaggagaaggagattaggaggatctctacggcgctgacggattagttaaggaacgaaatatcacatcgtgtccggtaaccagattcagatgtgggcaccatgcgtgggtgcagggccaggccgaggtgaaagagattcgacgattgagaatacatcaaagaataaaaatgtggaactcggattttcagatgaagagcgtgaccaagaatttcccgattttccatcatttattccattcttacctcctctgagtgcagctaacctaaaggtctactatgccacacgtttcaccatcatagttgggataatggtgttcggtggttttcttgcaccaatcttaaacttggtctaggggcacatcttatgaagactccatctgcagcgttcatctgtcgacgtagttgagaagtgcactcaggttatacatccagtaaagagcaagacatttgaaagcttatgggccaactgtgttgctattgatgcaagcgaaagttggctgatgaattctctatgcctacttctagagtgatgttcaaagaggttgacgctccttcaccatccccagctttgtggaatgggccacaggtagccatttaggatgacaaagccacaagggtgtccttcatcaaggctatgctagaagcctcagacttgtgtctgaggaaaattcataaaaatggtacacagaagaaagtggaagaggaatttagcacttgccctctgtcagtcctaatgatgagcgttaagaacaacaccaagatactgaaagcaaacatggcttgttcagtcgggcagcggcagcagaggggatggggccaatgacggaggcggagaggagaacccatcgatttggtggcgtaagtgggagctcatcgaggccggtgcgtttgggcagccaccggccggtccacctcttcaataatcgtccttcatcgcccttcagttgacctgagatctagaaggacacaacaggcaaggtggatgtattcgtagttgattatatgttaaaagcaaattttggatgacattggtggagattgcttatctctaagacacatctactcattctttgaatggaaatcacatccacgttctagaaagtctatttttacttcaaaaaggggcgagggttgttcagtgctttgacatgtgtgcaactattcaagcacaatggttagatgatatccccattcattttagattattacattgtggtgttcggcttcttcagtcaagcagcaatcatgcaacatgccttactgtagttttttatcactgcacatgttgctggacaaatttatggactggaggattatagaggactaacaagtgctactgggagattctcgagcaccattgaactaagagattccaaatagttctttggagtctattgttgatgttggcggggataatctagcagagatttgtcagattttttgtgcaacacggaggctacatgaggcagcaacgatcccattcttctcgcatgccactttacacaagctaaggatagcttctggtctcactcatggttgtggcagggaaagccgagtcagtagggtttgtcatgtagctggagttatctcagaccacatattagatgcagtgatgatgttaatggaggatgtttacatttaccgtgcaagcaagatgacttatattatgccttaggacaataagtattgttttcactctaatgaaatacttggtaaaaagttgtctctgtagttgtatatttgactgtgaatatttgaacccactgttacaattgttgctaattgaggtcagatttcagaggccaaataattc

SEQ ID NO: 5870 - DNA, 2141 bp, Zea Mays
gcccgcaccttccggatgatccagctgacttcccgacgccaccctcgcacaagatcccgatgtggcaatggcgaccagcgacgggcgctcaacgccaccgcgccgcctgcgaacccatggtgagaagtgtggtatcgatctagagccgaaggacttccccaacaccccttcctccatcggcgtgacatcggccagctcatctgcgacgacgaggcatcttcgaccgacttctcgacaccccatcctccatcaatgcggctccagtaccccttcctccatcggcgcagcagcatccaattcatctacgatgacaaggcatcttcgaccaaccacgccctactacaagtggtgtcagtccatctcagataagtggagtaatttgtttgtatctgtatcttctattttatttcttccctaatcctgattaatagcctaatcacgcgacaactaatacatgttgatttctttccttagtcggtgtcgtgcgcatgtgagatctagggagaggaagaggaggaagggttgtggggaccgggggtgcaagatggcggattcacctgcaactacaagaaaagaaagagcgagagatttacagaaaccttcagagccgcggaggaggagaaggagattaggaggatctctacggcgctgacggattagttaaggaacgaaatatcacatcgtgtccggtaaccagattcagatgtgggcaccatgcgtgggtgcagggccaggccgaggtgaaagagattcgacgattgagaatacatcaaagaataaaaatgtggaactcggattttcagatgaagagcgtgaccaagaatttcccgattttccatcatttattccattcttacctcctctgagtgcagctaacctaaaggtctactatgccacacgtttcaccatcatagttgggataatggtgttcggtggttttcttgcaccaatcttaaacttggtctaggggcacatcttatgaagactccatctgcagcgttcatctgtcgacgtagttgagaagtgcactcaggttatacatccagtaaagagcaagacatttgaaagcttatgggccaactgtgttgctattgatgcaagcgaaagttggctgatgaattctctatgcctacttctagagtgatgttcaaagaggttgacgctccttcaccatccccagctttgtggaatgggccacaggtagccatttaggatgacaaagccacaagggtgtccttcatcaaggctatgctagaagcctcagacttgtgtctgaggaaaattcataaaaatggtacacagaagaaagtggaagaggaatttagcacttgccctctgtcagtcctaatgatgagcgttaagaacaacaccaagatactgaaagcaaacatggcttgttcagtcgggcagcggcagcagaggggatggggccaatgacggaggcggagaggagaacccatcgatttggtggcgtaagtgggagctcatcgaggccgccaccggccggtccacctcttcaataatcgtccttcatcgcccttcagttgacctgagatctagaaggacacaacaggcaagaggggcgagggttgttcagtgctttgacatgtgtgcaactattcaagcacaatgactggaggattatagaggactaacaagtgctactgggagattctcgagcaccattgaactaagagattccaaatagttctttggagtctattgttgatgttggcggggataatctagcagagatttgtcagattttttgtgcaacacggaggctacatgaggcagcaacgatcccattcttctcgcatgccactttacacaagctaaggatagcttctggtctcactcatggttgtggcagggaaagccgagtcagtagggtttgtcatgtagctggagttatctcagaccacatattagatgcagtgatgatgttaatggaggatgtttacatttaccgtgcaagcaagatgacttatattatgccttaggacaataagtattgttttcactctaatgaaatacttggtaaaaagttgtctctgtagttgtatatttgactgtgaatatttgaacccactgttacaattgttgctaattgaggtcagatttcagaggccaaataattc

SEQ ID NO: 5871 - DNA, 1596 bp, Zea Mays
gctaacctaaaggtctactatgccacacgtttcaccatcatagttgggataatggtgttcggtggttttcttgcaccaatcttaaacttggtctaggggcacatcttatgaagactccatctgcagcgttcatctgtcgacgtagttgagatgaattctctatgcctacttctagagtgatgttcaaagaggttgacgctccttcaccatccccagctttgtggaatgggccacaggtagccatttaggatgacaaagccacaagggtgtccttcatcaaggctatgctagaagcctcagacttgtgtctgaggaaaattcataaaaatggtacacagaagctgggaagaaagtggaagaggaatttagcacttgccctctgtcagtcctaatgatgagcgttaagaacaacaccaagatactgaaagcaaacatggcttgttcagtcgggcagcggcagcagaggggatggggccaatgacggaggcggagaggagaacccatcgatttggtggcgtaagtgggagctcatcgaggccggtgcgtttgggcaggtctaccgcatgatttatttgcccttatagggatcagcagatcccacacctattacatgatctgtccttctagaatagaatccgctctctatcttctgaaccggtactgccttcttcaatatcagccaccggccggtccacctcttcaataatcgtccttcatcgcccttcagttgacctgagatctagaaggacacaacaggcaaggtggatgtattcgtagttgattatatgttaaaagcaaattttggatgacattggtggagattgcttatctctaagacacatctactcattctttgaatggaaatcacatccacgttctagaaagtctatttttacttcaaaaaggggcgagggttgttcagtgctttgacatgtgtgcaactattcaagcacaatggttagatgatatccccattcattttagattattacattgtggtgttcggcttcttcagtcaagcagcaatcatgcaacatgccttactgtagttttttatcactgcacatgttgctggacaaatttatggactggaggattatagaggactaacaagtgctactgggagattctcgagcaccattgaactaagagattccaaatagttctttggagtctattgttgatgttggcggggataatctagcagagatttgtcagattttttgtgcaacacggaggctacatgaggcagcaacgatcccattcttctcgcatgccactttacacaagctaaggatagcttctggtctcactcatggttgtggcagggaaagccgagtcagtagggtttgtcatgtagctggagttatctcagaccacatattagatgcagtgatgatgttaatggaggatgtttacatttaccgtgcaagcaagatgacttatattatgccttaggacaataagtattgttttcactctaatgaaatacttggtaaaaagttgtctctgtagttgtatatttgactgtgaatatttgaacccactgttacaattgttgctaattgaggtcagatttcagaggccaaataattc

SEQ ID NO: 5872 - DNA, 1958 bp, Zea Mays
ccttttcggctttcggtttcgggctcaaaagggctttccaggagaggagccgcaccgcacgtccgcacgccgctcttcttcccctgcttgctctgggttcctccattcctctccagtctccatcacaggagcacgcgacgcgcgccacaggaaggaaggggaaaaacatggcggcggcgaacggggacgcgtgccgcagcgtcggcggggtgccgcgcccgacgaaccccatggtgacgccgctgctcaccgacctgtaccagttcaccatggcctacgcctactggaaggccgtttacacttacctccaggctccagccctcgatttgtggtttgttaggccactgaggagggggtgataatctggtagacatgaccccgcctcgataaggcgtgactgggtagtgttctggaactattttgctacctgttttttttttgaaccgtgtgtgaggctgggctggctgtgacgattgagcacatttgaggctctgcttcgtagttttgtttcagtacgttataagattaggtttgcaatggggaaaccgtttttcgttaggccaagtgttttatctaggtcgtacttggtgtagcaagtgtgtaaaatcagcgtcacagttcttctaccggtcttcaagttacgctctactctctttcacctgtactaactgcgaactgaaatggtgttagctttgatctctacttccggaaaaatccatttggcggggagttcaccatcttcggtggcctcgaggaatgtataaggttcattgctaacttcaagttcacggaggaggaaatcaaatttcttcgatctgtcatgcctgcatgtgaggatgacttctttgagtacctccgttcgattgactgctcagacgtggaggtttatgccataccagagggttatgctgtgttccctaaagttccactgatgagaattgaaggacctgttgctgtaagtaccgggagttgtccagcttcttgaaactccatttctaagtcttgtcaactatgcttctctggttaccacgaatgcggcacggcaccgacttgtagctgggaagtcaaagaatttacttgaatttggacttcgacgggctcaagggcctgatggaggaatcagtgcatcaagatattgttatatgggaggatttgatgcaacaagcaatgttgcagcaggaagattgtttgggataccaatacgtgggactcattcacatgcatttgtgagctccttcatgggtcttgatgaaattactgacaaaacacttactagttctgatggttcaaacacatgtgaagattttatctctctggtgcagaactggctgatcaggattcaggattctagttcattgcatggcacctttggagaaacgagccaaagtgagttggctgcattcacgtcatatgcactggcatttccaaattccttcctggccttggttgacacatatgatgtcatgagaagcggagtgccaaacttctgtgctgttgctttggccctcaatgatatggggtataaggcagtcggaattaggttggactctggtgatttagcatacctatccgttgaggcccgcaagttcttccatgcagttgaaaaagaatttgtagttgttggctttgggaaaacaagtatcacagcaagcaatgatcttaatgaagaaactatagatgctctgaacaagcagggccatgaggtagatgcatttggtattggcacctacctagttacatgctatgcacaagctgcacttggttgtgtattcaaattagttgagattaacaaacagcctcgtattaaactttctgaagatgtcatgaaggtatcgataccatgtaagaaaaaatgctacagattgtatggcaaagaagggtatccgttggttgatataatgaccggagaagatgagccaggtccaaagatggtgggttttatgatttaccattcgttt

SEQ ID NO: 5873 - DNA, 2126 bp, Zea Mays
ccttttcggctttcggtttcgggctcaaaagggctttccaggagaggagccgcaccgcacgtccgcacgccgctcttcttcccctgcttgctctgggttcctccattcctctccagtctccatcacaggagcacgcgacgcgcgccacaggaaggaaggggaaaaacatggcggcggcgaacggggacgcgtgccgcagcgtcggcggggtgccgcgcccgacgaaccccatggtgacgccgctgctcaccgacctgtaccagttcaccatggcctacgcctactggaaggccggcaagcacctcgaccgcgcagtgttagccctgagccccagctcttccccactcttaactccccgcgcttcctttgtctcctcaatcctttccctcgatttggggtgtcaatttacacttaacctccactcgatttgtggtatcagtttacacttacctccaggctccagccctcgatttgtggtttgttaggccactgaggagggggtgataatctggtagacatgaccccgcctcgataaggcgtgactgggtagtgttctggaactattttgctacctgttttttttttgaaccgtgtgtgaggctgggctggctgtgacgattgagcacatttgaggctctgcttcgtagttttgtttcagtacgttataagattaggtttgcaatggggaaaccgtttttcgttaggccaagtgttttatctaggtcgtacttggtgtagcaagtgtgtaaaatcagcgtcacagttcttctaccggtcttcaagttacgctctactctctttcacctgtactaactgcgaactgaaatggtgttagctttgatctctacttccggaaaaatccatttggcggggagttcaccatcttcggtggcctcgaggaatgtataaggttcattgctaacttcaagttcacggaggaggaaatcaaatttcttcgatctgtcatgcctgcatgtgaggatgacttctttgagtacctccgttcgattgactgctcagacgtggaggtttatgccataccagagggttatgctgtgttccctaaagttccactgatgagaattgaaggacctgttgctttttcccatacgtcgagattgtgttgtttgccccaggttgtccagcttcttgaaactccatttctaagtcttgtcaactatgcttctctggttaccacgaatgcggcacggcaccgacttgtagctgggaagtcaaagaatttacttgaatttggacttcgacgggctcaagggcctgatggaggaatcagtgcatcaagatattgttatatgggaggatttgatgcaacaagcaatgttgcagcaggaagattgtttgggataccaatacgtgggactcattcacatgcatttgtgagctccttcatgggtcttgatgaaattactgacaaaacacttactagttctgatggttcaaacacatgtgaagattttatctctctggtgcagaactggctgatcaggattcaggattctagttcattgcatggcacctttggagaaacgagccaaagtgagttggctgcattcacgtcatatgcactggcatttccaaattccttcctggccttggttgacacatatgatgtcatgagaagcggagtgccaaacttctgtgctgttgctttggccctcaatgatatggggtataaggcagtcggaattaggttggactctggtgatttagcatacctatccgttgaggcccgcaagttcttccatgcagttgaaaaagaatttgtagttgttggctttgggaaaacaagtatcacagcaagcaatgatcttaatgaagaaactatagatgctctgaacaagcagggccatgaggtagatgcatttggtattggcacctacctagttacatgctatgcacaagctgcacttggttgtgtattcaaattagttgagattaacaaacagcctcgtattaaactttctgaagatgtcatgaaggtatcgataccatgtaagaaaaaatgctacagattgtatggcaaagaagggtatccgttggttgatataatgaccggagaagatgagccaggtccaaagatggtgggttttatgatttaccattcgttt

SEQ ID NO: 5874 - DNA, 1886 bp, Zea Mays
ccttttcggctttcggtttcgggctcaaaagggctttccaggagaggagccgcaccgcacgtccgcacgccgctcttcttcccctgcttgctctgggttcctccattcctctccagtctccatcacaggagcacgcgacgcgcgccacaggaaggaaggggaaaaacatggcggcggcgaacggggacgcgtgccgcagcgtcggcggggtgccgcgcccgacgaaccccatggtgacgccgctgctcaccgacctgtaccagttcaccatggcctacgcctactggaaggccgtttacacttacctccaggctccagccctcgatttgtggtttgttaggccactgaggagggggtgataatctggtagacatgaccccgcctcgataaggcgtgactgggtagtgttctggaactattttgctacctgttttttttttgaaccgtgtgtgaggctgggctggctgtgacgattgagcacatttgaggctctgcttcgtagttttgtttcagtacgttataagattaggtttgcaatggggaaaccgtttttcgttaggccaagtgttttatctaggtcgtacttggtgtagcaagtgtgtaaaatcagcgtcacagttcttctaccggtcttcaagttacgctctactctctttcacctgtactaactgcgaactgaaatggtgttagctttgatctctacttccggaaaaatccatttggcggggagttcaccatcttcggtggcctcgaggaatgtataaggttcattgctaacttcaagttcacggaggaggaaatcaaatttcttcgatctgtcatgcctgcatgtgaggatgacttctttgagtacctccgttcgattgactgctcagacgtggaggtttatgccataccagagggttatgctgtgttccctaaagttccactgatgagaattgaaggacctgttgctgttgtccagcttcttgaaactccatttctaagtcttgtcaactatgcttctctggttaccacgaatgcggcacggcaccgacttgtagctgggaagtcaaagaatttacttgaatttggacttcgacgggctcaagggcctgatggaggaatcagtgcatcaagatattgttatatgggaggatttgatgcaacaagcaatgttgcagcaggaagattgtttgggataccaatacgtgggactcattcacatgcatttgtgagctccttcatgggtcttgatgaaattactgacaaaacacttactagttctgatggttcaaacacatgtgaagattttatctctctggtgcagaactggctgatcaggattcaggattctagttcattgcatggcacctttggagaaacgagccaaagtgagttggctgcattcacgtcatatgcactggcatttccaaattccttcctggccttggttgacacatatgatgtataaggcagtcggaattaggttggactctggtgatttagcatacctatccgttgaggcccgcaagttcttccatgcagttgaaaaagaatttgtagttgttggctttgggaaaacaagtatcacagcaagcaatgatcttaatgaagaaactatagatgctctgaacaagcagggccatgaggtagatgcatttggtattggcacctacctagttacatgctatgcacaagctgcacttggttgtgtattcaaattagttgagattaacaaacagcctcgtattaaactttctgaagatgtcatgaaggtatcgataccatgtaagaaaaaatgctacagattgtatggcaaagaagggtatccgttggttgatataatgaccggagaagatgagccaggtccaaagatggtgggttttatgatttaccattcgttt

SEQ ID NO: 5875 - DNA, 1945 bp, Zea Mays
ccttttcggctttcggtttcgggctcaaaagggctttccaggagaggagccgcaccgcacgtccgcacgccgctcttcttcccctgcttgctctgggttcctccattcctctccagtctccatcacaggagcacgcgacgcgcgccacaggaaggaaggggaaaaacatggcggcggcgaacggggacgcgtgccgcagcgtcggcggggtgccgcgcccgacgaaccccatggtgacgccgctgctcaccgacctgtaccagttcaccatggcctacgcctactggaaggccgtttacacttacctccaggctccagccctcgatttgtggtttgttaggccactgaggagggggtgataatctggtagacatgaccccgcctcgataaggcgtgactgggtagtgttctggaactattttgctacctgttttttttttgaaccgtgtgtgaggctgggctggctgtgacgattgagcacatttgaggctctgcttcgtagttttgtttcagtacgttataagattaggtttgcaatggggaaaccgtttttcgttaggccaagtgttttatctaggtcgtacttggtgtagcaagtgtgtaaaatcagcgtcacagttcttctaccggtcttcaagttacgctctactctctttcacctgtactaactgcgaactgaaatggtgttagctttgatctctacttccggaaaaatccatttggcggggagttcaccatcttcggtggcctcgaggaatgtataaggttcattgctaacttcaagttcacggaggaggaaatcaaatttcttcgatctgtcatgcctgcatgtgaggatgacttctttgagtacctccgttcgattgactgctcagacgtggaggtttatgccataccagagggttatgctgtgttccctaaagttccactgatgagaattgaaggacctgttgctgttgtccagcttcttgaaactccatttctaagtcttgtcaactatgcttctctggttaccacgaatgcggcacggcaccgacttgtagctgggaagtcaaagaatttacttgaatttggacttcgacgggctcaagggcctgatggaggaatcagtgcatcaagatattgttatatgggaggatttgatgcaacaagcaatgttgcagcaggaagattgtttgggataccaatacgtgggactcattcacatgcatttgtgagctccttcatgggtcttgatgaaattactgacaaaacacttactagttctgatggttcaaacacatgtgaagattttatctctctggtgcagaactggctgatcaggattcaggattctagttcattgcatggcacctttggagaaacgagccaaagtgagttggctgcattcacgtcatatgcactggcatttccaaattccttcctggccttggttgacacatatgatgtcatgagaagcggagtgccaaacttctgtgctgttgctttggccctcaatgatatggggtataaggcagtcggaattaggttggactctggtgatttagcatacctatccgttgaggcccgcaagttcttccatgcagttgaaaaagaatttgtagttgttggctttgggaaaacaagtatcacagcaagcaatgatcttaatgaagaaactatagatgctctgaacaagcagggccatgaggtagatgcatttggtattggcacctacctagttacatgctatgcacaagctgcacttggttgtgtattcaaattagttgagattaacaaacagcctcgtattaaactttctgaagatgtcatgaaggtatcgataccatgtaagaaaaaatgctacagattgtatggcaaagaagggtatccgttggttgatataatgaccggagaagatgagccaggtccaaagatggtgggttttatgatttaccattcgttt

SEQ ID NO: 5876 - DNA, 2134 bp, Zea Mays
ccttttcggctttcggtttcgggctcaaaagggctttccaggagaggagccgcaccgcacgtccgcacgccgctcttcttcccctgcttgctctgggttcctccattcctctccagtctccatcacaggagcacgcgacgcgcgccacaggaaggaaggggaaaaacatggcggcggcgaacggggacgcgtgccgcagcgtcggcggggtgccgcgcccgacgaaccccatggtgacgccgctgctcaccgacctgtaccagttcaccatggcctacgcctactggaaggccggcaagcacctcgaccgcgcagtctttgatctctacttccggaaaaatccatttggcggggagttcaccatcttcggtggcctcgaggaatgtataaggttcattgctaacttcaagttcacggaggaggaaatcaaatttcttcgatctgtcatgcctgcatgtgaggatgacttctttgagtacctccgttcgattgactgctcagacgtggaggtttatgccataccagagggttatgctgtgttccctaaagttccactgatgagaattgaaggacctgttgctgttgtccagcttcttgaaactccatttctaagtcttgtcaactatgcttctctggttaccacgaatgcggcacggcaccgacttgtagctgggaagtcaaagaatttacttgaatttggacttcgacgggctcaagggcctgatggaggaatcagtgcatcaagatattgttatatgggaggatttgatgcaacaagcaatgttgcagcaggaagattgtttgggataccaatacgtgggactcattcacatgcatttgtgagctccttcatgggtcttgatgaaattactgacaaaacacttactagttctgatggttcaaacacatgtgaagattttatctctctggtgcagaactggctgatcaggattcagttcattgcatggcacctttggagaaacgagccaaagtgagttggctgcattcacgtcatatgcactggcatttccaaattccttcctggccttggttgacacatatgatgtcatgagaagcggagtgccaaacttctgtgctgttgctttggccctcaatgatatggggtataaggcagtcggaattaggttggactctggtgatttagcatacctatccgttgaggcccgcaagttcttccatgcagttgaaaaagaatttgtagttgttggctttgggaaaacaagtatcacagcaagcaatgatcttaatgaagaaactatagatgctctgaacaagcagggccatgaggtagatgcatttggtattggcacctacctagttacatgctatgcacaagctgcacttggttgtgtattcaaattagttgagattaacaaacagcctcgtattaaactttctgaagatgtcatgaaggtatcgataccatgtaagaaaaaatgctacagattgtatggcaaagaagggtatccgttggttgatataatgaccggagaagatgagccaggtccaaagattggtgaaaggctcctatgtcgtcaccctttcaatgaatcaaagagagcgtacgttgttccacagcatgttgaggaattattgaagtgctactggcctggaaattcatcgaattcacgggaggagcttccatccatccatgagattaggactcggtgtattcaccatctggaccgaatgaggccagaccatatgaggcggctgaacccgacgccttacaaggtaagcgtgagtgctaagctgtatgacttcatccatttcttgtggctcaacgaagcgcctgtcggagaactgcaatgatgaaatgaagtggcggtagggtcggatcccaaacctaactctaataagctgctccgcttatgggtgccgtcggagcaaataacaaactgttgccgccggtgcaatttctgcagtagttttaccatcgcctgcgctctagtaaaatgtgagtatgtgctggtgcatctgtcaaaacagaccatagctgaagtgttacgtactgggaacaagaggatacccataccgagttagatctatatgactgaactaattgcaatgaggagcaatcactaaatttgagacaaatttacttgtcttgtca

SEQ ID NO: 5877 - DNA, 2449 bp, Zea Mays
ccttttcggctttcggtttcgggctcaaaagggctttccaggagaggagccgcaccgcacgtccgcacgccgctcttcttcccctgcttgctctgggttcctccattcctctccagtctccatcacaggagcacgcgacgcgcgccacaggaaggaaggggaaaaacatggcggcggcgaacggggacgcgtgccgcagcgtcggcggggtgccgcgcccgacgaaccccatggtgacgccgctgctcaccgacctgtaccagttcaccatggcctacgcctactggaaggccgtttacacttacctccaggctccagccctcgatttgtggtttgttaggccactgaggagggggtgataatctggtagacatgaccccgcctcgataaggcgtgactgggtagtgttctggaactattttgctacctgttttttttttgaaccgtgtgtgaggctgggctggctgtgacgattgagcacatttgaggctctgcttcgtagttttgtttcagtacgttataagattaggtttgcaatggggaaaccgtttttcgttaggccaagtgttttatctaggtcgtacttggtgtagcaagtgtgtaaaatcagcgtcacagttcttctaccggtcttcaagttacgctctactctctttcacctgtactaactgcgaactgaaatggtgttagctttgatctctacttccggaaaaatccatttggcggggagttcaccatcttcggtggcctcgaggaatgtataaggttcattgctaacttcaagttcacggaggaggaaatcaaatttcttcgatctgtcatgcctgcatgtgaggatgacttctttgagtacctccgttcgattgactgctcagacgtggaggtttatgccataccagagggttatgctgtgttccctaaagttccactgatgagaattgaaggacctgttgctgttgtccagcttcttgaaactccatttctaagtcttgtcaactatgcttctctggttaccacgaatgcggcacggcaccgacttgtagctgggaagtcaaagaatttacttgaatttggacttcgacgggctcaagggcctgatggaggaatcagtgcatcaagatattgttatatgggaggatttgatgcaacaagcaatgttgcagcaggaagattgtttgggataccaatacgtgggactcattcacatgcatttgtgagctccttcatgggtcttgatgaaattactgacaaaacacttactagttctgatggttcaaacacatgtgaagattttatctctctggtgcagaactggctgatcaggattcagttcattgcatggcacctttggagaaacgagccaaagtgagttggctgcattcacgtcatatgcactggcatttccaaattccttcctggccttggttgacacatatgatgtataaggcagtcggaattaggttggactctggtgatttagcatacctatccgttgaggcccgcaagttcttccatgcagttgaaaaagaatttgtagttgttggctttgggaaaacaagtatcacagcaagcaatgatcttaatgaagaaactatagatgctctgaacaagcagggccatgaggtagatgcatttggtattggcacctacctagttacatgctatgcacaagctgcacttggttgtgtattcaaattagttgagattaacaaacagcctcgtattaaactttctgaagatgtcatgaaggtatcgataccatgtaagaaaaaatgctacagattgtatggcaaagaagggtatccgttggttgatataatgaccggagaagatgagccaggtccaaagattggtgaaaggctcctatgtcgtcaccctttcaatgaatcaaagagagcgtacgttgttccacagcatgttgaggaattattgaagtgctactggcctggaaattcatcgaattcacgggaggagcttccatccatccatgagattaggactcggtgtattcaccatctggaccgaatgaggccagaccatatgaggcggctgaacccgacgccttacaaggtaagcgtgagtgctaagctgtatgacttcatccatttcttgtggctcaacgaagcgcctgtcggagaactgcaatgatgaaatgaagtggcggtagggtcggatcccaaacctaactctaataagctgctccgcttatgggtgccgtcggagcaaataacaaactgttgccgccggtgcaatttctgcagtagttttaccatcgcctgcgctctagtaaaatgtgagtatgtgctggtgcatctgtcaaaacagaccatagctgaagtgttacgtactgggaacaagaggatacccataccgagttagatctatatgactgaactaattgcaatgaggagcaatcactaaatttgagacaaatttacttgtcttgtca

SEQ ID NO: 5878 - DNA, 2083 bp, Zea Mays
ccttttcggctttcggtttcgggctcaaaagggctttccaggagaggagccgcaccgcacgtccgcacgccgctcttcttcccctgcttgctctgggttcctccattcctctccagtctccatcacaggagcacgcgacgcgcgccacaggaaggaaggggaaaaacatggcggcggcgaacggggacgcgtgccgcagcgtcggcggggtgccgcgcccgacgaaccccatggtgacgccgctgctcaccgacctgtaccagttcaccatggcctacgcctactggaaggccggcaagcacctcgaccgcgcagtctttgatctctacttccggaaaaatccatttggcggggagttcaccatcttcggtggcctcgaggaatgtataaggttcattgctaacttcaagttcacggaggaggaaatcaaatttcttcgatctgtcatgcctgcatgtgaggatgacttctttgagtacctccgttcgattgactgctcagacgtggaggtttatgccataccagagggttatgctgtgttccctaaagttccactgatgagaattgaaggacctgttgctgttgtccagcttcttgaaactccatttctaagtcttgtcaactatgcttctctggttaccacgaatgcggcacggcaccgacttgtagctgggaagtcaaagaatttacttgaatttggacttcgacgggctcaagggcctgatggaggaatcagtgcatcaagatattgttatatgggaggatttgatgcaacaagcaatgttgcagcaggaagattgtttgggataccaatacgtgggactcattcacatgcatttgtgagctccttcatgggtcttgatgaaattactgacaaaacacttactagttctgatggttcaaacacatgtgaagattttatctctctggtgcagaactggctgatcaggattcaggattctagttcattgcatggcacctttggagaaacgagccaaagtgagttggctgcattcacgtcatatgcactggcatttccaaattccttcctggccttggttgacacatatgatgtataaggcagtcggaattaggttggactctggtgatttagcatacctatccgttgaggcccgcaagttcttccatgcagttgaaaaagaatttgtagttgttggctttgggaaaacaagtatcacagcaagcaatgatcttaatgaagaaactatagatgctctgaacaagcagggccatgaggtagatgcatttggtattggcacctacctagttacatgctatgcacaagctgcacttggttgtgtattcaaattagttgagattaacaaacagcctcgtattaaactttctgaagatgtcatgaaggtatcgataccatgtaagaaaaaatgctacagattgtatggcaaagaagggtatccgttggttgatataatgaccggagaagatgagccaggtccaaagattggtgaaaggctcctatgtcgtcaccctttcaatgaatcaaagagagcgtacgttgttccacagcatgttgaggaattattgaagtgctactggcctggaaattcatcgaattcacgggaggagcttccatccatccatgagattaggactcggtgtattcaccatctggaccgaatgaggccagaccatatgaggcggctgaacccgacgccttacaaggtaagcgtgagtgctaagctgtatgacttcatccatttcttgtggctcaacgaagcgcctgtcggagaactgcaatgatgaaatgaagtggcggtagggtcggatcccaaacctaactctaataagctgctccgcttatgggtgccgtcggagcaaataacaaactgttgccgccggtgcaatttctgcagtagttttaccatcgcctgcgctctagtaaaatgtgagtatgtgctggtgcatctgtcaaaacagaccatagctgaagtgttacgtactgggaacaagaggatacccataccgagttagatctatatgactgaactaattgcaatgaggagcaatcactaaatttgagacaaatttacttgtcttgtca

SEQ ID NO: 5879 - DNA, 2419 bp, Zea Mays
ccttttcggctttcggtttcgggctcaaaagggctttccaggagaggagccgcaccgcacgtccgcacgccgctcttcttcccctgcttgctctgggttcctccattcctctccagtctccatcacaggagcacgcgacgcgcgccacaggaaggaaggggaaaaacatggcggcggcgaacggggacgcgtgccgcagcgtcggcggggtgccgcgcccgacgaaccccatggtgacgccgctgctcaccgacctgtaccagttcaccatggcctacgcctactggaaggccgtttacacttacctccaggctccagccctcgatttgtggtttgttaggccactgaggagggggtgataatctggtagacatgaccccgcctcgataaggcgtgactgggtagtgttctggaactattttgctacctgttttttttttgaaccgtgtgtgaggctgggctggctgtgacgattgagcacatttgaggctctgcttcgtagttttgtttcagtacgttataagattaggtttgcaatggggaaaccgtttttcgttaggccaagtgttttatctaggtcgtacttggtgtagcaagtgtgtaaaatcagcgtcacagttcttctaccggtcttcaagttacgctctactctctttcacctgtactaactgcgaactgaaatggtgttagctttgatctctacttccggaaaaatccatttggcggggagttcaccatcttcggtggcctcgaggaatgtataaggttcattgctaacttcaagttcacggaggaggaaatcaaatttcttcgatctgtcatgcctgcatgtgaggatgacttctttgagtacctccgttcgattgactgctcagacgtggaggtttatgccataccagagggttatgctgtgttccctaaagttccactgatgagaattgaaggacctgttgctgttgtccagcttcttgaaactccatttctaagtcttgtcaactatgcttctctggttaccacgaatgcggcacggcaccgacttgtagctgggaagtcaaagaatttacttgaatttggacttcgacgggctcaagggcctgatggaggaatcagtgcatcaagatattgttatatgggaggatttgatgcaacaagcaatgttgcagcaggaagattgtttgggataccaatacgtgggactcattcacatgcatttgtgagctccttcatgggtcttgatgaaattactgacaaaacacttactagttctgatggttcaaacacatgtgaagattttatctctctggtgcagaactggctgatcaggattcaggattctagttcattgcatggcacctttggagaaacgagccaaagtgagttggctgcattcacgtcatatgcactggcatttccaaattccttcctggccttggttgacacatatgatgtcatgagaagcggagtgccaaacttctgtgctgttgctttggccctcaatgatatggggtataaggcagtcggaattaggttggactctggtgatttagcatacctatccgttgaggcccgcaagttcttccatgcagttgaaaaagaatttgtagttgttggctttgggaaaacaagtatcacagcaagcaatgatcttaatgaagaaactatagatgctctgaacaagcagggccatgaggtagatgcatttggtattggcacctacctagttacatgctatgcacaagctgcacttggttgtgtattcaaattagttgagattaacaaacagcctcgtattaaactttctgaagatgtcatgaaggtatcgataccatgtaagaaaaaatgctacagattgtatggcaaagaagggtatccgttggttgatataatgaccggagaagatgagccaggtccaaagattggtgaaaggctcctatgtcgtcaccctttcaatgaatcaaagagagcgtacgttgttccacagcatgttgaggaattattgaagtgctactggcctggaaattcatcgaattcacgggaggagcttccatccatccatgagattaggactcggtgtattcaccatctggaccgaatgaggccagaccatatgaggcggctgaacccgacgccttacaagggtcggatcccaaacctaactctaataagctgctccgcttatgggtgccgtcggagcaaataacaaactgttgccgccggtgcaatttctgcagtagttttaccatcgcctgcgctctagtaaaatgtgagtatgtgctggtgcatctgtcaaaacagaccatagctgaagtgttacgtactgggaacaagaggatacccataccgagttagatctatatgactgaactaattgcaatgaggagcaatcactaaatttgagacaaatttacttgtcttgtca

SEQ ID NO: 5880 - DNA, 2133 bp, Zea Mays
ccttttcggctttcggtttcgggctcaaaagggctttccaggagaggagccgcaccgcacgtccgcacgccgctcttcttcccctgcttgctctgggttcctccattcctctccagtctccatcacaggagcacgcgacgcgcgccacaggaaggaaggggaaaaacatggcggcggcgaacggggacgcgtgccgcagcgtcggcggggtgccgcgcccgacgaaccccatggtgacgccgctgctcaccgacctgtaccagttcaccatggcctacgcctactggaaggccggcaagcacctcgaccgcgcagtctttgatctctacttccggaaaaatccatttggcggggagttcaccatcttcggtggcctcgaggaatgtataaggttcattgctaacttcaagttcacggaggaggaaatcaaatttcttcgatctgtcatgcctgcatgtgaggatgacttctttgagtacctccgttcgattgactgctcagacgtggaggtttatgccataccagagggttatgctgtgttccctaaagttccactgatgagaattgaaggacctgttgctcttcttgaaactccatttctaagtcttgtcaactatgcttctctggttaccacgaatgcggcacggcaccgacttgtagctgggaagtcaaagaatttacttgaatttggacttcgacgggctcaagggcctgatggaggaatcagtgcatcaagatattgttatatgggaggatttgatgcaacaagcaatgttgcagcaggaagattgtttgggataccaatacgtgggactcattcacatgcatttgtgagctccttcatgggtcttgatgaaattactgacaaaacacttactagttctgatggttcaaacacatgtgaagattttatctctctggtgcagaactggctgatcaggattcaggattctagttcattgcatggcacctttggagaaacgagccaaagtgagttggctgcattcacgtcatatgcactggcatttccaaattccttcctggccttggttgacacatatgatgtcatgagaagcggagtgccaaacttctgtgctgttgctttggccctcaatgatatggggtataaggcagtcggaattaggttggactctggtgatttagcatacctatccgttgaggcccgcaagttcttccatgcagttgaaaaagaatttgtagttgttggctttgggaaaacaagtatcacagcaagcaatgatcttaatgaagaaactatagatgctctgaacaagcagggccatgaggtagatgcatttggtattggcacctacctagttacatgctatgcacaagctgcacttggttgtgtattcaaattagttgagattaacaaacagcctcgtattaaactttctgaagatgtcatgaaggtatcgataccatgtaagaaaaaatgctacagattgtatggcaaagaagggtatccgttggttgatataatgaccggagaagatgagccaggtccaaagattggtgaaaggctcctatgtcgtcaccctttcaatgaatcaaagagagcgtacgttgttccacagcatgttgaggaattattgaagtgctactggcctggaaattcatcgaattcacgggaggagcttccatccatccatgagattaggactcggtgtattcaccatctggaccgaatgaggccagaccatatgaggcggctgaacccgacgccttacaaggtaagcgtgagtgctaagctgtatgacttcatccatttcttgtggctcaacgaagcgcctgtcggagaactgcaatgatgaaatgaagtggcggtagggtcggatcccaaacctaactctaataagctgctccgcttatgggtgccgtcggagcaaataacaaactgttgccgccggtgcaatttctgcagtagttttaccatcgcctgcgctctagtaaaatgtgagtatgtgctggtgcatctgtcaaaacagaccatagctgaagtgttacgtactgggaacaagaggatacccataccgagttagatctatatgactgaactaattgcaatgaggagcaatcactaaatttgagacaaatttacttgtcttgtca

SEQ ID NO: 5881 - DNA, 2674 bp, Zea Mays
ccttttcggctttcggtttcgggctcaaaagggctttccaggagaggagccgcaccgcacgtccgcacgccgctcttcttcccctgcttgctctgggttcctccattcctctccagtctccatcacaggagcacgcgacgcgcgccacaggaaggaaggggaaaaacatggcggcggcgaacggggacgcgtgccgcagcgtcggcggggtgccgcgcccgacgaaccccatggtgacgccgctgctcaccgacctgtaccagttcaccatggcctacgcctactggaaggccggcaagcacctcgaccgcgcagtgttagccctgagccccagctcttccccactcttaactccccgcgcttcctttgtctcctcaatcctttccctcgatttggggtgtcaatttacacttaacctccactcgatttgtggtatcagtttacacttacctccaggctccagccctcgatttgtggtttgttaggccactgaggagggggtgataatctggtagacatgaccccgcctcgataaggcgtgactgggtagtgttctggaactattttgctacctgttttttttttgaaccgtgtgtgaggctgggctggctgtgacgattgagcacatttgaggctctgcttcgtagttttgtttcagtacgttataagattaggtttgcaatggggaaaccgtttttcgttaggccaagtgttttatctaggtcgtacttggtgtagcaagtgtgtaaaatcagcgtcacagttcttctaccggtcttcaagttacgctctactctctttcacctgtactaactgcgaactgaaatggtgttagctttgatctctacttccggaaaaatccatttggcggggagttcaccatcttcggtggcctcgaggaatgtataaggttcattgctaacttcaagttcacggaggaggaaatcaaatttcttcgatctgtcatgcctgcatgtgaggatgacttctttgagtacctccgttcgattgactgctcagacgtggaggtttatgccataccagagggttatgctgtgttccctaaagttccactgatgagaattgaaggacctgttgctgtaagtaccgggagttgtccagcttcttgaaactccatttctaagtcttgtcaactatgcttctctggttaccacgaatgcggcacggcaccgacttgtagctgggaagtcaaagaatttacttgaatttggacttcgacgggctcaagggcctgatggaggaatcagtgcatcaagatattgttatatgggaggatttgatgcaacaagcaatgttgcagcaggaagattgtttgggataccaatacgtgggactcattcacatgcatttgtgagctccttcatgggtcttgatgaaattactgacaaaacacttactagttctgatggttcaaacacatgtgaagattttatctctctggtgcagaactggctgatcaggattcaggattctagttcattgcatggcacctttggagaaacgagccaaagtgagttggctgcattcacgtcatatgcactggcatttccaaattccttcctggccttggttgacacatatgatgtcatgagaagcggagtgccaaacttctgtgctgttgctttggccctcaatgatatggggtataaggcagtcggaattaggttggactctggtgatttagcatacctatccgttgaggcccgcaagttcttccatgcagttgaaaaagaatttgtagttgttggctttgggaaaacaagtatcacagcaagcaatgatcttaatgaagaaactatagatgctctgaacaagcagggccatgaggtagatgcatttggtattggcacctacctagttacatgctatgcacaagctgcacttggttgtgtattcaaattagttgagattaacaaacagcctcgtattaaactttctgaagatgtcatgaaggtatcgataccatgtaagaaaaaatgctacagattgtatggcaaagaagggtatccgttggttgatataatgaccggagaagatgagccaggtccaaagattggtgaaaggctcctatgtcgtcaccctttcaatgaatcaaagagagcgtacgttgttccacagcatgttgaggaattattgaagtgctactggcctggaaattcatcgaattcacgggaggagcttccatccatccatgagattaggactcggtgtattcaccatctggaccgaatgaggccagaccatatgaggcggctgaacccgacgccttacaaggtaagcgtgagtgctaagctgtatgacttcatccatttcttgtggctcaacgaagcgcctgtcggagaactgcaatgatgaaatgaagtggcggtagggtcggatcccaaacctaactctaataagctgctccgcttatgggtgccgtcggagcaaataacaaactgttgccgccggtgcaatttctgcagtagttttaccatcgcctgcgctctagtaaaatgtgagtatgtgctggtgcatctgtcaaaacagaccatagctgaagtgttacgtactgggaacaagaggatacccataccgagttagatctatatgactgaactaattgcaatgaggagcaatcactaaatttgagacaaatttacttgtcttgtca

SEQ ID NO: 5882 - DNA, 1507 bp, Zea Mays
cgggagttgtccagcttcttgaaactccatttctaagtcttgtcaactatgcttctctggttaccacgaatgcggcacggcaccgacttgtagctgggaagtcaaagaatttacttgaatttggacttcgacgggctcaagggcctgatggaggaatcagtgcatcaagatattgttatatgggaggatttgatgcaacaagcaatgttgcagcaggaagattgtttgggataccaatacgtgggactcattcacatgcatttgtgagctccttcatgggtcttgatgaaattactgacaaaacacttactagttctgatggttcaaacacatgtgaagattttatctctctggtgcagaactggctgatcaggattcaggattctagttcattgcatggcacctttggagaaacgagccaaagtgagttggctgcattcacgtcatatgcactggcatttccaaattccttcctggccttggttgacacatatgatgtataaggcagtcggaattaggttggactctggtgatttagcatacctatccgttgaggcccgcaagttcttccatgcagttgaaaaagaatttgtagttgttggctttgggaaaacaagtatcacagcaagcaatgatcttaatgaagaaactatagatgctctgaacaagcagggccatgaggtagatgcatttggtattggcacctacctagttacatgctatgcacaagctgcacttggttgtgtattcaaattagttgagattaacaaacagcctcgtattaaactttctgaagatgtcatgaaggtatcgataccatgtaagaaaaaatgctacagattgtatggcaaagaagggtatccgttggttgatataatgaccggagaagatgagccaggtccaaagattggtgaaaggctcctatgtcgtcaccctttcaatgaatcaaagagagcgtacgttgttccacagcatgttgaggaattattgaagtgctactggcctggaaattcatcgaattcacgggaggagcttccatccatccatgagattaggactcggtgtattcaccatctggaccgaatgaggccagaccatatgaggcggctgaacccgacgccttacaaggtaagcgtgagtgctaagctgtatgacttcatccatttcttgtggctcaacgaagcgcctgtcggagaactgcaatgatgaaatgaagtggcggtagggtcggatcccaaacctaactctaataagctgctccgcttatgggtgccgtcggagcaaataacaaactgttgccgccggtgcaatttctgcagtagttttaccatcgcctgcgctctagtaaaatgtgagtatgtgctggtgcatctgtcaaaacagaccatagctgaagtgttacgtactgggaacaagaggatacccataccgagttagatctatatgactgaactaattgcaatgaggagcaatcactaaatttgagacaaatttacttgtcttgtca

SEQ ID NO: 5883 - DNA, 1512 bp, Zea Mays
aagttagcatgttgtccagcttcttgaaactccatttctaagtcttgtcaactatgcttctctggttaccacgaatgcggcacggcaccgacttgtagctgggaagtcaaagaatttacttgaatttggacttcgacgggctcaagggcctgatggaggaatcagtgcatcaagatattgttatatgggaggatttgatgcaacaagcaatgttgcagcaggaagattgtttgggataccaatacgtgggactcattcacatgcatttgtgagctccttcatgggtcttgatgaaattactgacaaaacacttactagttctgatggttcaaacacatgtgaagattttatctctctggtgcagaactggctgatcaggattcaggattctagttcattgcatggcacctttggagaaacgagccaaagtgagttggctgcattcacgtcatatgcactggcatttccaaattccttcctggccttggttgacacatatgatgtataaggcagtcggaattaggttggactctggtgatttagcatacctatccgttgaggcccgcaagttcttccatgcagttgaaaaagaatttgtagttgttggctttgggaaaacaagtatcacagcaagcaatgatcttaatgaagaaactatagatgctctgaacaagcagggccatgaggtagatgcatttggtattggcacctacctagttacatgctatgcacaagctgcacttggttgtgtattcaaattagttgagattaacaaacagcctcgtattaaactttctgaagatgtcatgaaggtatcgataccatgtaagaaaaaatgctacagattgtatggcaaagaagggtatccgttggttgatataatgaccggagaagatgagccaggtccaaagattggtgaaaggctcctatgtcgtcaccctttcaatgaatcaaagagagcgtacgttgttccacagcatgttgaggaattattgaagtgctactggcctggaaattcatcgaattcacgggaggagcttccatccatccatgagattaggactcggtgtattcaccatctggaccgaatgaggccagaccatatgaggcggctgaacccgacgccttacaaggtaagcgtgagtgctaagctgtatgacttcatccatttcttgtggctcaacgaagcgcctgtcggagaactgcaatgatgaaatgaagtggcggtagggtcggatcccaaacctaactctaataagctgctccgcttatgggtgccgtcggagcaaataacaaactgttgccgccggtgcaatttctgcagtagttttaccatcgcctgcgctctagtaaaatgtgagtatgtgctggtgcatctgtcaaaacagaccatagctgaagtgttacgtactgggaacaagaggatacccataccgagttagatctatatgactgaactaattgcaatgaggagcaatcactaaatttgagacaaatttacttgtcttgtca

SEQ ID NO: 5884 - DNA, 3078 bp, Zea Mays
cccgtccccacgcgccacgagtggctagtggctacggtgccatctcgccttcgcgccacacatcccccactcgcctctcaccgacccagcagaaactatcgctcgtcgccgtcgaccaaagccatgccaccgacatgtgggacagtgctgcaggtcccactcggcagggacgccggcggttcttggagacagcgagagcgaccgaccgcgcgcgcctcctcctcctccttcctcgccaggcacggcacgactcccagtggccaagtacactcacccgctcgcgcgcgtgagcgatgaaagctctcgcctcgcccgccgcctccttcctcccgggtatcccgagccctagccatctcgcgcgcgcgcttccccgatccgcggcggccgcgctctcgcggcccccttccgggcgctccatcgccgccgcggccgcggccgccacaggggaccactggggcgccgaccaccagcactaccacggaggacgcgcgggcgcgtcggaggccgggcctaccgcgtcggcgcgcggcgtcaagtgcgacgtggacgtggtgtcgtggcgggagcggcgggtgctcgcgtccgtgcctgtggccgccgacgtcgacacgctgtggcaggtcatcaccgactacgagcgcctcgctgacttcatccccaacctcgtccagagtgtgacgattccgtgtccgcatgaagggcggatatggctggagcagagaggcctgcagcgcgcgttgtactggcacattgaggcgcgcgtcgtgttggatctccaggaaatccctgactccgataagtgggatgggaggtcctctagtgcagttttgctgtatgaagttaatgtgataccaagatttaacttcccggctatatttcttgaaaggattataaggtcagatcttcctgtaaatcttcgtgccttggcttgtagagctgaaaagatttatctggaaaatcaaggatgtggttcaagaaaattttttgttgaggacttgaagccatcatatacttctcagcttaataacttccatagtacgacagttgagacttctaagtttaaacaagcacctcccaggtctggtgttagcagtgtgcttccttcaccttcttctgaattgattagcaaatggggtgtatatggaaacatatgcagaattgataagccttgtgtggtagatgagatccatcttcgaagatttgatggcatgttggaacatgagggggctcataggtgtgtttttgctagtatcactgtgaaagcaccggttcgagaggtatggaatgttctcacagcatatgagaatttgcctgaattcgtaccaaacctggctatcagtaggattgttcttcgtgataataacaaggttcggataatgcaggagggttgcaaaggcctgctttatatggtccttcacgcccgtgttgttatggatcttcgcgaaaaacatgagcaagagatcagctttgaacaagtcgagggtgatttttacacatttaaagggaaatggcgcttagaacaacttggggatcagcacaccctgttgaagtacatggttgaaactaagatgcatagggacacctttctctctgaatctatccttgaagaggtcatatatgaagatcttccatcaaacttgtgtgcaatccgtgattatattgaaaaggctggagccaagagtagcaattccacaggtcattctaatgtgcccacagatccagatccagatgttgatcatgatgaaagcaggcaatctgagcaaacgtgtgtgtcttgctcatccagtaccatgaagcagagaccaaaagtcccaggattgcaaaaggacatcgaggtcctaaaatcagagcttgataatttcattgcagagtatggtcagtatggtttcatgcctaagagaaagcatctccggtctcatggaagagtggatattgagaaggctataacaagaatgggtgggttccggaagattgccagcataatgaacctttctctttcttacaaaaatcgaaaaccaagaggctattgggataatctggagaacttgcaagaagagatcagccggttccagaaaatttgggggttggatccttcttatatgcccagtagaaaatcttttgagagggcaggtcgttatgacattgctcgggcattggaaaaatggggtggggtgcaggaggtttcacgccttctttctcttgaactaagatatcctagaagacaagcagacccggacgatgagagacagtctgaatccccgtctgggatgatgaagaagcacggagtgaaacctgatgaaggcaatgtttccccaaatgcgcagaaatggctcctgaagctgaaggacttggatgtcaattgggtggaatactaggtttagctttggaaaaagatatggtctctcatcatgaactcagctctttcctttcttcggaggtgttctggatgcattccgacaaagacgccgcagattgtgtacagaacagcgcggtgcacgggccaaccccattctgaaggcgagctaccagcaggcaacatgttttcttgccagtaatcacgactcttggctactactgcgtatctagaactgctgacaatactactcagcttcttttgcggtcaaaccgatccatggttttgacaaagtcaggccataaaatgcagaaaagggtgtcgatttcgtgcgcctgttcaaagctgttttgagtcagccacgcctttgaaaaatctgaggtgttcacaggttggtcgcctactttgttattactggtgatataagttgacctggtccttttgaaagagaaggtttacccgtctagtaatagtttcagtcggcacgtttgcattacattggtctcgatcaggaggcacagctacatactttacgtctttacctattgctgcttcaattcttcatgggatgaatgaaaccgacctgacctatgtgttacctatggcacgaatatggatggctattgttagcttagagggatggataagaaacaagacgattagaataaaataacaagaatatggatttttattgaagtcaaaaaaaaaaaggaaaggtctcaccg

SEQ ID NO: 5885 - DNA, 3045 bp, Zea Mays
  misc_feature (727)..(733): n is a, c, g, or t
tatcgctcgtcgccgtcgaccaaagccatgccaccgacatgtgggacagtgctgcaggtcccactcggcagggacgccggcggttcttggagacagcgagagcgaccgaccgcgcgcgcctcctcctcctccttcctcgccaggcacggcacgactcccagtggccaagtacactcacccgctcgcgcgcgtgagcgatgaaagctctcgcctcgcccgccgcctccttcctcccgggtatcccgagccctagccatctcgcgcgcgcgcttccccgatccgcggcggccgcgctctcgcggcccccttccgggcgctccatcgccgccgcggccgcggccgccacaggggaccactggggcgccgaccaccagcactaccacggaggacgcgcgggcgcgtcggaggccgggcctaccgcgtcggcgcgcggcgtcaagtgcgacgtggacgtggtgtcgtggcgggagcggcgggtgctcgcgtccgtgcctgtggccgccgacgtcgacacgctgtggcaggtcatcaccgactacgagcgcctcgctgacttcatccccaacctcgtccagagtgtgacgattccgtgtccgcatgaagggcggatatggctggagcagagaggcctgcagcgcgcgttgtactggcacattgaggcgcgcgtcgtgttggatctccaggaaatccctgactccgtatgtgctgtcgcagattgaacttccannnnnnncgtcgtgacttcaagaagagtgaaggacaaatggtccataagatctgctcctaggtcctctagtgcagttttgctgtatgaagttaatgtgataccaagatttaacttcccggctatatttcttgaaaggattataaggtcagatcttcctgtaaatcttcgtgccttggcttgtagagctgaaaagatttatctggaaaatcaaggatgtggttcaagaaaattttttgttgaggacttgaagccatcatatacttctcagcttaataacttccatagtacgacagttgagacttctaagtttaaacaagcacctcccaggtctggtgttagcagtgtgcttccttcaccttcttctgaattgattagcaaatggggtgtatatggaaacatatgcagaattgataagccttgtgtggtagatgagatccatcttcgaagatttgatggcatgttggaacatgagggggctcataggtgtgtttttgctagtatcactgtgaaagcaccggttcgagagttatgatctaacaaaaaaacatttggtagattcgtaccaaacctggctatcagtaggattgttcttcgtgataataacaaggttcggataatgcaggagggttgcaaaggcctgctttatatggtccttcacgcccgtgttgttatggatcttcgcgaaaaacatgagcaagagatcagctttgaacaagtcgagggtgatttttacacatttaaagggaaatggcgcttagaacaacttggggatcagcacaccctgttgaagtacatggttgaaactaagatgcatagggacacctttctctctgaatctatccttgaagaggtcatatatgaagatcttccatcaaacttgtgtgcaatccgtgattatattgaaaaggctggagccaagagtagcaattccacaggtcattctaatgtgcccacagatccagatccagatgttgatcatgatgaaagcaggcaatctgagcaaacgtgtgtgtcttgctcatccagtaccatgaagcagagaccaaaagtcccaggattgcaaaaggacatcgaggtcctaaaatcagagcttgataatttcattgcagagtatggtcagtatggtttcatgcctaagagaaagcatctccggtctcatggaagagtggatattgagaaggctataacaagaatgggtgggttccggaagattgccagcataatgaacctttctctttcttacaaaaatcgaaaaccaagaggctattgggataatctggagaacttgcaagaagagatcagccggttccagaaaatttgggggttggatccttcttatatgcccagtagaaaatcttttgagagggcaggtcgttatgacattgctcgggcattggaaaaatggggtggggtgcaggaggtttcacgccttctttctcttgaactaagatatcctagaagacaagcagacccggacgatgagagacagtctgaatccccgtctgggatgatgaagaagcacggagtgaaacctgatgaaggcaatgtttccccaaatgcgcagaaatggctcctgaagctgaaggacttggatgtcaattgggtggaatactaggtttagctttggaaaaagatatggtctctcatcatgaactcagctctttcctttcttcggaggtgttctggatgcattccgacaaagacgccgcagattgtgtacagaacagcgcggtgcacgggccaaccccattctgaaggcgagctaccagcaggcaacatgttttcttgccagtaatcacgactcttggctactactgcgtatctagaactgctgacaatactactcagcttcttttgcggtcaaaccgatccatggttttgacaaagtcaggccataaaatgcagaaaagggtgtcgatttcgtgcgcctgttcaaagctgttttgagtcagccacgcctttgaaaaatctgaggtgttcacaggttggtcgcctactttgttattactggtgatataagttgacctggtccttttgaaagagaaggtttacccgtctagtaatagtttcagtcggcacgtttgcattacattggtctcgatcaggaggcacagctacatactttacgtctttacctattgctgcttcaattcttcatgggatgaatgaaaccgacctgacctatgtgttacctatggcacgaatatggatggctattgttagcttagagggatggataagaaacaagacgattagaataaaataacaagaatatggatttttattgaagtcaaaaaaaaaaaggaaaggtctcaccg

SEQ ID NO: 5886 - DNA, 2917 bp, Zea Mays
atgccaccgacatgtgggacagtgctgcaggtcccactcggcagggacgccggcggttcttggagacagcgagagcgaccgaccgcgcgcgcctcctcctcctccttcctcgccaggcacggcacgactcccagtggccaagtacactcacccgctcgcgcgcgtgagcgatgaaagctctcgcctcgcccgccgcctccttcctcccgggtatcccgagccctagccatctcgcgcgcgcgcttccccgatccgcggcggccgcgctctcgcggcccccttccgggcgctccatcgccgccgcggccgcggccgccacaggggaccactggggcgccgaccaccagcactaccacggaggacgcgcgggcgcgtcggaggccgggcctaccgcgtcggcgcgcggcgtcaagtgcgacgtggacgtggtgtcgtggcgggagcggcgggtgctcgcgtccgtgcctgtggccgccgacgtcgacacgctgtggcaggtcatcaccgactacgagcgcctcgctgacttcatccccaacctcgtccagagtgtgacgattccgtgtccgcatgaagggcggatatggctggagcagagaggcctgcagcgcgcgttgtactggcacattgaggcgcgcgtcgtgttggatctccaggaaatccctgactccgataagtgggatgggaggtcctctagtgcagttttgctgtatgaagttaatgtgataccaagatttaacttcccggctatatttcttgaaaggattataaggtcagatcttcctgtaaatcttcgtgccttggcttgtagagctgaaaagatttatctggaaaatcaaggatgtggttcaagaaaattttttgttgaggacttgaagccatcatatacttctcagcttaataacttccatagtacgacagttgagacttctaagtttaaacaagcacctcccaggtctggtgttagcagtgtgcttccttcaccttcttctgaattgattagcaaatggggtgtatatggaaacatatgcagaattgataagccttgtgtggtagatgagatccatcttcgaagatttgatggcatgttggaacatgagggggctcataggtgtgtttttgctagtatcactgtgaaagcaccggttcgagagattcgtaccaaacctggctatcagtaggattgttcttcgtgataataacaaggttcggataatgcaggagggttgcaaaggcctgctttatatggtccttcacgcccgtgttgttatggatcttcgcgaaaaacatgagcaagagatcagctttgaacaagtcgagggtgatttttacacatttaaagggaaatggcgcttagaacaacttggggatcagcacaccctgttgaagtacatggttgaaactaagatgcatagggacacctttctctctgaatctatccttgaagaggtcatatatgaagatcttccatcaaacttgtgtgcaatccgtgattatattgaaaaggctggagccaagagtagcaattccacaggtcattctaatgtgcccacagatccagatccagatgttgatcatgatgaaagcaggcaatctgagcaaacgtgtgtgtcttgctcatccagtaccatgaagcagagaccaaaagtcccaggattgcaaaaggacatcgaggtcctaaaatcagagcttgataatttcattgcagagtatggtcagtatggtttcatgcctaagagaaagcatctccggtctcatggaagagtggatattgagaaggctataacaagaatgggtgggttccggaagattgccagcataatgaacctttctctttcttacaaaaatcgaaaaccaagaggctattgggataatctggagaacttgcaagaagagatcagccggttccagaaaatttgggggttggatccttcttatatgcccagtagaaaatcttttgagagggcaggtcgttatgacattgctcgggcattggaaaaatggggtggggtgcaggaggtttcacgccttctttctcttgaactaagatatcctagaagacaagcagacccggacgatgagagacagtctgaatccccgtctgggatgatgaagaagcacggagtgaaacctgatgaaggcaatgtttccccaaatgcgcagaaatggctcctgaagctgaaggacttggatgtcaattgggtggaatactaggtttagctttggaaaaagatatggtctctcatcatgaactcagctctttcctttcttcggaggtgttctggatgcattccgacaaagacgccgcagattgtgtacagaacagcgcggtgcacgggccaaccccattctgaaggcgagctaccagcaggcaacatgttttcttgccagtaatcacgactcttggctactactgcgtatctagaactgctgacaatactactcagcttcttttgcggtcaaaccgatccatggttttgacaaagtcaggccataaaatgcagaaaagggtgtcgatttcgtgcgcctgttcaaagctgttttgagtcagccacgcctttgaaaaatctgaggtgttcacaggttggtcgcctactttgttattactggtgatataagttgacctggtccttttgaaagagaaggtttacccgtctagtaatagtttcagtcggcacgtttgcattacattggtctcgatcaggaggcacagctacatactttacgtctttacctattgctgcttcaattcttcatgggatgaatgaaaccgacctgacctatgtgttacctatggcacgaatatggatggctattgttagcttagagggatggataagaaacaagacgattagaataaaataacaagaatatggatttttattgaagtcaaaaaaaaaaaggaaaggtctcaccg

SEQ ID NO: 5887 - DNA, 2908 bp, Zea Mays
cacggcacgactcccagtggccaagtacactcacccgctcgcgcgcgtgagcgatgaaagctctcgcctcgcccgccgcctccttcctcccgggtatcccgagccctagccatctcgcgcgcgcgcttccccgatccgcggcggccgcgctctcgcggcccccttccgggcgctccatcgccgccgcggccgcggccgccacaggggaccactggggcgccgaccaccagcactaccacggaggacgcgcgggcgcgtcggaggccgggcctaccgcgtcggcgcgcggcgtcaagtgcgacgtggacgtggtgtcgtggcgggagcggcgggtgctcgcgtccgtgcctgtggccgccgacgtcgacacgctgtggcaggtcatcaccgactacgagcgcctcgctgacttcatccccaacctcgtccagagtgtgacgattccgtgtccgcatgaagggcggatatggctggagcagagaggcctgcagcgcgcgttgtactggcacattgaggcgcgcgtcgtgttggatctccaggaaatccctgactccgataagtgggatgggaggtcctctagtgcagttttgctgtatgaagttaatgtgataccaagatttaacttcccggctatatttcttgaaaggattataaggtcagatcttcctgtaaatcttcgtgccttggcttgtagagctgaaaagatttatctggaaaatcaaggatgtggttcaagaaaattttttgttgaggacttgaagccatcatatacttctcagcttaataacttccatagtacgacagttgagacttctaagtttaaacaagcacctcccaggtctggtgttagcagtgtgcttccttcaccttcttctgaattgattagcaaatggggtgtatatggaaacatatgcagaattgataagccttgtgtggtagatgagatccatcttcgaagatttgatggcatgttggaacatgagggggctcataggtgtgtttttgctagtatcactgtgaaagcaccggttcgagaggtatggaatgttctcacagcatatgagaatttgcctgaattcgtaccaaacctggctatcagtaggattgttcttcgtgataataacaaggttcggataatgcaggagggttgcaaaggcctgctttatatggtccttcacgcccgtgttgttatggatcttcgcgaaaaacatgagcaagagatcagctttgaacaagtcgagggtgatttttacacatttaaagggaaatggcgcttagaacaacttggggatcagcacaccctgttgaagtacatggttgaaactaagatgcatagggacacctttctctctgaatctatccttgaagagctgaatgctttgataaagtttaatgtctttagagatagtaaagcagactgttcatttttcatgaatctgttacaggtcatatatgaagatcttccatcaaacttgtgtgcaatccgtgattatattgaaaaggctggagccaagagtagcaattccacaggtcattctaatgtgcccacagatccagatccagatgttgatcatgatgaaagcaggcaatctgagcaaacgtgtgtgtcttgctcatccagtaccatgaagcagagaccaaaagtcccaggattgcaaaaggacatcgaggtcctaaaatcagagcttgataatttcattgcagagtatggtcagtatggtttcatgcctaagagaaagcatctccggtctcatggaagagtggatattgagaaggctataacaagaatgggtgggttccggaagattgccagcataatgaacctttctctttcttacaaaaatcgaaaaccaagaggctattgggataatctggagaacttgcaagaagagccggttccagaaaatttgggggttggatccttcttatatgcccagtagaaaatcttttgagagggcaggtcgttatgacattgctcgggcattggaaaaatggggtggggtgcaggaggtttcacgccttctttctcttgaactaagatatcctagaagacaagcagacccggacgatgagagacagtctgaatccccgtctgggatgatgaagaagcacggagtgaaacctgatgaaggcaatgtttccccaaatgcgcagaaatggctcctgaagctgaaggacttggatgtcaattgggtggaatactaggtttagctttggaaaaagatatggtctctcatcatgaactcagctctttcctttcttcggaggtgttctggatgcattccgacaaagacgccgcagattgtgtacagaacagcgcggtgcacgggccaaccccattctgaaggcgagctaccagcaggcaacatgttttcttgccagtaatcacgactcttggctactactgcgtatctagaactgctgacaatactactcagcttcttttgcggtcaaaccgatccatggttttgacaaagtcaggccataaaatgcagaaaagggtgtcgatttcgtgcgcctgttcaaagctgttttgagtcagccacgcctttgaaaaatctgaggtgttcacaggttggtcgcctactttgttattactggtgatataagttgacctggtccttttgaaagagaaggtttacccgtctagtaatagtttcagtcggcacgtttgcattacattggtctcgatcaggaggcacagctacatactttacgtctttacctattgctgcttcaattcttcatgggatgaatgaaaccgacctgacctatgtgttacctatggcacgaatatggatggctattgttagcttagagggatggataagaaacaagacgattagaataaaataacaagaatatggatttttattgaagtcaaaaaaaaaaaggaaaggtctcaccg

SEQ ID NO: 5888 - DNA, 2798 bp, Zea Mays
gctcgcgcgcgtgagcgatgaaagctctcgcctcgcccgccgcctccttcctcccgggtatcccgagccctagccatctcgcgcgcgcgcttccccgatccgcggcggccgcgctctcgcggcccccttccgggcgctccatcgccgccgcggccgcggccgccacaggggaccactggggcgccgaccaccagcactaccacggaggacgcgcgggcgcgtcggaggccgggcctaccgcgtcggcgcgcggcgtcaagtgcgacgtggacgtggtgtcgtggcgggagcggcgggtgctcgcgtccgtgcctgtggccgccgacgtcgacacgctgtggcaggtcatcaccgactacgagcgcctcgctgacttcatccccaacctcgtccagagtgtgacgattccgtgtccgcatgaagggcggatatggctggagcagagaggcctgcagcgcgcgttgtactggcacattgaggcgcgcgtcgtgttggatctccaggaaatccctgactccgataagtgggatgggaggtcctctagtgcagttttgctgtatgaagttaatgtgataccaagatttaacttcccggctatatttcttgaaaggattataaggtcagatcttcctgtaaatcttcgtgccttggcttgtagagctgaaaagatttatctggaaaatcaaggatgtggttcaagaaaattttttgttgaggacttgaagccatcatatacttctcagcttaataacttccatagtacgacagttgagacttctaagtttaaacaagcacctcccaggtctggtgttagcagtgtgcttccttcaccttcttctgaattgattagcaaatggggtgtatatggaaacatatgcagaattgataagccttgtgtggtagatgagatccatcttcgaagatttgatggcatgaacatgagggggctcataggtgtgtttttgctagtatcactgtgaaagcaccggttcgagaggtatggaatgttctcacagcatatgagaatttgcctgaattcgtaccaaacctggctatcagtaggattgttcttcgtgataataacaaggttcggataatgcaggagggttgcaaaggcctgctttatatggtccttcacgcccgtgttgttatggatcttcgcgaaaaacatgagcaagagatcagctttgaacaagtcgagggtgatttttacacatttaaagggaaatggcgcttagaacaacttggggatcagcacaccctgttgaagtacatggttgaaactaagatgcatagggacacctttctctctgaatctatccttgaagaggtcatatatgaagatcttccatcaaacttgtgtgcaatccgtgattatattgaaaaggctggagccaagagtagcaattccacaggtcattctaatgtgcccacagatccagatccagatgttgatcatgatgaaagcaggcaatctgagcaaacgtgtgtgtcttgctcatccagtaccatgaagcagagaccaaaagtcccaggattgcaaaaggacatcgaggtcctaaaatcagagcttgataatttcattgcagagtatggtcagtatggtttcatgcctaagagaaagcatctccggtctcatggaagagtggatattgagaaggctataacaagaatgggtgggttccggaagattgccagcataatgaacctttctctttcttacaaaaatcgaaaaccaagaggctattgggataatctggagaacttgcaagaagagatcagccggttccagaaaatttgggggttggatccttcttatatgcccagtagaaaatcttttgagagggcaggtcgttatgacattgctcgggcattggaaaaatggggtggggtgcaggaggtttcacgccttctttctcttgaactaagatatcctagaagacaagcagacccggacgatgagagacagtctgaatccccgtctgggatgatgaagaagcacggagtgaaacctgatgaaggcaatgtttccccaaatgcgcagaaatggctcctgaagctgaaggacttggatgtcaattgggtggaatactaggtttagctttggaaaaagatatggtctctcatcatgaactcagctctttcctttcttcggaggtgttctggatgcattccgacaaagacgccgcagattgtgtacagaacagcgcggtgcacgggccaaccccattctgaaggcgagctaccagcaggcaacatgttttcttgccagtaatcacgactcttggctactactgcgtatctagaactgctgacaatactactcagcttcttttgcggtcaaaccgatccatggttttgacaaagtcaggccataaaatgcagaaaagggtgtcgatttcgtgcgcctgttcaaagctgttttgagtcagccacgcctttgaaaaatctgaggtgttcacaggttggtcgcctactttgttattactggtgatataagttgacctggtccttttgaaagagaaggtttacccgtctagtaatagtttcagtcggcacgtttgcattacattggtctcgatcaggaggcacagctacatactttacgtctttacctattgctgcttcaattcttcatgggatgaatgaaaccgacctgacctatgtgttacctatggcacgaatatggatggctattgttagcttagagggatggataagaaacaagacgattagaataaaataacaagaatatggatttttattgaagtcaaaaaaaaaaaggaaaggtctcaccg

SEQ ID NO: 5889 - DNA, 2674 bp, Zea Mays
  misc_feature (530)..(536): n is a, c, g, or t
atgaaagctctcgcctcgcccgccgcctccttcctcccgggtatcccgagccctagccatctcgcgcgcgcgcttccccgatccgcggcggccgcgctctcgcggcccccttccgggcgctccatcgccgccgcggccgcggccgccacaggggaccactggggcgccgaccaccagcactaccacggaggacgcgcgggcgcgtcggaggccgggcctaccgcgtcggcgcgcggcgtcaagtgcgacgtggacgtggtgtcgtggcgggagcggcgggtgctcgcgtccgtgcctgtggccgccgacgtcgacacgctgtggcaggtcatcaccgactacgagcgcctcgctgacttcatccccaacctcgtccagagtgtgacgattccgtgtccgcatgaagggcggatatggctggagcagagaggcctgcagcgcgcgttgtactggcacattgaggcgcgcgtcgtgttggatctccaggaaatccctgactccgtatgtgctgtcgcagattgaacttccannnnnnncgtcgtgacttcaagaagagtgaaggacaaatggtccataagatctgctcctaggtcctctagtgcagttttgctgtatgaagttaatgtgataccaagatttaacttcccggctatatttcttgaaaggattataaggtctggtgttagcagtgtgcttccttcaccttcttctgaattgattagcaaatggggtgtatatggaaacatatgcagaattgataagccttgtgtggtagatgagatccatcttcgaagatttgatggcatgttggaacatgagggggctcataggtgtgtttttgctagtatcactgtgaaagcaccggttcgagaggtatggaatgttctcacagcatatgagaatttgcctgaattcgtaccaaacctggctatcagtaggattgttcttcgtgataataacaaggttcggataatgcaggagggttgcaaaggcctgctttatatggtccttcacgcccgtgttgttatggatcttcgcgaaaaacatgagcaagagatcagctttgaacaagtcgagggtgatttttacacatttaaagggaaatggcgcttagaacaacttggggatcagcacaccctgttgaagtacatggttgaaactaagatgcatagggacacctttctctctgaatctatccttgaagaggtcatatatgaagatcttccatcaaacttgtgtgcaatccgtgattatattgaaaaggctggagccaagagtagcaattccacaggtcattctaatgtgcccacagatccagatccagatgttgatcatgatgaaagcaggcaatctgagcaaacgtgtgtgtcttgctcatccagtaccatgaagcagagaccaaaagtcccaggattgcaaaaggacatcgaggtcctaaaatcagagcttgataatttcattgcagagtatggtcagtatggtttcatgcctaagagaaagcatctccggtctcatggaagagtggatattgagaaggctataacaagaatgggtgggttccggaagattgccagcataatgaacctttctctttcttacaaaaatcgaaaaccaagaggctattgggataatctggagaacttgcaagaagagatcagccggttccagaaaatttgggggttggatccttcttatatgcccagtagaaaatcttttgagagggcaggtcgttatgacattgctcgggcattggaaaaatggggtggggtgcaggaggtttcacgccttctttctcttgaactaagatatcctagaagacaagcagacccggacgatgagagacagtctgaatccccgtctgggatgatgaagaagcacggagtgaaacctgatgaaggcaatgtttccccaaatgcgcagaaatggctcctgaagctgaaggacttggatgtcaattgggtggaatactaggtttagctttggaaaaagatatggtctctcatcatgaactcagctctttcctttcttcggaggtgttctggatgcattccgacaaagacgccgcagattgtgtacagaacagcgcggtgcacgggccaaccccattctgaaggcgagctaccagcaggcaacatgttttcttgccagtaatcacgactcttggctactactgcgtatctagaactgctgacaatactactcagcttcttttgcggtcaaaccgatccatggttttgacaaagtcaggccataaaatgcagaaaagggtgtcgatttcgtgcgcctgttcaaagctgttttgagtcagccacgcctttgaaaaatctgaggtgttcacaggttggtcgcctactttgttattactggtgatataagttgacctggtccttttgaaagagaaggtttacccgtctagtaatagtttcagtcggcacgtttgcattacattggtctcgatcaggaggcacagctacatactttacgtctttacctattgctgcttcaattcttcatgggatgaatgaaaccgacctgacctatgtgttacctatggcacgaatatggatggctattgttagcttagagggatggataagaaacaagacgattagaataaaataacaagaatatggatttttattgaagtcaaaaaaaaaaaggaaaggtctcaccg

SEQ ID NO: 5890 - DNA, 2116 bp, Zea Mays
cgggaacatttttggtgtaaacaaatccttccgtacaacccagcgagagagggtcgtcgaggtcgtcgtctctagctagctgctaagagagagagagagagagaggtatacgtaggaccgccggcaactagctaactaacatgtcgtcgtcgtccgggacgacgatgccgctggcgtaccagacgtcggcgtcgtctcccgagtggctgaacaagggcgacaacgcgtggcagctgacggcggcgacgctggtggggctgcagagcttcccgggtctggtggtcctgtacggcggcgtggtgaagaagaagtgggccgtgaactcggccttcatggcgctgtacgcgttcgcggcggtgtggatctgctgggtgacctgggcctacaacatgtccttcggcgacaggctgctgccgctgtggggcaaggcgcggccggcgctgagccagggcgggctggtggggcaggccggcctccccgccacggcgcaccacttcgccagcggcgccctggagaccccggccgcggagccgctgtacccgatggccacggtggtgtacttccagtgcgtgttcgcggccatcaccctggtgctggtcgccgggtcgctgctgggccggatgagcttcgccgcgtggatgctgttcgtgccgctctggctcaccttctcctacaccgtcggcgccttctccgtatggggcggcgggttcctcttccagtggggcgtcatcgactactgcggcggctacgtcatccacctctccgctggcttcgccgggttcacggcagcctactgggtggggccccgggcgcagaaggacagggagaggttcccgccgaacaacatcctgttcacgctcaccggcgcgggcctgctgtggatggggtgggccggcttcaacggcggcgggccgtacgccgccaacgtggtggcgtccatgtcggtgctcaacaccaacatctgcaccgccatgagcctcctcgtctggacctgcctcgacgtcgtcttcttcaagaagccctccgtcgtgggcgccgtccagggcatgatcaccggactcgtctgcatcacgcccgccgcagggctggtgcaggggtgggcggccatggtgatgggcgtgctggccggcagcgtgccgtggtacacgatgatgatcctgcacaagcggtcccggctgctgaagcacgtggacgacacgctgggcgtcatccacacgcacggcgtggcggggctcctgggcggcctgctcacggggctcctcgccgaccccaccctgtgcgcgctcttcctgccggtcaccaactccaagggcgccttctacggcgacggcgcgcagctcggcaagcagctggcgggcgcgctcttcatcatcggatggaacgtggccgtcacctccatcatctgcgtcgccatcaacgccgtcgtcccgctgcgcatgacccaggacaagctcgaggtcggcgacgacgccgtccatggcgaggaggcgtacgcgctctggggagacggcgagctctacgacgtcaccgaccacgggccacgcgccgccgccgccgtcgcgcccatgtccacgcccccgaattgaaatagctgcgagaacctcctgtgcgtccatccatccatccatccatccatccatccatccatcgcgtgttgataaccaccgttcattgtgaaaaataccaagtgcacgagctagctagctagtaggccttgctgttcctcctcttcttaatccaacatcgcatgtactgtacattgctgtgtatgtgaacgtcgcatgtagtgtgcattgccgtcgcatgaaaaagacggcataccgaagaatcagtcaacaaaagcttccttgtttcctcgtccttgtgcagttttgcactagttttggattgttaccgagaatcaggatagttatgataacagtaatgggatatatgcagatctgttcctattgatgagctggttttttaaggctttgctcagagaaaggacggaagttaatggcgccgggtatggtgtaataggagtcccgtatagttcctcacccttgtcatcctcgagtgcatctagtgttagagcgccgccgcgatcgtttcataacagcttagacaattaaat

SEQ ID NO: 5891 - DNA, 1548 bp, Zea Mays
gtcaaatacttctcaaacccatttcaataatttgttgaagctgaaaaacggaagctgaaattagtgaatggctctcaaactcaaacatgtcccgtcttctctacgtatttagagtcagcccaaagtgtcgatccggcccattaaacagttatactctcgtctcgccgtcgctatcgaggcgagctccgtggaagtttgctggctgctgaggctcgttcgaggcggtggaggacaggcaggcaggcagctctccgttcggcttggcttggcttggacggctgccgcgtcgcgcacctgcgggcgggcagtggccagtggctgggcggtccggggccggggcagccaggggcgtcgtcgcgctcgtagccactgaggtcggcggcggtggcaccgtggcagtgcggtgccgagaaaccgtcccaccaaggaggctggggcaccgaacagcgaacaacggaagaagagcagctgaacaggcaggggagaggttccagctatgctcaccgcgcagccgccacctgaggtagcgggtgaggatgacagcagtttccaccatgtcttcgtggagtttatgaccaaagccgctcagttcgaggagctcgctgaatctggggagcgattgcttgggagattccgtgaggagcttgagtattttcgtaggccccagattcctaaggaatcagatgtcatgaatcagatacttaaatccaactgcactgtcagaatgaggtcctatgttgaagctggctgcaggcttcactaccaaaacatctcaaacataaatcagtgatttatagttgaagtatgagctctagacaacatacttgttcaattttaatgataaataattccatacccttaatcagttagctattgttttttttccttgtgccagtaagctcatccgaagctggacttaaagatcatataaagaaagctaagactttgctcgaagaacttgaatgtctagtcgagaatgtctatggcatcacattaacatccagtttaagtgctctggaagtttcagacagtcattgcctcgacaacatgccaagcaccgattgctatgccatggaggaggataaacgagcagatcatttggacatggacgtatcgctcgttacggtgatggccatggttcgcaacatgctgaagcttgactacacgatgcaggagaagattgtcactgcattgtccttgaaaacaccagcatcggagctcgagggatactgcctcatgtgggatctacgcccgtacatcgatgacgacgtgatgcgtcttgcgtggaacatgtgtccttgaagcattggggctttgagttgtttctgctgggatggatgtctggtctgttcattattttcttatgtatgacaacgtggttgtgtgtgttcatggtcgtcttctggagacgagaaacacatgggtgttgtttggttcacataaattggtaactaataatattagattatgtttgtttaagttcaaccgtaatggataccacactacaaatggatacttccttatttaaatttgttaccgccgatatta

SEQ ID NO: 5892 - DNA, 1297 bp, Zea Mays
attaaacagttatactctcgtctcgccgtcgctatcgaggcgagctccgtggaagtttgctggctgctgaggctcgttcgaggcggtggaggacaggcaggcaggcagctctccgttcggcttggcttggcttggacggctgccgcgtcgcgcacctgcgggcgggcagtggccagtggctgggcggtccggggccggggcagccaggggcgtcgtcgcgctcgtagccactgaggtcggcggcggtggcaccgtggcagtgcggtgccgagaaaccgtcccaccaaggaggctggggcaccgaacagcgaacaacggaagaagagcagctgaacaggcaggggagaggttccagctatgctcaccgcgcagccgccacctgaggtagcgggtgaggatgacagcagtttccaccatgtcttcgtggagtttatgaccaaagccgctcagttcgaggagctcgctgaatctggggagcgattgcttgggagattccgtgaggagcttgagtattttcgtaggccccagattcctaaggaatcagatgtcatgaatcagatacttaaatccaactgcactgtcagaatgaggtcctatgttgaagctggctgcaggcttcactaccaaaacatctcaaacataaatcagttaagctcatccgaagctggacttaaagatcatataaagaaagactttgctcgaagaacttgaatgtctagtcgagaatgtctatggcatcacattaacatccagtttaagtgctctggaagtttcagacagtcattgcctcgacaacatgccaagcaccgattgctatgccatggaggaggataaacgagcagatcatttggacatggacgtatcgctcgttacggtgatggccatggttcgcaacatgctgaagcttgactacacgatgcaggagaagattgtcactgcattgtccttgaaaacaccagcatcggagctcgagggatactgcctcatgtgggatctacgcccgtacatcgatgacgacgtgatgcgtcttgcgtggaacatgtgtccttgaagcattggggctttgagttgtttctgctgggatggatgtctggtctgttcattattttcttatgtatgacaacgtggttgtgtgtgttcatggtcgtcttctggagacgagaaacacatgggtgttgtttggttcacataaattggtaactaataatattagattatgtttgtttaagttcaaccgtaatggataccacactacaaatggatacttccttatttaaatttgttaccgccgatatta

SEQ ID NO: 5893 - DNA, 1571 bp, Zea Mays
attaaacagttatactctcgtctcgccgtcgctatcgaggcgagctccgtggaagtttgctggctgctgaggctcgttcgaggcggtggaggacaggcaggcaggcagctctccgttcggcttggcttggcttggacggctgccgcgtcgcgcacctgcgggcgggcagtggccagtggctgggcggtccggggccggggcagccaggggcgtcgtcgcgctcgtagccactgaggtcggcggcggtggcaccgtggcagtgcggtgccgagaaaccgtcccaccaaggaggctggggcaccgaacagcgaacaacggaagaagagcagctgaacaggcaggggagaggttccagctatgctcaccgcgcagccgccacctgaggtagcgggtgaggatgacagcagtttccaccatgtcttcgtggagtttatgaccaaagccgctcagttcgaggagctcgctgaatctggggagcgattgcttgggagattccgtgaggagcttgagtattttcgtaggccccagattcctaaggaatcagatgtcatgaatcagatacttaaatccaactgcactgtcagaatgaggtcctatgttgaagctggctgcaggcttcactaccaaaacatctcaaacataaatcagtgtgagctatatagctttggcagtgaacaaccttttttattcttacatgctaatggttgatatgactcgcttatctgaatttgtcccgtacttgtttcttgccctgtctataaaagtacagactattgtgatttttagctaattctatgtattcttttgttattacaggatttatagttgaagtatgagctctagacaacatacttgttcaattttaatgataaataattccatacccttaatcagttagctattgttttttttccttgtgccagtaagctcatccgaagctggacttaaagatcatataaagaaagactttgctcgaagaacttgaatgtctagtcgagaatgtctatggcatcacattaacatccagtttaagtgctctggaagtttcagacagtcattgcctcgacaacatgccaagcaccgattgctatgccatggaggaggataaacgagcagatcatttggacatggacgtatcgctcgttacggtgatggccatggttcgcaacatgctgaagcttgactacacgatgcaggagaagattgtcactgcattgtccttgaaaacaccagcatcggagctcgagggatactgcctcatgtgggatctacgcccgtacatcgatgacgacgtgatgcgtcttgcgtggaacatgtgtccttgaagcattggggctttgagttgtttctgctgggatggatgtctggtctgttcattattttcttatgtatgacaacgtggttgtgtgtgttcatggtcgtcttctggagacgagaaacacatgggtgttgtttggttcacataaattggtaactaataatattagattatgtttgtttaagttcaaccgtaatggataccacactacaaatggatacttccttatttaaatttgttaccgccgatatta

SEQ ID NO: 5894 - DNA, 2278 bp, Zea Mays
gaaaggtctcaaaactgcttctgtgtcagtgtcacagtgctgccgctgcccttctcttccatctcttaccagtcatttccttttcggaagttgagaagtactgcacgcttcgatcaggaattcggcagatcgaactctctgctgccatctctctcgcgttcgtatctaacacttgcgagttgcgaggtcgaggcaaagaactcatcgcgtggatcctccatttgggtcaacacggctggacgtggaatccaacccggggtgccagcgcacacgacaccggtcaccgcccgcctccttgtaggcttgtctgccagatcgaaggcaagcgcgggcgccggcgtggccttgcgatggagagccccacgtcgacggcgtcgcgccccgacttctacgacttcctcgaccgcatgcgccgccccgccgccgccgacctattccgctccatcaagagcttccttgtctccttctccttccacgcgcccaacgccgaggaggacggcagcaaggtccaggccttcctcgcggagatggagagcgccatcagggaccacccgctctgggccaacgccaccgatcaggagatcgaccacgcgctcgagggcctggagaagtatgtcatcaccaaattgttcgaccgcacgtttgggacttccactgaggatgccgttaccgacatggacatctcggagaagattggtctcttgcagcagtttgttaagcctcatcacttggatatacccaaggtcctgcataacgaggcatcgtggctgcttgcagtgaaagagctgcagaagattaattcctttaaagcaccacgtgagaagcttctgtgcatcatgaactgctgtcaagtcatcaataacttgcttctgaacatatcaatgtcaaatgatcgaacattatctggggctgatgagttccttcctattcttatctatgttactatcaaggccaatcctcctcagctgcactcaaatctgaagttcattcagctctttagaagagaaacaaagctaatttcagaagtcgaatattacctgactaacctcatttcagcaaagatgtttataatagatgtcagtgctcactcgctctcaatggaggaaagcgagtttcagaaacatatggaatcggcaagactagctactcaagtatctgttgcaagcccaagtagctcacaggggcttcccacatctgcaagggcaaatcaggaggaaactgatatggcaggttccagattccctttcatggactcagaaactgaaagcttgactccaggggaagtcaagcagctgcatgatctgtataagcgagttgtcacaagatacacgctgttgtctgaagccttaagaaagtcatccatagacgaggatcagctccttaattcagtgcatgatccatgaggtgatgtgaagatgatgtctaggcatgatggtattaatcataagcaggcctcgtttccattagttgcaggccttataggggaaagaacgaggtcctagataacgaatgttccagcaagtcctacgcaatgcagggcacaacagctgtgagttgagcattacgcatgggaaggatggatcttctgaaatcagtgctgaaggaactggaaattggcacacatgacatattgccttctaactcatacaatctgccaccagatgtctcacagttttggtgccgatcggcttcctgcaatggagaatgtgaaaatcgaacctggaatgtagggcagaaaaccactactgaggcaggcggggataaagatggagtaacataggctgggaaatgtctagatctcttgccatactacacatgggagtatgcgttggatcccaatgttctgtagttagtgttgagccttgaggttttagagctgtagtgttggggaaaatgtgagcgggtaacactgatttttaacagctgatgtgctgctccgggcaaattcagtcgggcgttatgctaatgaagattatgtcaaaggaaaatatgaccaagggtgaaaggagatttatgtagttcccttttagttacacatctgattttattttaagcaagtacggatgagggatatccgtggtcaagtttgatgcttcaggttgaggtgaaatttcgttatttggcgactcagtatgcccacctcactgtgtaatctttatatctcaagcgtgtaaaaggatgcccaaaatacaactgtatagatcatcgtggatcactcgatcagctcatatttattctatcaataaaggcaaatataagactaactacattctttata

SEQ ID NO: 5895 - DNA, 527 bp, Zea Mays
cttgctctaaattctaaaataacgcaaacggtaccagcaagcagcaagcctctctccattttcttcgccggcggcaggtgcacacatcggggaatggcgacctacgaccatgccgccaccccgacaccgcagtctccgggcgtcggcggcgtacccttctcgtcctgcatcggcgacctcctccgcttcgtcctctcctcccacgccgccgcctaccccggtgacgacacggtcgctttccccctctcgccctcctactgcgcccgcctcctcaacgacggcgaactgttcgagaagctggaggcctgtattcagcagtgcctcgaggaggggcggctcccggggccgcccgcggtggttgggattccggctgaggaggaggggccggaggagagagggtggaagctgctgctgccggagaaaggcgctgagttgaagcggatgtacgatgctgttgagtttgagctgcatgttcaggaaccctacttcactcaactcagaggcacatgataaggtattgaggtgcg

SEQ ID NO: 5896 - DNA, 1270 bp, Zea Mays
cttgctctaaattctaaaataacgcaaacggtaccagcaagcagcaagcctctctccattttcttcgccggcggcaggtgcacacatcggggaatggcgacctacgaccatgccgccaccccgacaccgcagtctccgggcgtcggcggcgtacccttctcgtcctgcatcggcgacctcctccgcttcgtcctctcctcccacgccgccgcctaccccggtgacgacacggtcgctttccccctctcgccctcctactgcgcccgcctcctcaacgacggcgaactgttcgagaagctggaggcctgtattcagcagtgcctcgaggaggggcggctcccggggccgcccgcggtggttgggattccggctgaggaggaggggccggaggagagagggtggaagctgctgctgccggagaaaggcgctgagttgaagcggatgtacgatgctgttgagtttgagctgcatgttcaggaaccctacttcactcaactcagagccggagtcaagaaggttgaagggagattagcgactggtaactacaaccggattacacaaggttctttgctgctattcaataaatgcctcttgcttaacgttgaggcagttaggaagtacaattcattctctgagatgctgaaaggagagaaaatctcaaatgttcttcctggtatttcatcaattgtagaaggtgtgaaagtatataggaaattctatgcagaggaaaaggagaactcttatggagttttagcgatatcagtttcaaagccaacatctcaaccttacataaccatgaataatatccttgctggattggggtatgatggactgggtagactccttggtatggcgaaaacaactggaactgttccagatggactacctcctccaagatctgcactgctgtcatcttgtatgggactggttcaaccaaatgagtaggaaaggatggtggggcagctttaatgggagtggtaaagataaagtccaccttgatacgccggagtccagagttcgagacttctgtcgtgatctatttcattgttgtgttgcttgtcttcagattcaagcaagaaccaagctgcatctgaaaccattgagtctttgctgcgtgtgtgttgttggatgaatgttcatctgactcaaccctatggtcctgtttttgaaatccgcgtgcatgaaggttatggtgccagatggtctcaagatggttcaaagattagcagttgggggttgttcacttgatatctggtgctgaaagattcca

SEQ ID NO: 5897 - DNA, 1358 bp, Zea Mays
cttgctctaaattctaaaataacgcaaacggtaccagcaagcagcaagcctctctccattttcttcgccggcggcaggtgcacacatcggggaatggcgacctacgaccatgccgccaccccgacaccgcagtctccgggcgtcggcggcgtacccttctcgtcctgcatcggcgacctcctccgcttcgtcctctcctcccacgccgccgcctaccccggtgacgacacggtcgctttccccctctcgccctcctactgcgcccgcctcctcaacgacggcgaactgttcgagaagctggaggcctgtattcagcagtgcctcgaggaggggcggctcccggggccgcccgcggtggttgggattccggctgaggaggaggggccggaggagagagggtggaagctgctgctgccggagaaaggcgctgagttgaagcggatgtacgatgctgttgagtttgagctgcatgttcaggaaccctacttcactcaactcagagccggagtcaagaaggttgaagggagattagcgactggtaactacaaccggattacacaaggttctttgctgctattcaataaatgcctcttgcttaacgttgaggcagttaggaagtacaattcattctctgagatgctgaaaggagagaaaatctcaaatgttcttcctggtatttcatcaattgtagaaggtgtgaaagtatataggaaattctatgcagaggaaaaggagaactcttatggagttttagcgatatcagtttcaaagccaacatctcaaccttacataaccatgaataatatccttgctggattggggtatgatggactgggtagactccttggtatggcgaaaacaactggaactgttccagatggactacctcctccaagatctgcactgctgtcatcttgtatgggactggttcaaccaaatgagtaggaaaggatggtggggcagctttaatgggagtggtaaagataaagtccaccttgatacgccggagtccagagttcgagacttctgtcgtgatctatttcattgttgtgttgcttgtcttcagattcaagcaagaaccaagctgcatctgaaaccattgagtctttgctgcgtgtgtgttgttggatgaatgttcatctgactcaaccctatggtcctgtttttgaaatccgcgtgcatgaaggttatggtgccagatggtctcaagatggttcaaaggatttctaccggggtgtattccttctgccttgatacgtactcatgaatagctaattaatctgttccagagtgtcaggacactgcagtaacttcaggctgcaacaatttttctaagctatgtccgatgatgactcaac

SEQ ID NO: 5898 - DNA, 1389 bp, Zea Mays
cttgctctaaattctaaaataacgcaaacggtaccagcaagcagcaagcctctctccattttcttcgccggcggcaggtgcacacatcggggaatggcgacctacgaccatgccgccaccccgacaccgcagtctccgggcgtcggcggcgtacccttctcgtcctgcatcggcgacctcctccgcttcgtcctctcctcccacgccgccgcctaccccggtgacgacacggtcgctttccccctctcgccctcctactgcgcccgcctcctcaacgacggcgaactgttcgagaagctggaggcctgtattcagcagtgcctcgaggaggggcggctcccggggccgcccgcggtggttgggattccggctgaggaggaggggccggaggagagagggtggaagctgctgctgccggagaaaggcgctgagttgaagcggatgtacgatgctgttgagtttgagctgcatgttcaggaaccctacttcactcaactcagagccggagtcaagaaggttgaagggagattagcgactggtaactacaaccggattacacaaggttctttgctgctattcaataaatgcctcttgcttaacgttgaggcagttaggaagtacaattcattctctgagatgctgaaaggagagaaaatctcaaatgttcttcctggtatttcatcaattgtagaaggtgtgaaagtatataggaaattctatgcagaggaaaaggagaactcttatggagttttagcgatatcagtttcaaagccaacatctcaaccttacataaccatgaataatatccttgctggattggggtatgatggactgggtagactccttggtatggcgaaaacaactggaactgttccagatggactacctcctccaagatctgcactgctgtcatcttgtatgggactggttcaaccaaatttcattggattcttggagccctacaccccagaaggctatgctaagggatggaaacactagcaccagctgcctagtagatcttgatctgtattagcgactctatcagggttcatctgcatatcttctgaaggcctacatgttctgttgaatcgaaagagacgatcatgtgttacgtcagctgcctgcctaagatcatgtgttgcatgaccactgttttatttctgaatatgttctttttttttgcaaggcgtatatcgacaccaagtactgatatatgcgtctgaatatgttctacttttattcaaacacacccgccaagatcagttcatagttttgcacaaagacatgcaaatgcaattggacacaacccaaatagaaaggtattttttgtttcaatccaaactattcctctactgcgactaagtactgatgtcatttctggcatctgac

SEQ ID NO: 5899 - DNA, 1638 bp, Zea Mays
cttgctctaaattctaaaataacgcaaacggtaccagcaagcagcaagcctctctccattttcttcgccggcggcaggtgcacacatcggggaatggcgacctacgaccatgccgccaccccgacaccgcagtctccgggcgtcggcggcgtacccttctcgtcctgcatcggcgacctcctccgcttcgtcctctcctcccacgccgccgcctaccccggtgacgacacggtcgctttccccctctcgccctcctactgcgcccgcctcctcaacgacggcgaactgttcgagaagctggaggcctgtattcagcagtgcctcgaggaggggcggctcccggggccgcccgcggtggttgggattccggctgaggaggaggggccggaggagagagggtggaagctgctgctgccggagaaaggcgctgagttgaagcggatgtacgatgctgttgagtttgagctgcatgttcaggaaccctacttcactcaactcagagccggagtcaagaaggttgaagggagattagcgactggtaactacaaccggattacacaaggttctttgctgctattcaataaatgcctcttgcttaacgttgaggcagttaggaagtacaattcattctctgagatgctgaaaggagagaaaatctcaaatgttcttcctggtatttcatcaattgtagaaggtgtgaaagtatataggaaattctatgcagaggaaaaggagaactcttatggagttttagcgatatcagtttcaaagccaacatctcaaccttacataaccatgaataatatccttgctggattggggtatgatggactgggtagactccttggtatggcgaaaacaactggaactgttccagatggactacctcctccaagatctgcactgctgtcatcttgtatgggactggttcaaccaaatgtgaaaggctgttctttaactgatggtgcgagggcattggccaaacatgttcacaggagtaggaaaggatggtggggcagctttaatgggagtgattcaagcaagaaccaagctgcatctgaaaccattgagtctttgctgcgtgtgtgttgttggatgaatgttcatctgactcaaccctatggtcctgtttttgaaatccgcgtgcatgaaggttatggtgccagatggtctcaagatggttcaaagttcattggattcttggagccctacaccccagaaggctatgctaagggatggaaacactagcaccagctgcctagtagatcttgatctgtattagcgactctatcagggttcatctgcatatcttctgaaggcctacatgttctgttgaatcgaaagagacgatcatgtgttacgtcagctgcctgcctaagatcatgtgttgcatgaccactgttttatttctgaatatgttctttttttttgcaaggcgtatatcgacaccaagtactgatatatgcgtctgaatatgttctacttttattcaaacacacccgccaagatcagttcatagttttgcacaaagacatgcaaatgcaattggacacaacccaaatagaaaggtattttttgtttcaatccaaactattcctctactgcgactaagtactgatgtcatttctggcatctgac

SEQ ID NO: 5900 - DNA, 1720 bp, Zea Mays
cttgctctaaattctaaaataacgcaaacggtaccagcaagcagcaagcctctctccattttcttcgccggcggcaggtgcacacatcggggaatggcgacctacgaccatgccgccaccccgacaccgcagtctccgggcgtcggcggcgtacccttctcgtcctgcatcggcgacctcctccgcttcgtcctctcctcccacgccgccgcctaccccggtgacgacacggtcgctttccccctctcgccctcctactgcgcccgcctcctcaacgacggcgaactgttcgagaagctggaggcctgtattcagcagtgcctcgaggaggggcggctcccggggccgcccgcggtggttgggattccggctgaggaggaggggccggaggagagagggtggaagctgctgctgccggagaaaggcgctgagttgaagcggatgtacgatgctgttgagtttgagctgcatgttcaggaaccctacttcactcaactcagagccggagtcaagaaggttgaagggagattagcgactggtaactacaaccggattacacaaggttctttgctgctattcaataaatgcctcttgcttaacgttgaggcagttaggaagtacaattcattctctgagatgctgaaaggagagaaaatctcaaatgttcttcctggtatttcatcaattgtagaaggtgtgaaagtatataggaaattctatgcagaggaaaaggagaactcttatggagttttagcgatatcagtttcaaagccaacatctcaaccttacataaccatgaataatatccttgctggattggggtatgatggactgggtagactccttggtatggcgaaaacaactggaactgttccagatggactacctcctccaagatctgcactgctgtcatcttgtatgggactggttcaaccaaatgctgttctttaactgatggtgcgagggcattggccaaacatgttcacaggagtaggaaaggatggtggggcagctttaatgggagtggtaaagataaagtccaccttgatacgccggagtccagagttcgagacttctgtcgtgatctatttcattgttgtgttgcttgtcttcagattcaagcaagaaccaagctgcatctgaaaccattgagtctttgctgcgtgtgtgttgttggatgaatgttcatctgactcaaccctatggtcctgtttttgaaatccgcgtgcatgaaggttatggtgccagatggtctcaagatggttcaaagttcattggattcttggagccctacaccccagaaggctatgctaagggatggaaacactagcaccagctgcctagtagatcttgatctgtattagcgactctatcagggttcatctgcatatcttctgaaggcctacatgttctgttgaatcgaaagagacgatcatgtgttacgtcagctgcctgcctaagatcatgtgttgcatgaccactgttttatttctgaatatgttctttttttttgcaaggcgtatatcgacaccaagtactgatatatgcgtctgaatatgttctacttttattcaaacacacccgccaagatcagttcatagttttgcacaaagacatgcaaatgcaattggacacaacccaaatagaaaggtattttttgtttcaatccaaactattcctctactgcgactaagtactgatgtcatttctggcatctgac

SEQ ID NO: 5901 - DNA, 1187 bp, Zea Mays
cagaagccacaaatcaagccggagtcaagaaggttgaagggagattagcgactggtaactacaaccggattacacaaggttctttgctgctattcaataaatgcctcttgcttaacgttgaggcagttaggaagtacaattcattctctgagatgctgaaaggagagaaaatctcaaatgttcttcctggtatttcatcaattgtagaaggtgtgaaagtatataggaaattctatgcagaggaaaaggagaactcttatggagttttagcgatatcagtttcaaagccaacatctcaaccttacataaccatgaataatatccttgctggattggggtatgatggactgggtagactccttggtatggcgaaaacaactggaactgttccagatggactacctcctccaagatctgcactgctgtcatcttgtatgggactggttcaaccaaatgagtaggaaaggatggtggggcagctttaatgggagtggtaaagataaagtccaccttgatacgccggagtccagagttcgagacttctgtcgtgatctatttcattgttgtgttgcttgtcttcagattcaagcaagaaccaagctgcatctgaaaccattgagtctttgctgcgtgtgtgttgttggatgaatgttcatctgactcaaccctatggtcctgtttttgaaatccgcgtgcatgaaggttatggtgccagatggtctcaagatggttcaaagttcattggattcttggagccctacaccccagaaggctatgctaagggatggaaacactagcaccagctgcctagtagatcttgatctgtattagcgactctatcagggttcatctgcatatcttctgaaggcctacatgttctgttgaatcgaaagagacgatcatgtgttacgtcagctgcctgcctaagatcatgtgttgcatgaccactgttttatttctgaatatgttctttttttttgcaaggcgtatatcgacaccaagtactgatatatgcgtctgaatatgttctacttttattcaaacacacccgccaagatcagttcatagttttgcacaaagacatgcaaatgcaattggacacaacccaaatagaaaggtattttttgtttcaatccaaactattcctctactgcgactaagtactgatgtcatttctggcatctgac

SEQ ID NO: 5902 - DNA, 1482 bp, Zea Mays
gaccacaagttctaatcgcggcggcggactcgccccgtccggccgcccctctcagggatgatttggtgattagggatccctaggggatccacgggggaggaattcccttgcaattcaattttgaatagcaagaggatttcttcccctcgggatccccggtcaccaaattagccctcacgctctcgctgtctcgcttcctggccgcgaagctccagttcagtctccgccactcgtgctctcgtagcgtagagcgaggccagggcgggaccagcgtggccggcgagaggggatggcgggctcggccgcgtactctgcttccgctaccaccgtggtggcgatggccaagggcaacggcaacagcaagggcgtcagaggcggcggctccgcgggcaccaacaaggtgacacgacctcctaggattacatctaatgttaagcagaacttgaggattctaaaattttggaaggaatttgaaaggaggcaaacaagtggacctcagcctgctactaggtaccgcaaaaagaaagtaataaaagaagtgcttcctgatgacacagacttctacgaggatccttcttccactcttcacttgtcaggacaaatgagggtttggaaattgcttcaccagttattctcgtggatggctacaatgtatgtggttactggggaaagcttaagaaggatttcatgaatgggagacaagaaattgctagacaaacactcattgatgagctggtatctttcagtgcagtaagagaggtaaaagttgtagtggtatttgatgctgccaattcagggctttccacacataaggaaacatataaaggggtcgatgttgtatattctgccgacttatctgctgattcttggattgagaaggaggttgaagctttggtggcagatggctgcccaaaagtgtgggtagtaacatccgatgcactggagcaacaattagctcatggagaaggtgctcttatctggagctctaaaagattggtcaaagagctaaaggaatcggagaaggaactcgatctagaactgaaggaaaccaggtcgacatcgttgcaaggaaaactcctgcagcacaagctgaacccaaaggttgtgcgcgcactgaaaggtcttaggaacaagcttgaagaacaagagcggggaaagaagtgaacaggaaccactggttgacaggaaagagagcaggtgtacagaagtggcgtttgtgcggccgacggacatcaactaacactggaggctggatccactgaaagtttgatgcgaacatcatgtaaatggatctggcttccttttgggtgcagtcagtttggtgtaggcaccatcagagccctgtgaaaaatagaagcactcacgcatggtagcagcttgttattgttgttagctgctgacgctttgaggcatgtcaacaagtagagatggattgcaaatcctaatcaatgtatattactttgtgtgtgttgttattgcgat

SEQ ID NO: 5903 - DNA, 625 bp, Zea Mays
ttggaatcgcacatcagaagcattggttgaagctttggtggcagatggctgcccaaaagtgtgggtagtaacatccgatgcactggagcaacaattagctcatggagaaggtgctcttatctggagctctaaaagattggtcaaagagctaaaggaatcggagaaggaactcgatctagaactgaaggaaaccaggtcgacatcgttgcaaggaaaactcctgcagcacaagctgaacccaaaggttgtgcgcgcactgaaaggtcttaggaacaagcttgaagaacaagagcggggaaagaagtgaacaggaaccactggttgacaggaaagagagcaggtgtacagaagtggcgtttgtgcggccgacggacatcaactaacactggaggctggatccactgaaagtttgatgcgaacatcatgtaaatggatctggcttccttttgggtgcagtcagtttggtgtaggcaccatcagagccctgtgaaaaatagaagcactcacgcatggtagcagcttgttattgttgttagctgctgacgctttgaggcatgtcaacaagtagagatggattgcaaatcctaatcaatgtatattactttgtgtgtgttgttattgcgat

SEQ ID NO: 5904 - DNA, 1287 bp, Zea Mays
ctttctttattcgtcgctacccgtcttccaggctcctcccgcggcgcgcctgagtttcgccctcgcagcgcaccccgcacgtacttcctcctcatcttcggacccggcggcatgcgctccttcagttgcgctgccataggtacgcggcggcgtggaaatactgtgctgcaccacgcgccatgcgcgagctcctccttcaaccagggcggcgcatggaaaaggatgtggccacagtcgaggccgcagtcgcggtaccggggcggcaactggacgtgcgggtggccacgctcgtcaggatgctcatttccaagggcagggccgcgatgcttgccgaggccctggacgagttcgacgccatctgcatccgcctgctgccactgcgtgtgcccttatattagtttgtgtttgctacaaatagttcctagtgtcttgttcgtgtattctctcctgcgaatcgtgctgactacagctacagaaaggcacttttcccaatccagagtttcaatttttgactatcttctgaaagcaattttcccgtttcgcctgatgtagactaattgctgaatatgttaccgacgatcattaggcttaataatattgattaattaattttaagcttttccgtaaaacatcatatctagaaaaaatgaatcttctccacgaagcaacatatctgaaaaatgaaataataaattaagttgtcatgtgatctgatattatatctttaattatcttatactactaaatctttgtgcaggaagatactcggagcggtgccaaattcatcacacatcaatgagatggactcagactgattctctcctcatgctcttccatctcagatgagagctcccaccactttgtgtaatgagcgtctgtttttttctgtctctgtatgctcctacaagcaaagggtcaaatttccagcaatattttggcattacaataggtgggtcattgtgacaattatgcatgaagggaatttaggccctgttctaatctcgcgagataaactttagtagctttttttagctacttttagccatttgtaatctaaacaagagagctaatggtgataattaaagttaaactttagcacttcaattcatatagttaaagtttagcaggaagctaaagtttatcccgtgagattgaaacggggccttatttattctacttatagcagatcgaattgagaggaaactacaattttggtaacatttctggatatggccagacctaaagtttgacaagcctgagtagaaatagataagacccttagttgtt

SEQ ID NO: 5905 - DNA, 1009 bp, Zea Mays
ctttctttattcgtcgctacccgtcttccaggctcctcccgcggcgcgcctgagtttcgccctcgcagcgcaccccgcacgtacttcctcctcatcttcggacccggcggcatgcgctccttcagttgcgctgccataggtacgcggcggcgtggaaatactgtgctgcaccacgcgccatgcgcgagctcctccttcaaccagggcggcgcatggaaaaggatgtggccacagtcgaggccgcagtcgcggtaccggggcggcaactggacgtgcgggtggccacgctcgtcaggatgctcatttccaagggcagggccgcgatgcttgccgaggccctggacgagttcgacgccatctgcatccgcctgctgccactgcgtgtgcccttatattagtttgtgtttgctacaaatagttcctagtgtcttgttcgtgtattctctcctgcgaatcgtgctgactacagctacagaaaggaagatactcggagcggtgccaaattcatcacacatcaatgagatggactcagactgattctctcctcatgctcttccatctcagatgagagctcccaccactttgtgtaatgagcgtctgtttttttctgtctctgtatgctcctacaagcaaagggtcaaatttccagcaatattttggcattacaataggtgggtcattgtgacaattatgcatgaagggaatttaggccctgttctaatctcgcgagataaactttagtagctttttttagctacttttagccatttgtaatctaaacaagagagctaatggtgataattaaagttaaactttagcacttcaattcatatagttaaagtttagcaggaagctaaagtttatcccgtgagattgaaacggggccttatttattctacttatagcagatcgaattgagaggaaactacaattttggtaacatttctggatatggccagacctaaagtttgacaagcctgagtagaaatagataagacccttagttgtt

SEQ ID NO: 5906 - DNA, 786 bp, Zea Mays
ttgcgctgccataggtacgcggcggcgtggaaatactgtgctgcaccacgcgccatgcgcgagctcctccttcaaccagggcggcgcatggaaaaggatgtggccacagtcgaggccgcagtcgcggtaccggggcggcaactggacgtgcgggtggccacgctcgtcaggatgctcatttccaagggcagggccgcgatgcttgccgaggccctggacgagttcgacgccatctgcatccgcctgctgccactgcgaagatactcggagcggtgccaaattcatcacacatcaatgagatggactcagactgattctctcctcatgctcttccatctcagatgagagctcccaccactttgtgtaatgagcgtctgtttttttctgtctctgtatgctcctacaagcaaagggtcaaatttccagcaatattttggcattacaataggtgggtcattgtgacaattatgcatgaagggaatttaggccctgttctaatctcgcgagataaactttagtagctttttttagctacttttagccatttgtaatctaaacaagagagctaatggtgataattaaagttaaactttagcacttcaattcatatagttaaagtttagcaggaagctaaagtttatcccgtgagattgaaacggggccttatttattctacttatagcagatcgaattgagaggaaactacaattttggtaacatttctggatatggccagacctaaagtttgacaagcctgagtagaaatagataagacccttagttgtt

SEQ ID NO: 5907 - DNA, 357 bp, Zea Mays
cccttctcgaccttcaagctcgtgtcggtgcgggcggcatcgggttccccgcggccgatcgatcctacctcggcaggcagcacatccccaccaaaggggtcgtgggcatcgacgacgtggacagcgaggcctacgtctcgcagttcttcgtcgatggctcgttgttcatcgctggattttggaagcgcgtcagagtctacgacgccgagaaaggatggaagacccattaggatataagctgcaaaagtgtgcactagatggttcctgacacgcccggatttaagggcaaacctgggtggtctcaaatgtgtactaggatcaagtctcacacatatgataactcatgttacataaaac

SEQ ID NO: 5908 - DNA, 1864 bp, Zea Mays
gcccgcaacaccgatgcgccgccgccccctggccctagcgcctcgcgccgtcgctccatggccggtggccctagcgccccgcgccgccgctctgtggccgatggccctagccctaggcgccgccgctccgtgggccgtggccctatcgatcatgccggagcaccgcccaccggctagctggcagcccgcagccgccacggcaccacgcgtccgactcccacgtggccatgcctcgtcctccgtgctcgcctagccgctagcagcctagcgcgacagtcggcagtcatgaaaaccttttgatttcgccaggagacaaacatggtacatcccttcgtgaggatgtgaatattgaggaggaacccacaatcaaagaagatcatatattgaatgtgtcacatatagacggtcataaaaaccttttgatttcgccaggagacaaatatgctacattccctcatgaggatgtgaatattgtggaggaacccacaagtaaataagatcgtatattgaatgtgtcacacacaaaggggtacatttatcagctattccaaattttaaataataaaataaatcaatttctacttttattacctgaaattaatttctatttgtttaagttagtgatatgtgtttaatttgcatttgcagtcataaaacctttttacagtttatggctgaaaatgatatgtctactggtgttatcttatatgatgacgtaaaggattgtatgataacagttattgtaagagaaatgagtgtagactttctaaattacatttttaataaattcgagagaggaaagtgttggagtgatggctgagaattaagtgatatggaaatggaagttgaagcaagaagaaagtttgtcattaccaaggaggctgacgcagatcttactgttgaagatgacacacaaaatatatttgttcatcttggttttctggtaccgtattataaaaaaggaaactcaatccagcattttttgattccttcggaaaagatatattatacttttctgatcttaagaatttttcaataaaatggaaaaggtttgtcaaactcattagatcagcgttagctttgaaagcgcctttggtcagattaaccttaatctgtgagatgtctacaattatcgtattgcagctttaattatctaattctgcatattattaagtattataaaaaaatgtcaagattgacgtgcttcagtaaaatgggttatgccacacagacaggtctaccactacaggaacaatatctctttaaggtatttttatgataagtggtgttgtaacttatgacacgtaatgtggtatttaagaaacttcgttaagcatgtcctgacctacgtaaaagagtagaggaaatgctgaaggaagtttcttcaataccacattacgtgccataagttacaacaccacttatcataggaatacattaaagagatattgttcctgtagtggtagacctgtccgtgtggcataacccattttattgaagcacgccaatattgacattttttgataacacttgatgatatgcagaattagataatttaagctgcaatgcgataactgtggacatctcacagattaaggtcgatctgatcaaagacgcttttaaagctaacactgatctaatgagtttgacaaacattttccattttattagaaatttcttaaaatcatgaaagtataagatattttttctcaaggaataaaaaaatgctagaattgagttttctttcttataatacggtaccaggagaccaagataaacaaataaattttgtgtgccctcttcaacagtaagatctgcgtcagcctacttggtaatgacaaactttcttcctgcctcaatttct

SEQ ID NO: 5909 - DNA, 1828 bp, Zea Mays
gcccgcaacaccgatgcgccgccgccccctggccctagcgcctcgcgccgtcgctccatggccggtggccctagcgccccgcgccgccgctctgtggccgatggccctagccctaggcgccgccgctccgtgggccgtggccctatcgatcatgccggagcaccgcccaccggctagctggcagcccgcagccgccacggcaccacgcgtccgactcccacgtggccatgcctcgtcctccgtgctcgcctagccgctagcagcctagcgcgacagtcggcagtcatgaaaaacttttgatttcgccaggagacaaacatgctacataccctcataagaatatgaatattgaggaggaacccacaaacaaagaagatcatatattgaatgtgtcacatacagaaggtcatgaaaaccttttgatttcgccaggagacaaacatggtacatcccttcgtgaggatgtgaatattgaggaggaacccacaatcaaagaagatcatatattgaatgtgtcacatatagacggtcataaaaaccttttgatttcgccaggagacaaatatgctacattccctcatgaggatgtgaatattgtggaggaacccacaatcataaaacctttttacagtttatggctgaaaatgatatgtctactggtgttatcttatatgatgacgtaaaggattgtatgataacagttattgtaagagaaatgagtgtagactttctaaattacatttttaataaattcgagagaggaaagtgttggagtgatggctgagaattaagtgatatggaaatggaagttgaagcaagaagaaagtttgtcattaccaaggaggctgacgcagatcttactgttgaagatgacacacaaaatatatttgttcatcttggttttctggtaccgtattataaaaaaggaaactcaatccagcattttttgattccttcggaaaagatatattatacttttctgatcttaagaatttttcaataaaatggaaaaggtttgtcaaactcattagatcagcgttagctttgaaagcgcctttggtcagattaaccttaatctgtgagatgtctacaattatcgtattgcagctttaattatctaattctgcatattattaagtattataaaaaaatgtcaagattgacgtgcttcagtaaaatgggttatgccacacagacaggtctaccactacaggaacaatatctctttaaggtatttttatgataagtggtgttgtaacttatgacacgtaatgtggtatttaagaaacttcgttaagcatgtcctgacctacgtaaaagagtagaggaaatgctgaaggaagtttcttcaataccacattacgtgccataagttacaacaccacttatcataggaatacattaaagagatattgttcctgtagtggtagacctgtccgtgtggcataacccattttattgaagcacgccaatattgacattttttgataacacttgatgatatgcagaattagataatttaagctgcaatgcgataactgtggacatctcacagattaaggtcgatctgatcaaagacgcttttaaagctaacactgatctaatgagtttgacaaacattttccattttattagaaatttcttaaaatcatgaaagtataagatattttttctcaaggaataaaaaaatgctagaattgagttttctttcttataatacggtaccaggagaccaagataaacaaataaattttgtgtgccctcttcaacagtaagatctgcgtcagcctacttggtaatgacaaactttcttcctgcctcaatttct

SEQ ID NO: 5910 - DNA, 1802 bp, Zea Mays
gcccgcaacaccgatgcgccgccgccccctggccctagcgcctcgcgccgtcgctccatggccggtggccctagcgccccgcgccgccgctctgtggccgatggccctagccctaggcgccgccgctccgtgggccgtggccctatcgatcatgccggagcaccgcccaccggctagctggcagcccgcagccgccacggcaccacgcgtccgactcccacgtggccatgcctcgtcctccgtgctcgcctagccgctagcagcctagcgcgacagtcggcaggagacaaacatgctacataccctcataagaatatgaatattgaggaggaacccacaaacaaagaagatcatatattgaatgtgtcacatacagaaggtcatgaaaaccttttgatttcgccaggagacaaacatggtacatcccttcgtgaggatgtgaatattgaggaggaacccacaatcaaagaagatcatatattgaatgtgtcacatatagacggtcataaaaaccttttgatttcgccaggagacaaatatgctacattccctcatgaggatgtgaatattgtggaggaacccacaatcataaaacctttttacagtttatggctgaaaatgatatgtctactggtgttatcttatatgatgacgtaaaggattgtatgataacagttattgtaagagaaatgagtgtagactttctaaattacatttttaataaattcgagagaggaaagtgttggagtgatggctgagaattaagtgatatggaaatggaagttgaagcaagaagaaagtttgtcattaccaaggaggctgacgcagatcttactgttgaagatgacacacaaaatatatttgttcatcttggttttctggtaccgtattataaaaaaggaaactcaatccagcattttttgattccttcggaaaagatatattatacttttctgatcttaagaatttttcaataaaatggaaaaggtttgtcaaactcattagatcagcgttagctttgaaagcgcctttggtcagattaaccttaatctgtgagatgtctacaattatcgtattgcagctttaattatctaattctgcatattattaagtattataaaaaaatgtcaagattgacgtgcttcagtaaaatgggttatgccacacagacaggtctaccactacaggaacaatatctctttaaggtatttttatgataagtggtgttgtaacttatgacacgtaatgtggtatttaagaaacttcgttaagcatgtcctgacctacgtaaaagagtagaggaaatgctgaaggaagtttcttcaataccacattacgtgccataagttacaacaccacttatcataggaatacattaaagagatattgttcctgtagtggtagacctgtccgtgtggcataacccattttattgaagcacgccaatattgacattttttgataacacttgatgatatgcagaattagataatttaagctgcaatgcgataactgtggacatctcacagattaaggtcgatctgatcaaagacgcttttaaagctaacactgatctaatgagtttgacaaacattttccattttattagaaatttcttaaaatcatgaaagtataagatattttttctcaaggaataaaaaaatgctagaattgagttttctttcttataatacggtaccaggagaccaagataaacaaataaattttgtgtgccctcttcaacagtaagatctgcgtcagcctacttggtaatgacaaactttcttcctgcctcaatttct

SEQ ID NO: 5911 - DNA, 1802 bp, Zea Mays
gcccgcaacaccgatgcgccgccgccccctggccctagcgcctcgcgccgtcgctccatggccggtggccctagcgccccgcgccgccgctctgtggccgatggccctagccctaggcgccgccgctccgtgggccgtggccctatcgatcatgccggagcaccgcccaccggctagctggcagcccgcagccgccacggcaccacgcgtccgactcccacgtggccatgcctcgtcctccgtgctcgcctagccgctagcagcctagcgcgacagtcggcagtcatgaaaaacttttgatttcgccaggagacaaacatgctacataccctcataagaatatgaatattgaggaggaacccacaaacaaagaagatcatatattgaatgtgtcacatacagaagggagacaaacatggtacatcccttcgtgaggatgtgaatattgaggaggaacccacaatcaaagaagatcatatattgaatgtgtcacatatagacggtcataaaaaccttttgatttcgccaggagacaaatatgctacattccctcatgaggatgtgaatattgtggaggaacccacaatcataaaacctttttacagtttatggctgaaaatgatatgtctactggtgttatcttatatgatgacgtaaaggattgtatgataacagttattgtaagagaaatgagtgtagactttctaaattacatttttaataaattcgagagaggaaagtgttggagtgatggctgagaattaagtgatatggaaatggaagttgaagcaagaagaaagtttgtcattaccaaggaggctgacgcagatcttactgttgaagatgacacacaaaatatatttgttcatcttggttttctggtaccgtattataaaaaaggaaactcaatccagcattttttgattccttcggaaaagatatattatacttttctgatcttaagaatttttcaataaaatggaaaaggtttgtcaaactcattagatcagcgttagctttgaaagcgcctttggtcagattaaccttaatctgtgagatgtctacaattatcgtattgcagctttaattatctaattctgcatattattaagtattataaaaaaatgtcaagattgacgtgcttcagtaaaatgggttatgccacacagacaggtctaccactacaggaacaatatctctttaaggtatttttatgataagtggtgttgtaacttatgacacgtaatgtggtatttaagaaacttcgttaagcatgtcctgacctacgtaaaagagtagaggaaatgctgaaggaagtttcttcaataccacattacgtgccataagttacaacaccacttatcataggaatacattaaagagatattgttcctgtagtggtagacctgtccgtgtggcataacccattttattgaagcacgccaatattgacattttttgataacacttgatgatatgcagaattagataatttaagctgcaatgcgataactgtggacatctcacagattaaggtcgatctgatcaaagacgcttttaaagctaacactgatctaatgagtttgacaaacattttccattttattagaaatttcttaaaatcatgaaagtataagatattttttctcaaggaataaaaaaatgctagaattgagttttctttcttataatacggtaccaggagaccaagataaacaaataaattttgtgtgccctcttcaacagtaagatctgcgtcagcctacttggtaatgacaaactttcttcctgcctcaatttct

SEQ ID NO: 5912 - DNA, 2055 bp, Zea Mays
gcccgcaacaccgatgcgccgccgccccctggccctagcgcctcgcgccgtcgctccatggccggtggccctagcgccccgcgccgccgctctgtggccgatggccctagccctaggcgccgccgctccgtgggccgtggccctatcgatcatgccggagcaccgcccaccggctagctggcagcccgcagccgccacggcaccacgcgtccgactcccacgtggccatgcctcgtcctccgtgctcgcctagccgctagcagcctagcgcgacagtcggcagtcatgaaaaacttttgatttcgccaggagacaaacatgctacataccctcataagaatatgaatattgaggaggaacccacaaacaaagaagatcatatattgaatgtgtcacatacagaagggagacaaacatggtacatcccttcgtgaggatgtgaatattgaggaggaacccacaatcaaagaagatcatatattgaatgtgtcacatatagacgggctgtggaggatcgatcacaacataagaaccgagcgtctgctttatctcggcttcgaaccctgattgctcttaaagttaggaggccgataaacctggaagactacactccacctgttgagcttcttcagatattacccctgaagtccagcgttagaggaaatgatgttggcccccaaatcggtccaaataactcaaaattttctccaggaatgcaagcattattagacctgctgtttgctgttgaagattctgtatcagatgcagcaaagattttaggcctaagcaccggtgctttgtcaagattgattctgtcagatgattctctccgaacggccgcgaatgaactgcgagcttcgaagggcaccggtgctgtactacgtgctcctgacgttgcaggacagcgtgcacaaggtcttctacgccgtcgtcgaggccgctgcagttcgcgcagacaacagccatcttggagggttggcgaggtatccggtctctgcaactcttccacagattggatccagattattccttacatggggtgtcttctggagttttcctgaggtgattgactgactcgagaatttgccgacgcttgaagaaggacctaatgtgagcttttacatacttgatgaacagcttgagctcttgagcaaggtgctgaatgcaggggatgacatgattggtgttgagtgcttagaagaagattgtgatggcaaggttctatttgtttgaggttgcttcaccattccccaaagcacattgcatcttgttttagtgtttttttgattgccgtcgtcgaggccgctgcagttcgcgcagacaacagccatcttggaggtatctaattccaatattgtatgtctcggttgaacttgtgaaggcgttgcaagcacatatcattaactgggatattcatatgtttgatgaggagatcggcaataccactcagggtggcaagtttgaccatgcagatcgtttgttccaaagcattgagaacgcttacataaatagcttatcaaatacaagtgacgtcaaagagcttattccagaattcttttacatgcccgagtttcttgaaaattcaaattcatatcatcttggtgtcaagcaggatggggaacctataggcgatgttgctctccctccatgggcaaaggatgataactcaagtgacgagtttgacaaagattctattgagagtgatgatagatctcttgaagagctaagctgggagacactagaacttcttgtggtacctcatatattcagcatcagacgaagcacatggagatcaaccttcacttcgtccgtgagcgtgtcgccgacggtgatgttcgcattctcagcatcccgaccacttcgtagtttgccgacattttcaccaaggggctgccgtcgagtgtattcactgagtttcgatctagtctcaacatctgtacaggatagaattgagactgtaggaggtgttagactcctgctaagggttaggcctgggccttcttgtatttacctgattacccctatgtaatgggcttggcccacctaactgccata

SEQ ID NO: 5913 - DNA, 2200 bp, Zea Mays
gcccgcaacaccgatgcgccgccgccccctggccctagcgcctcgcgccgtcgctccatggccggtggccctagcgccccgcgccgccgctctgtggccgatggccctagccctaggcgccgccgctccgtgggccgtggccctatcgatcatgccggagcaccgcccaccggctagctggcagcccgcagccgccacggcaccacgcgtccgactcccacgtggccatgcctcgtcctccgtgctcgcctagccgctagcagcctagcgcgacagtcgtcatgaaaaacttttgatttcgccaggagacaaacatgctacataccctcataagaatatgaatattgaggaggaacccacaaacaaagaagatcatatattgaatgtgtcacatacagaaggtcatgaaaaccttttgatttcgccaggagacaaacatggtacatcccttcgtgaggatgtgaatattgaggaggaacccacaatcaaagaagatcatatattgaatgtgtcacatatagacggtcataaaaaccttttgatttcgccaggagacaaatatgctacattccctcatgaggatgtgaatattgtggaggaacccacaagtaaataagatcgtatattgaatgtgtcacacacaaaggggctgtggaggatcgatcacaacataagaaccgagcgtctgctttatctcggcttcgaaccctgattgctcttaaagttaggaggccgataaacctggaagactacactccacctgttgagcttcttcagatattacccctgaagtccagcgttagaggaaatgatgttggcccccaaatcggtccaaataactcaaaattttctccaggaatgcaagcattattagacctgctgtttgctgttgaagattctgtatcagatgcagcaaagattttaggcctaagcaccggtgctttgtcaagattgattctgtcagatgattctctccgaacggccgcgaatgaactgcgagcttcgaagggcaccggtgctgtactacgtgctcctgacgttgcaggacagcgtgcacaaggtcttctacgccgtcgtcgaggccgctgcagttcgcgcagacaacagccatcttggagggttggcgaggtatccggtctctgcaactcttccacagattggatccagattattccttacatggggtgtcttctggagttttcctgaggtgattgactgactcgagaatttgccgacgcttgaagaaggacctaatgtgagcttttacatacttgatgaacagcttgagctcttgagcaaggtgctgaatgcaggggatgacatgattggtgttgagtgcttagaagaagattgtgatggcaaggttctatttgtttgaggttgcttcaccattccccaaagcacattgcatcttgttttagtgtttttttgattgccgtcgtcgaggccgctgcagttcgcgcagacaacagccatcttggaggtatctaattccaatattgtatgtctcggttgaacttgtgaaggcgttgcaagcacatatcattaactgggatattcatatgtttgatgaggagatcggcaataccactcagggtggcaagtttgaccatgcagatcgtttgttccaaagcattgagaacgcttacataaatagcttatcaaatacaagtgacgtcaaagagcttattccagaattcttttacatgcccgagtttcttgaaaattcaaattcatatcatcttggtgtcaagcaggatggggaacctataggcgatgttgctctccctccatgggcaaaggatgataactcaagtgacgagtttgacaaagattctattgagagtgatgatagatctcttgaagagctaagctgggagacactagaacttcttgtggtacctcatatattcagcatcagacgaagcacatggagatcaaccttcacttcgtccgtgagcgtgtcgccgacggtgatgttcgcattctcagcatcccgaccacttcgtagtttgccgacattttcaccaaggggctgccgtcgagtgtattcactgagtttcgatctagtctcaacatctgtacaggatagaattgagactgtaggaggtgttagactcctgctaagggttaggcctgggccttcttgtatttacctgattacccctatgtaatgggcttggcccacctaactgccata

SEQ ID NO: 5914 - DNA, 3405 bp, Zea Mays
gcccgcaacaccgatgcgccgccgccccctggccctagcgcctcgcgccgtcgctccatggccggtggccctagcgccccgcgccgccgctctgtggccgatggccctagccctaggcgccgccgctccgtgggccgtggccctatcgatcatgccggagcaccgcccaccggctagctggcagcccgcagccgccacggcaccacgcgtccgactcccacgtggccatgcctcgtcctccgtgctcgcctagccgctagcagcctagcgcgacagtcggcagtcatgaaaaacttttgatttcgccaggagacaaacatgctacataccctcataagaatatgaatattgaggaggaacccacaaacaaagaagatcatatattgaatgtgtcacatacagaaggtcatgaaaaccttttgatttcgccaggagacaaacatggtacatcccttcgtgaggatgtgaatattgaggaggaacccacaatcaaagaagatcatatattgaatgtgtcacatatagacggtcataaaaaccttttgatttcgccaggagacaaatatgctacattccctcatgaggatgtgaatattgtggaggaacccacaagtaaataagatcgtatattgaatgtgtcacacacaaaggggctgtggaggatcgatcacaacataagaaccgagcgtctgctttatctcggcttcgaaccctgattgctcttaaagttaggaggccgataaacctggaagactacactccacctgttgagcttcttcagatattacccctgaagtccagcgttagaggaaatgatgttggcccccaaatcggtccaaataactcaaaattttctccaggaatgcaagcattattagacctgctgtttgctgttgaagattctgtatcagatgcagcaaagattttaggcctaagcaccggtgctttgtcaagattgattctgtcagatgattctctccgaacggccgcgaatgaactgcgagcttcgaagggcaccggtgctgtactacgtgctcctgacgttgcaggacagcgtgcacaaggtcttctacgccgtcgtcgaggccgctgcagttcgcgcagacaacagccatcttggagggttggcgaggtatccggtctctgcaactcttccacagattggatccagattattccttacatggggtgtcttctggagttttcctgaggtgattgactgactcgagaatttgccgacgcttgaagaaggacctaatgtgagcttttacatacttgatgaacagcttgagctcttgagcaaggtgctgaatgcaggggatgacatgattggtgttgagtgcttagaagaagattgtgatggcaaggttctatttgtttgaggttgcttcaccattccccaaagcacattgcatcttgttttagtgtttttttgattgccgtcgtcgaggccgctgcagttcgcgcagacaacagccatcttggaggtatctaattccaatattgtatgtctcggttgaacttgtgaaggcgttgcaagcacatatcattaactgggatattcatatgtttgatgaggagatcggcaataccactcagggtggcaagtttgaccatgcagatcgtttgttccaaagcattgagaacgcttacataaatagcttatcaaatacaagtgacgtcaaagagcttattccagaattcttttacatgcccgagtttcttgaaaattcaaattcatatcatcttggtgtcaagcaggatggggaacctataggcgatgttgctctccctccatgggcaaaggatgataactcaagtgacgagtttgacaaagattctattgagagtgatgatagatctcttgaagagctaagctgggagacactagaacttcttgtggtacctcatatattcagataattgggcaacggtgtgtgtatatgttcagattcagaaagtgaggacaatatagcgtttgcagcagtggtcgtcgccctgtgcagggagggcctgctgatcagagatcaagagggaaagcagaagacacgttgtgccgggaggaaacacacgacgaagtagagacttagaagcaataagctaaatatttagacaactttaattcgagcactccaagaggtgtctcaaacaactggttaattcgttttatgaccaaaagaggaaaaatggccatctaatagttttgtaaaacaactccctaaagataagcacttgcttaatctccccctcaactcgccaacatgtgtgtgccttctgcgcttgctatttgcttgggtagttttgtaaaacaactccctaaagataagcacttgcataatctccccctcaactcgccaacatgtgtgccttctgcgcttgctatttgcttgggtgcccctcctctggttgtacctgcaccctcctgtccatctcgggaatatatcaaatacaaaccacgttttggtgcaaaccctgtgtaaacctactaaaaaaagtttcaaaaaattctaaaaaaaaacatgaatgtacatctcagcttacctcatctatatacaaaattttatgatcaaattcatcttactctagcagttacaaaaaagacaaattttggtgcatttgaactattaccgtttatcagaaattttgtcttttttgtaactgctaaagtaagatgaatttgaccatgaaattttgtatatggatgaggtaagctgagatgtacattcatgtctttttttagaattttttaaaactttttttagtaggtttacatagggtttgcacaaaaacttggtttgcattcgatatgtttccatccatcttctcctcctgctcgattttttttttgagtttttggaagctaccctcctatctctttccttaaaaccgcaacccctttccctccgcgccctcacttcacggctgccaagaagtcttcaacgcccgacgcgtggccgcacagggcgaggtctcgctcgatggccaggcttggccttcgtgccaccacccacccacgcttcctcaccaccgtggagatggatgtgtcgctgctgtggtggccctagcttctgcgtgggcccacgtgtagatgccgctggagaagatttattagggcgttcgatggtagcctcctcgccccagtacgctgacgtgcgcctcaacactgcccccacgtcccagcagcagcactaagggctagtttgggagccaaaaaactgaaggggttttatggctcccaaactagtcctaagacactaacgtcagcgtgttgctcccctcgtcgaccatgtgggtacgttccccatttgttttctccttccttgtcctcgccgttccccatttcgcatttctacatccgtacctcggcatttcccctaagtctgccttcctctgtcgacccgtcgg

SEQ ID NO: 5915 - DNA, 3479 bp, Zea Mays
gcccgcaacaccgatgcgccgccgccccctggccctagcgcctcgcgccgtcgctccatggccggtggccctagcgccccgcgccgccgctctgtggccgatggccctagccctaggcgccgccgctccgtgggccgtggccctatcgatcatgccggagcaccgcccaccggctagctggcagcccgcagccgccacggcaccacgcgtccgactcccacgtggccatgcctcgtcctccgtgctcgcctagccgctagcagcctagcgcgacagtcggcagtcatgaaaaacttttgatttcgccaggagacaaacatgctacataccctcataagaatatgaatattgaggaggaacccacaaacaaagaagatcatatattgaatgtgtcacatacagaaggtcatgaaaaccttttgatttcgccaggagacaaacatggtacatcccttcgtgaggatgtgaatattgaggaggaacccacaatcaaagaagatcatatattgaatgtgtcacatatagacggtcataaaaaccttttgatttcgccaggagacaaatatgctacattccctcatgaggatgtgaatattgtggaggaacccacaagtaaataagatcgtatattgaatgtgtcacacacaaaggggctgtggaggatcgatcacaacataagaaccgagcgtctgctttatctcggcttcgaaccctgattgctcttaaagttaggaggccgataaacctggaagactacactccacctgttgagcttcttcagatattacccctgaagtccagcgttagaggaaatgatgttggcccccaaatcggtccaaataactcaaaattttctccaggaatgcaagcattattagacctgctgtttgctgttgaagattctgtatcagatgcagcaaagattttaggcctaagcaccggtgctttgtcaagattgattctgtcagatgattctctccgaacggccgcgaatgaactgcgagcttcgaagggcaccggtgctgtactacgtgctcctgacgttgcaggacagcgtgcacaaggtcttctacgccgtcgtcgaggccgctgcagttcgcgcagacaacagccatcttggagggttggcgaggtatccggtctctgcaactcttccacagattggatccagattattccttacatggggtgtcttctggagttttcctgaggtgattgactgactcgagaatttgccgacgcttgaagaaggacctaatgtgagcttttacatacttgatgaacagcttgagctcttgagcaaggtgctgaatgcaggggatgacatgattggtgttgagtgcttagaagaagattgtgatggcaaggttctatttgtttgaggttgcttcaccattccccaaagcacattgcatcttgttttagtgtttttttgattgccgtcgtcgaggccgctgcagttcgcgcagacaacagccatcttggaggtatctaattccaatattgtatgtctcggttgaacttgtgaaggcgttgcaagcacatatcattaactgggatattcatatgtttgatgaggagatcggcaataccactcagggtggcaagtttgaccatgcagatcgtttgttccaaagcattgagaacgcttacataaatagcttatcaaatacaagtgacgtcaaagagcttattccagaattcttttacatgcccgagtttcttgaaaattcaaattcatatcatcttggtgtcaagcaggatggggaacctataggcgatgttgctctccctccatgggcaaaggatgataactcaagtgacgagtttgacaaagattctattgagagtgatgatagatctcttgaagagctaagctgggagacactagaacttcttgtggtacctcatatattcaggtatccaagctctgtgctaccgattaattgctgaaaactgaacttgggttcatgttaaatattcccaaggaaatataattgggcaacggtgtgtgtatatgttcagattcagaaagtgaggacaatatagcgtttgcagcagtggtcgtcgccctgtgcagggagggcctgctgatcagagatcaagagggaaagcagaagacacgttgtgccgggaggaaacacacgacgaagtagagacttagaagcaataagctaaatatttagacaactttaattcgagcactccaagaggtgtctcaaacaactggttaattcgttttatgaccaaaagaggaaaaatggccatctaatagttttgtaaaacaactccctaaagataagcacttgcttaatctccccctcaactcgccaacatgtgtgtgccttctgcgcttgctatttgcttgggtagttttgtaaaacaactccctaaagataagcacttgcataatctccccctcaactcgccaacatgtgtgccttctgcgcttgctatttgcttgggtgcccctcctctggttgtacctgcaccctcctgtccatctcgggaatatatcaaatacaaaccacgttttggtgcaaaccctgtgtaaacctactaaaaaaagtttcaaaaaattctaaaaaaaaacatgaatgtacatctcagcttacctcatctatatacaaaattttatgatcaaattcatcttactctagcagttacaaaaaagacaaattttggtgcatttgaactattaccgtttatcagaaattttgtcttttttgtaactgctaaagtaagatgaatttgaccatgaaattttgtatatggatgaggtaagctgagatgtacattcatgtctttttttagaattttttaaaactttttttagtaggtttacatagggtttgcacaaaaacttggtttgcattcgatatgtttccatccatcttctcctcctgctcgattttttttttgagtttttggaagctaccctcctatctctttccttaaaaccgcaacccctttccctccgcgccctcacttcacggctgccaagaagtcttcaacgcccgacgcgtggccgcacagggcgaggtctcgctcgatggccaggcttggccttcgtgccaccacccacccacgcttcctcaccaccgtggagatggatgtgtcgctgctgtggtggccctagcttctgcgtgggcccacgtgtagatgccgctggagaagatttattagggcgttcgatggtagcctcctcgccccagtacgctgacgtgcgcctcaacactgcccccacgtcccagcagcagcactaagggctagtttgggagccaaaaaactgaaggggttttatggctcccaaactagtcctaagacactaacgtcagcgtgttgctcccctcgtcgaccatgtgggtacgttccccatttgttttctccttccttgtcctcgccgttccccatttcgcatttctacatccgtacctcggcatttcccctaagtctgccttcctctgtcgacccgtcgg

SEQ ID NO: 5916 - DNA, 3453 bp, Zea Mays
gcccgcaacaccgatgcgccgccgccccctggccctagcgcctcgcgccgtcgctccatggccggtggccctagcgccccgcgccgccgctctgtggccgatggccctagccctaggcgccgccgctccgtgggccgtggccctatcgatcatgccggagcaccgcccaccggctagctggcagcccgcagccgccacggcaccacgcgtccgactcccacgtggccatgcctcgtcctccgtgctcgcctagccgctagcagcctagcgcgacagtcggcagtcatgaaaaacttttgatttcgccaggagacaaacatgctacataccctcataagaatatgaatattgaggaggaacccacaaacaaagaagatcatatattgaatgtgtcacatacagaagggagacaaacatggtacatcccttcgtgaggatgtgaatattgaggaggaacccacaatcaaagaagatcatatattgaatgtgtcacatatagacggtcataaaaaccttttgatttcgccaggagacaaatatgctacattccctcatgaggatgtgaatattgtggaggaacccacaagtaaataagatcgtatattgaatgtgtcacacacaaaggggctgtggaggatcgatcacaacataagaaccgagcgtctgctttatctcggcttcgaaccctgattgctcttaaagttaggaggccgataaacctggaagactacactccacctgttgagcttcttcagatattacccctgaagtccagcgttagaggaaatgatgttggcccccaaatcggtccaaataactcaaaattttctccaggaatgcaagcattattagacctgctgtttgctgttgaagattctgtatcagatgcagcaaagattttaggcctaagcaccggtgctttgtcaagattgattctgtcagatgattctctccgaacggccgcgaatgaactgcgagcttcgaagggcaccggtgctgtactacgtgctcctgacgttgcaggacagcgtgcacaaggtcttctacgccgtcgtcgaggccgctgcagttcgcgcagacaacagccatcttggagggttggcgaggtatccggtctctgcaactcttccacagattggatccagattattccttacatggggtgtcttctggagttttcctgaggtgattgactgactcgagaatttgccgacgcttgaagaaggacctaatgtgagcttttacatacttgatgaacagcttgagctcttgagcaaggtgctgaatgcaggggatgacatgattggtgttgagtgcttagaagaagattgtgatggcaaggttctatttgtttgaggttgcttcaccattccccaaagcacattgcatcttgttttagtgtttttttgattgccgtcgtcgaggccgctgcagttcgcgcagacaacagccatcttggaggtatctaattccaatattgtatgtctcggttgaacttgtgaaggcgttgcaagcacatatcattaactgggatattcatatgtttgatgaggagatcggcaataccactcagggtggcaagtttgaccatgcagatcgtttgttccaaagcattgagaacgcttacataaatagcttatcaaatacaagtgacgtcaaagagcttattccagaattcttttacatgcccgagtttcttgaaaattcaaattcatatcatcttggtgtcaagcaggatggggaacctataggcgatgttgctctccctccatgggcaaaggatgataactcaagtgacgagtttgacaaagattctattgagagtgatgatagatctcttgaagagctaagctgggagacactagaacttcttgtggtacctcatatattcaggtatccaagctctgtgctaccgattaattgctgaaaactgaacttgggttcatgttaaatattcccaaggaaatataattgggcaacggtgtgtgtatatgttcagattcagaaagtgaggacaatatagcgtttgcagcagtggtcgtcgccctgtgcagggagggcctgctgatcagagatcaagagggaaagcagaagacacgttgtgccgggaggaaacacacgacgaagtagagacttagaagcaataagctaaatatttagacaactttaattcgagcactccaagaggtgtctcaaacaactggttaattcgttttatgaccaaaagaggaaaaatggccatctaatagttttgtaaaacaactccctaaagataagcacttgcttaatctccccctcaactcgccaacatgtgtgtgccttctgcgcttgctatttgcttgggtagttttgtaaaacaactccctaaagataagcacttgcataatctccccctcaactcgccaacatgtgtgccttctgcgcttgctatttgcttgggtgcccctcctctggttgtacctgcaccctcctgtccatctcgggaatatatcaaatacaaaccacgttttggtgcaaaccctgtgtaaacctactaaaaaaagtttcaaaaaattctaaaaaaaaacatgaatgtacatctcagcttacctcatctatatacaaaattttatgatcaaattcatcttactctagcagttacaaaaaagacaaattttggtgcatttgaactattaccgtttatcagaaattttgtcttttttgtaactgctaaagtaagatgaatttgaccatgaaattttgtatatggatgaggtaagctgagatgtacattcatgtctttttttagaattttttaaaactttttttagtaggtttacatagggtttgcacaaaaacttggtttgcattcgatatgtttccatccatcttctcctcctgctcgattttttttttgagtttttggaagctaccctcctatctctttccttaaaaccgcaacccctttccctccgcgccctcacttcacggctgccaagaagtcttcaacgcccgacgcgtggccgcacagggcgaggtctcgctcgatggccaggcttggccttcgtgccaccacccacccacgcttcctcaccaccgtggagatggatgtgtcgctgctgtggtggccctagcttctgcgtgggcccacgtgtagatgccgctggagaagatttattagggcgttcgatggtagcctcctcgccccagtacgctgacgtgcgcctcaacactgcccccacgtcccagcagcagcactaagggctagtttgggagccaaaaaactgaaggggttttatggctcccaaactagtcctaagacactaacgtcagcgtgttgctcccctcgtcgaccatgtgggtacgttccccatttgttttctccttccttgtcctcgccgttccccatttcgcatttctacatccgtacctcggcatttcccctaagtctgccttcctctgtcgacccgtcgg

SEQ ID NO: 5917 - DNA, 4655 bp, Zea Mays
ctctgctgtcccactgcggcaggactacaaagtacaaagatttgctactgcattcctcaccttgaggagtatacataagcacaaggatgtatccccacgaggttgtttggtatttgacttgatataattgcctgaaattatgatatattgaaatttccctatgttgtttaaaactacgtttaaactttgtttaaaccgtttaaaagttaaaactcacccatgagcgtttcaacgtttcgtcgttttaataaccttggaaattaatctcaggtaataaaagtagaaattgatctattttattatttaaaatttggaatagctgataaatgtacccctctgtatgtgacacattcaatatatgattttcaatatatgatcttctttgattgtgggtcctcctcaatattcacattttttcagcagtggctatatacacacacacacacacactactattaaggctgtaaggggtaggctgcctcccctggttctgccttcagccaatctgcaccgtccatctatatgcgtcaaatcatcaccgtccgtctcgtcgcctccgcttcaagcctcctccatccatcgatcgcaactgctcctctccgctcccctcttcctcaacagctagatcctccatcaggcttcattcgcgccgtcgtcggcaacggctccggccttcccacgccgccgtccaacctccccccgactctcctccccacaccgccgccgctcccaccgcccgcaaaaacaccacgcacacgggcgcgggcgcggagaccgaccaccacggcaccacctcctcctccggttgcctccggcctcgccatccctctgtcctcgacttccctccgtcctcccggtctccagcctcccggaccggaagctccacgtggcgcgacagctcgtctctgtcgtctatggcggcggcagaggtgtactcgccgaccgcggcggcgcagcagcagagggagaaggcgacgtcgcaggtgtggcgggcggtggtggggtggatcggcttccttgttcaggttctgcttcagatcctccggggcacgccgtcctgcgcccaactctttccttcggcggcgtccggtacccgctcctcttcgggcctgcggcctcgaactcgtcgccggaggtggcctccgtccgtccagctctgaggcgggcccatggaaatcgttgccatatcagatcagcttcgccacggaccccatctgcgacccccggtgacgcgctccgcccacagctctgaggcgggcccatggaaatcgttgccatatcagatcagcttcgccacggaccccatctgcgacccccggtgacgcgctccgcccaccgcccaccgccgcccgggaatggctcgagcgctgctcctgctgcgagtagctgtagctcgctaccctcctctcccggcctcacccgcgctcctccagccgcagccgctgctgcgctgccacgcgccctcccagtacaaatcccagctccgcttcctctcctccctctcctcgtccgtgcccaacagctcagatgctcccagcgacggcgggggcgaccgcgacggggaagaagatggcgcgaagagtggcagccacgtcgattacttggggatgagcgacgaggagctcatggagcagtgcgatatgggcacgttcaaggcgtccggccccggcggccagcactgcaacaagcgcgagtccgccgtccggctgaaacaccttcccatcggcatcatcgcccaggctgtggaggatcgatcacaacataagaaccgagcgtctgctttatctcggcttcgaaccctgattgctcttaaagttaggaggccgataaacctggaagactacactccacctgttgagcttcttcagatattacccctgaagtccagcgttagaggaaatgatgttggcccccaaatcggtccaaataactcaaaattttctccaggaatgcaagcattattagacctgctgtttgctgttgaagattctgtatcagatgcagcaaagattttaggcctaagcaccggtgctttgtcaagattgattctgtcagatgattctctccgaacggccgcgaatgaactgcgagcttcgaagtgtttctttgattgcagggcaccggtgctgtactacgtgctcctgacgttgcaggacagcgtgcacaaggtcttctacgccgtcgtcgaggccgctgcagttcgcgcagacaacagccatcttggagggttggcgaggtatccggtctctgcaactcttccacagattggatccagattattccttacatggggtgtcttctggagttttcctgaggtgattgactgactcgagaatttgccgacgcttgaagaaggacctaatgtgagcttttacatacttgatgaacagcttgagctcttgagcaaggtgctgaatgcaggggatgacatgattggtgttgagtgcttagaagaagattgtgatggcaaggttctatttgtttgaggttgcttcaccattccccaaagcacattgcatcttgttttagtgtttttttgattgccgtcgtcgaggccgctgcagttcgcgcagacaacagccatcttggaggtatctaattccaatattgtatgtctcggttgaacttgtgaaggcgttgcaagcacatatcattaactgggatattcatatgtttgatgaggagatcggcaataccactcaggtgcacacatcaaacttgaatgagccaatgaggaccttggccgggttcatacaattttgtctgataaaaccgggtggcaagtttgaccatgcagatcgtttgttccaaagcattgagaacgcttacataaatagcttatcaaatacaagtgacgtcaaagagcttattccagaattcttttacatgcccgagtttcttgaaaattcaaattcatatcatcttggtgtcaagcaggatggggaacctataggcgatgttgctctccctccatgggcaaaggatgataactcaagtgacgagtttgacaaagattctattgagagtgatgatagatctcttgaagagctaagctgggagacactagaacttcttgtggtacctcatatattcaggtatccaagctctgtgctaccgattaattgctgaaaactgaacttgggttcatgttaaatattcccaaggaaatataattgggcaacggtgtgtgtatatgttcagattcagaaagtgaggacaatatagcgtttgcagcagtggtcgtcgccctgtgcagggagggcctgctgatcagagatcaagagggaaagcagaagacacgttgtgccgggaggaaacacacgacgaagtagagacttagaagcaataagctaaatatttagacaactttaattcgagcactccaagaggtgtctcaaacaactggttaattcgttttatgaccaaaagaggaaaaatggccatctaatagttttgtaaaacaactccctaaagataagcacttgcttaatctccccctcaactcgccaacatgtgtgtgccttctgcgcttgctatttgcttgggtagttttgtaaaacaactccctaaagataagcacttgcataatctccccctcaactcgccaacatgtgtgccttctgcgcttgctatttgcttgggtgcccctcctctggttgtacctgcaccctcctgtccatctcgggaatatatcaaatacaaaccacgttttggtgcaaaccctgtgtaaacctactaaaaaaagtttcaaaaaattctaaaaaaaaacatgaatgtacatctcagcttacctcatctatatacaaaattttatgatcaaattcatcttactctagcagttacaaaaaagacaaattttggtgcatttgaactattaccgtttatcagaaattttgtcttttttgtaactgctaaagtaagatgaatttgaccatgaaattttgtatatggatgaggtaagctgagatgtacattcatgtctttttttagaattttttaaaactttttttagtaggtttacatagggtttgcacaaaaacttggtttgcattcgatatgtttccatccatcttctcctcctgctcgattttttttttgagtttttggaagctaccctcctatctctttccttaaaaccgcaacccctttccctccgcgccctcacttcacggctgccaagaagtcttcaacgcccgacgcgtggccgcacagggcgaggtctcgctcgatggccaggcttggccttcgtgccaccacccacccacgcttcctcaccaccgtggagatggatgtgtcgctgctgtggtggccctagcttctgcgtgggcccacgtgtagatgccgctggagaagatttattagggcgttcgatggtagcctcctcgccccagtacgctgacgtgcgcctcaacactgcccccacgtcccagcagcagcactaagggctagtttgggagccaaaaaactgaaggggttttatggctcccaaactagtcctaagacactaacgtcagcgtgttgctcccctcgtcgaccatgtgggtacgttccccatttgttttctccttccttgtcctcgccgttccccatttcgcatttctacatccgtacctcggcatttcccctaagtctgccttcctctgtcgacccgtcgg

SEQ ID NO: 5918 - DNA, 3671 bp, Zea Mays
ctccagcctcccggaccggaagctccacgtggcgcgacagctcgtctctgtcgtctatggcggcggcagaggtgtactcgccgaccgcggcggcgcagcagcagagggagaaggcgacgtcgcaggtgtggcgggcggtggtggggtggatcggcttccttgttcaggttctgcttcagatcctccggggcacgccgtcctgcgcccaactctttccttcggcggcgtccggtacccgctcctcttcgggcctgcggcctcgaactcgtcgccggaggtggcctccgtccgtccagctctgaggcgggcccatggaaatcgttgccatatcagatcagcttcgccacggaccccatctgcgacccccggtgacgcgctccgcccacagctctgaggcgggcccatggaaatcgttgccatatcagatcagcttcgccacggaccccatctgcgacccccggtgacgcgctccgcccaccgcccaccgccgcccgggaatggctcgagcgctgctcctgctgcgagtagctgtagctcgctaccctcctctcccggcctcacccgcgctcctccagccgcagccgctgctgcgctgccacgcgccctcccagtacaaatcccagctccgcttcctctcctccctctcctcgtccgtgcccaacagctcagatgctcccagcgacggcgggggcgaccgcgacggggaagaagatggcgcgaagagtggcagccacgtcgattacttggggatgagcgacgaggagctcatggagcagtgcgatatgggcacgttcaaggcgtccggccccggcggccagcactgcaacaagcgcgagtccgccgtccggctgaaacaccttcccatcggcatcatcgcccaggctgtggaggatcgatcacaacataagaaccgagcgtctgctttatctcggcttcgaaccctgattgctcttaaagttaggaggccgataaacctggaagactacactccacctgttgagcttcttcagatattacccctgaagtccagcgttagaggaaatgatgttggcccccaaatcggtccaaataactcaaaattttctccaggaatgcaagcattattagacctgctgtttgctgttgaagattctgtatcagatgcagcaaagattttaggcctaagcaccggtgctttgtcaagattgattctgtcagatgattctctccgaacggccgcgaatgaactgcgagcttcgaagaggagcgagctgaatagcgtgctataagttcctaccgggcaccggtgctgtactacgtgctcctgacgttgcaggacagcgtgcacaaggtcttctacgccgtcgtcgaggccgctgcagttcgcgcagacaacagccatcttggagggttggcgaggtatccggtctctgcaactcttccacagattggatccagattattccttacatggggtgtcttctggagttttcctgaggtgattgactgactcgagaatttgccgacgcttgaagaaggacctaatgtgagcttttacatacttgatgaacagcttgagctcttgagcaaggtgctgaatgcaggggatgacatgattggtgttgagtgcttagaagaagattgtgatggcaaggttctatttgtttgaggttgcttcaccattccccaaagcacattgcatcttgttttagtgtttttttgattgccgtcgtcgaggccgctgcagttcgcgcagacaacagccatcttggaggtatctaattccaatattgtatgtctcggttgaacttgtgaaggcgttgcaagcacatatcattaactgggatattcatatgtttgatgaggagatcggcaataccactcagggtggcaagtttgaccatgcagatcgtttgttccaaagcattgagaacgcttacataaatagcttatcaaatacaagtgacgtcaaagagcttattccagaattcttttacatgcccgagtttcttgaaaattcaaattcatatcatcttggtgtcaagcaggatggggaacctataggcgatgttgctctccctccatgggcaaaggatgataactcaagtgacgagtttgacaaagattctattgagagtgatgatagatctcttgaagagctaagctgggagacactagaacttcttgtggtacctcatatattcagataattgggcaacggtgtgtgtatatgttcagattcagaaagtgaggacaatatagcgtttgcagcagtggtcgtcgccctgtgcagggagggcctgctgatcagagatcaagagggaaagcagaagacacgttgtgccgggaggaaacacacgacgaagtagagacttagaagcaataagctaaatatttagacaactttaattcgagcactccaagaggtgtctcaaacaactggttaattcgttttatgaccaaaagaggaaaaatggccatctaatagttttgtaaaacaactccctaaagataagcacttgcttaatctccccctcaactcgccaacatgtgtgtgccttctgcgcttgctatttgcttgggtagttttgtaaaacaactccctaaagataagcacttgcataatctccccctcaactcgccaacatgtgtgccttctgcgcttgctatttgcttgggtgcccctcctctggttgtacctgcaccctcctgtccatctcgggaatatatcaaatacaaaccacgttttggtgcaaaccctgtgtaaacctactaaaaaaagtttcaaaaaattctaaaaaaaaacatgaatgtacatctcagcttacctcatctatatacaaaattttatgatcaaattcatcttactctagcagttacaaaaaagacaaattttggtgcatttgaactattaccgtttatcagaaattttgtcttttttgtaactgctaaagtaagatgaatttgaccatgaaattttgtatatggatgaggtaagctgagatgtacattcatgtctttttttagaattttttaaaactttttttagtaggtttacatagggtttgcacaaaaacttggtttgcattcgatatgtttccatccatcttctcctcctgctcgattttttttttgagtttttggaagctaccctcctatctctttccttaaaaccgcaacccctttccctccgcgccctcacttcacggctgccaagaagtcttcaacgcccgacgcgtggccgcacagggcgaggtctcgctcgatggccaggcttggccttcgtgccaccacccacccacgcttcctcaccaccgtggagatggatgtgtcgctgctgtggtggccctagcttctgcgtgggcccacgtgtagatgccgctggagaagatttattagggcgttcgatggtagcctcctcgccccagtacgctgacgtgcgcctcaacactgcccccacgtcccagcagcagcactaagggctagtttgggagccaaaaaactgaaggggttttatggctcccaaactagtcctaagacactaacgtcagcgtgttgctcccctcgtcgaccatgtgggtacgttccccatttgttttctccttccttgtcctcgccgttccccatttcgcatttctacatccgtacctcggcatttcccctaagtctgccttcctctgtcgacccgtcgg

SEQ ID NO: 5919 - DNA, 3353 bp, Zea Mays
ggaagctccacgtggcgcgacagctcgtctctgtcgtctatggcggcggcagaggtgtactcgccgaccgcggcggcgcagcagcagagggagaaggcgacgtcgcaggtgtggcgggcggtggtggggtggatcggcttccttgttcaggttctgcttcagatcctccggggcacgccgtcctgcgcccaactctttccttcggcggcgtccggtacccgctcctcttcgggcctgcggcctcgaactcgtcgccggaggtggcctccgtccgtccagctctgaggcgggcccatggaaatcgttgccatatcagatcagcttcgccacggaccccatctgcgacccccggtgacgcgctccgcccacagctctgaggcgggcccatggaaatcgttgccatatcagatcagcttcgccacggaccccatctgcgacccccggtgacgcgctccgcccaccgcccaccgccgcccgggaatggctcgagcgctgctcctgctgcgagtagctgtagctcgctaccctcctctcccggcctcacccgcgctcctccagccgcagccgctgctgcgctgccacgcgccctcccagtacaaatcccagctccgcttcctctcctccctctcctcgtccgtgcccaacagctcagatgctcccagcgacggcgggggcgaccgcgacggggaagaagatggcgcgaagagtggcagccacgtcgattacttggggatgagcgacgaggagctcatggagcagtgcgatatgggcacgttcaaggcgtccggccccggcggccagcactgcaacaagcgcgagtccgccgtccggctgaaacaccttcccatcggcatcatcgcccaggctgtggaggatcgatcacaacataagaaccgagcgtctgctttatctcggcttcgaaccctgattgctcttaaagttaggaggccgataaacctggaagactacactccacctgttgagcttcttcagatattacccctgaagtccagcgttagaggaaatgatgttggcccccaaatcggtccaaataactcaaaattttctccaggaatgcaagcattattagacctgctgtttgctgttgaagattctgtatcagatgcagcaaagattttaggcctaagcaccggtgctttgtcaagattgattctgtcagatgattctctccgaacggccgcgaatgaactgcgagcttcgaagggcaccggtgctgtactacgtgctcctgacgttgcaggacagcgtgcacaaggtcttctacgccgtcgtcgaggccgctgcagttcgcgcagacaacagccatcttggagggttggcgaggtatccggtctctgcaactcttccacagattggatccagattattccttacatggggtgtcttctggagttttcctgagatggccccattcacctctaccaacaggtatctaattccaatattgtatgtctcggttgaacttgtgaaggcgttgcaagcacatatcattaactgggatattcatatgtttgatgaggagatcggcaataccactcaggtgcacacatcaaacttgaatgagccaatgaggaccttggccgggttcatacaattttgtctgataaaaccgggtggcaagtttgaccatgcagatcgtttgttccaaagcattgagaacgcttacataaatagcttatcaaatacaagatggggaacctataggcgatgttgctctccctccatgggcaaaggatgataactcaagtgacgagtttgacaaagattctattgagagtgatgatagatctcttgaagagctaagctgggagacactagaacttcttgtggtacctcatatattcagataattgggcaacggtgtgtgtatatgttcagattcagaaagtgaggacaatatagcgtttgcagcagtggtcgtcgccctgtgcagggagggcctgctgatcagagatcaagagggaaagcagaagacacgttgtgccgggaggaaacacacgacgaagtagagacttagaagcaataagctaaatatttagacaactttaattcgagcactccaagaggtgtctcaaacaactggttaattcgttttatgaccaaaagaggaaaaatggccatctaatagttttgtaaaacaactccctaaagataagcacttgcttaatctccccctcaactcgccaacatgtgtgtgccttctgcgcttgctatttgcttgggtagttttgtaaaacaactccctaaagataagcacttgcataatctccccctcaactcgccaacatgtgtgccttctgcgcttgctatttgcttgggtgcccctcctctggttgtacctgcaccctcctgtccatctcgggaatatatcaaatacaaaccacgttttggtgcaaaccctgtgtaaacctactaaaaaaagtttcaaaaaattctaaaaaaaaacatgaatgtacatctcagcttacctcatctatatacaaaattttatgatcaaattcatcttactctagcagttacaaaaaagacaaattttggtgcatttgaactattaccgtttatcagaaattttgtcttttttgtaactgctaaagtaagatgaatttgaccatgaaattttgtatatggatgaggtaagctgagatgtacattcatgtctttttttagaattttttaaaactttttttagtaggtttacatagggtttgcacaaaaacttggtttgcattcgatatgtttccatccatcttctcctcctgctcgattttttttttgagtttttggaagctaccctcctatctctttccttaaaaccgcaacccctttccctccgcgccctcacttcacggctgccaagaagtcttcaacgcccgacgcgtggccgcacagggcgaggtctcgctcgatggccaggcttggccttcgtgccaccacccacccacgcttcctcaccaccgtggagatggatgtgtcgctgctgtggtggccctagcttctgcgtgggcccacgtgtagatgccgctggagaagatttattagggcgttcgatggtagcctcctcgccccagtacgctgacgtgcgcctcaacactgcccccacgtcccagcagcagcactaagggctagtttgggagccaaaaaactgaaggggttttatggctcccaaactagtcctaagacactaacgtcagcgtgttgctcccctcgtcgaccatgtgggtacgttccccatttgttttctccttccttgtcctcgccgttccccatttcgcatttctacatccgtacctcggcatttcccctaagtctgccttcctctgtcgacccgtcgg

SEQ ID NO: 5920 - DNA, 2539 bp, Zea Mays
ctccacgtggcgcgacagctcgtctctgtcgtctatggcggcggcagaggtgtactcgccgaccgcggcggcgcagcagcagagggagaaggcgacgtcgcaggtgtggcgggcggtggtggggtggatcggcttccttgttcaggttctgcttcagatcctccggggcacgccgtcctgcgcccaactctttccttcggcggcgtccggtacccgctcctcttcgggcctgcggcctcgaactcgtcgccggaggtggcctccgtccgtccagctctgaggcgggcccatggaaatcgttgccatatcagatcagcttcgccacggaccccatctgcgacccccggtgacgcgctccgcccacagctctgaggcgggcccatggaaatcgttgccatatcagatcagcttcgccacggaccccatctgcgacccccggtgacgcgctccgcccaccgcccaccgccgcccgggaatggctcgagcgctgctcctgctgcgagtagctgtagctcgctaccctcctctcccggcctcacccgcgctcctccagccgcagccgctgctgcgctgccacgcgccctcccagtacaaatcccagctccgcttcctctcctccctctcctcgtccgtgcccaacagctcagatgctcccagcgacggcgggggcgaccgcgacggggaagaagatggcgcgaagagtggcagccacgtcgattacttggggatgagcgacgaggagctcatggagcagtgcgatatgggcacgttcaaggcgtccggccccggcggccagcactgcaacaagcgcgagtccgccgtccggctgaaacaccttcccatcggcatcatcgcccaggctgtggaggatcgatcacaacataagaaccgagcgtctgctttatctcggcttcgaaccctgattgctcttaaagttaggaggccgataaacctggaagactacactccacctgttgagcttcttcagatattacccctgaagtccagcgttagaggaaatgatgttggcccccaaatcggtccaaataactcaaaattttctccaggaatgcaagcattattagacctgctgtttgctgttgaagattctgtatcagatgcagcaaagattttaggcctaagcaccggtgctttgtcaagattgattctgtcagatgattctctccgaacggccgcgaatgaactgcgagcttcgaagggcaccggtgctgtactacgtgctcctgacgttgcaggacagcgtgcacaaggtcttctacgccgtcgtcgaggccgctgcagttcgcgcagacaacagccatcttggagggttggcgaggtatccggtctctgcaactcttccacagattggatccagattattccttacatggggtgtcttctggagttttcctgaggtgattgactgactcgagaatttgccgacgcttgaagaaggacctaatgtgagcttttacatacttgatgaacagcttgagctcttgagcaaggtgctgaatgcaggggatgacatgattggtgttgagtgcttagaagaagattgtgatggcaaggttctatttgtttgaggttgcttcaccattccccaaagcacattgcatcttgttttagtgtttttttgattgccgtcgtcgaggccgctgcagttcgcgcagacaacagccatcttggaggtatctaattccaatattgtatgtctcggttgaacttgtgaaggcgttgcaagcacatatcattaactgggatattcatatgtttgatgaggagatcggcaataccactcagggtggcaagtttgaccatgcagatcgtttgttccaaagcattgagaacgcttacataaatagcttatcaaatacaagtgacgtcaaagagcttattccagaattcttttacatgcccgagtttcttgaaaattcaaattcatatcatcttggtgtcaagcaggatggggaacctataggcgatgttgctctccctccatgggcaaaggatgataactcaagtgacgagtttgacaaagattctattgagagtgatgatagatctcttgaagagctaagctgggagacactagaacttcttgtggtacctcatatattcagtgccgaagatgatccacagccgatgctgttaacaaacacatacaggaaggtagaacttcgggtagtcgacgtgcataccctactaatgaagctggactagaccataaggagtcttcgaggctcatttcgtcgaagatagaaggaaaagaccactgtacccttggcatgtataatagtctaaatgtgtaggcttaagggcataattgaaaattcatcgaaaatgtatcccacgcctataaatagaggaacagtgccatgcattgttcagactttttgttcaagggtagaattcatttctcactatacgaagctgtaatctctctacccctctcattttagttttacgaagctcaaggtactcatgtgaattcttgttccataaaagaagaaatatatctatgtgacttctttta

SEQ ID NO: 5921 - DNA, 3756 bp, Zea Mays
ccacgtggcgcgacagctcgtctctgtcgtctatggcggcggcagaggtgtactcgccgaccgcggcggcgcagcagcagagggagaaggcgacgtcgcaggtgtggcgggcggtggtggggtggatcggcttccttgttcaggttctgcttcagatcctccggggcacgccgtcctgcgcccaactctttccttcggcggcgtccggtacccgctcctcttcgggcctgcggcctcgaactcgtcgccggaggtggcctccgtccgtccagctctgaggcgggcccatggaaatcgttgccatatcagatcagcttcgccacggaccccatctgcgacccccggtgacgcgctccgcccacagctctgaggcgggcccatggaaatcgttgccatatcagatcagcttcgccacggaccccatctgcgacccccggtgacgcgctccgcccaccgcccaccgccgcccgggaatggctcgagcgctgctcctgctgcgagtagctgtagctcgctaccctcctctcccggcctcacccgcgctcctccagccgcagccgctgctgcgctgccacgcgccctcccagtacaaatcccagctccgcttcctctcctccctctcctcgtccgtgcccaacagctcagatgctcccagcgacggcgggggcgaccgcgacggggaagaagatggcgcgaagagtggcagccacgtcgattacttggggatgagcgacgaggagctcatggagcagtgcgatatgggcacgttcaaggcgtccggccccggcggccagcactgcaacaagcgcgagtccgccgtccggctgaaacaccttcccatcggcatcatcgcccaggctgtggaggatcgatcacaacataagaaccgagcgtctgctttatctcggcttcgaaccctgattgctcttaaagttaggaggccgataaacctggaagactacactccacctgttgagcttcttcagatattacccctgaagtccagcgttagaggaaatgatgttggcccccaaatcggtccaaataactcaaaattttctccaggaatgcaagcattattagacctgctgtttgctgttgaagattctgtatcagatgcagcaaagattttaggcctaagcaccggtgctttgtcaagattgattctgtcagatgattctctccgaacggccgcgaatgaactgcgagcttcgaagggcaccggtgctgtactacgtgctcctgacgttgcaggacagcgtgcacaaggtcttctacgccgtcgtcgaggccgctgcagttcgcgcagacaacagccatcttggagggttggcgaggtatccggtctctgcaactcttccacagattggatccagattattccttacatggggtgtcttctggagttttcctgaggtgattgactgactcgagaatttgccgacgcttgaagaaggacctaatgtgagcttttacatacttgatgaacagcttgagctcttgagcaaggtgctgaatgcaggggatgacatgattggtgttgagtgcttagaagaagattgtgatggcaaggttctatttgtttgaggttgcttcaccattccccaaagcacattgcatcttgttttagtgtttttttgattgccgtcgtcgaggccgctgcagttcgcgcagacaacagccatcttggaggtatctaattccaatattgtatgtctcggttgaacttgtgaaggcgttgcaagcacatatcattaactgggatattcatatgtttgatgaggagatcggcaataccactcagggtggcaagtttgaccatgcagatcgtttgttccaaagcattgagaacgcttacataaatagcttatcaaatacaagtgacgtcaaagagcttattccagaattcttttacatgcccgagtttcttgaaaattcaaattcatatcatcttggtgtcaagcaggatggggaacctataggcgatgttgctctccctccatgggcaaaggatgataactcaagtgacgagtttgacaaagattctattgagagtgatgatagatctcttgaagagctaagctgggagacactagaacttcttgtggtacctcatatattcagataattgggcaacggtgtgtgtatatgttcagattcagaaagtgaggacaatatagcgtttgcagcagtgcttcttactctgagatcttcgggtaatctggatactcaaactaaagggtgtccataactctgttcagcctacgcttctctcgattatcgaaggctgcagtcatcaactggtcttccttttttgtaaaattttccaaaatctcattacacattgtcttaatcatttctaaccatttagcgcaaggttccttgaatagatcctgaaatttaaaacgatacgataatctcacaaggcttcctttagccacgtccttctttagcttcggcattctccaaccatccagtgttgggaatactttgttagaaagaaattcctgaactaagtcttgagtactattgtgctcgaccattgtactaaaagtaacttgggccacctgcgctagataacccagacccatcttgcagactggcctcgttaagccgaagttcaagctcatcgggctcatcacagtgtccttaaatttatctttgcccttaatatcagccttcatataaaaccactcattggtccaaccgattggccatttcttttgatatcccaacactggagccttcatatcctttctataagcaaagttgtagcacccaaagttcttatgaagaccgtctgaaggcctcgacttcgtttgataatgaagctcatgtactctgcagaacccttcagcatttgcactcataccctggcttcgcagagcctatatataaatattgagtctaacaattgtgtttggtgttaactgatgcaagtatatttcaaatttattcaaaacttcggcgatcatctcgtacatcaggaagcgaagaccagcacgaaagaagcttctgaacacaataacctcatcatccttcggctcaggaataatttcactaccaacaaaccggatcatatcatcttccttctcaccaatatacccaagtttcttcagcacatccagatcttcagctctcacagtggacacaccaaactccagatgacttggtttgtttggacaaagaatactaggatcctctttgtcactgctaacttcggcttcagaatcactcctttctgcagcacttacttcctcgccagctttcggatctatgatactagactccctcatcacctctgaaattggagcgatctcaattgtatctggctttgcaccctcgaatgtcaatcaagcggttgaacggaccgtcaccatcgacgtaatgccgaagctttacgaaaatgcttgagcgcagcgaaaacagcttcggaagcagagaaatttgtgccagcaggttggtgtaaaaaagcaataaatgttgtgacattttacccggctgactgacttatataggccggtaagcggtgaagacgagcggtcgtgccgtttgcaccctctgatcggtgggctggcgcgaagcatttttaccccgtttttaataacgcgctcaaaggaagatgtttttcggacctttcggcatgaagccttcgtcttatttcgtggaccgaacttgtaatgaaaaacgaactagcatcgcgaaggggctactattggggccttctccctccgaaggtcctcaaaacactaattc

SEQ ID NO: 5922 - DNA, 2301 bp, Zea Mays
tgtcgtctatggcggcggcagaggtgtactcgccgaccgcggcggcgcagcagcagagggagaaggcgacgtcgcaggtgtggcgggcggtggtggggtggatcggcttccttgttcaggttctgcttcagatcctccggggcacgccgtcctgcgcccaactctttccttcggcggcgtccggtacccgctcctcttcgggcctgcggcctcgaactcgtcgccggaggtggcctccgtccgtccagctctgaggcgggcccatggaaatcgttgccatatcagatcagcttcgccacggaccccatctgcgacccccggtgacgcgctccgcccacagctctgaggcgggcccatggaaatcgttgccatatcagatcagcttcgccacggaccccatctgcgacccccggtgacgcgctccgcccaccgcccaccgccgcccgggaatggctcgagcgctgctcctgctgcgagtagctgtagctcgctaccctcctctcccggcctcacccgcgctcctccagccgcagccgctgctgcgctgccacgcgccctcccagtacaaatcccagctccgcttcctctcctccctctcctcgtccgtgcccaacagctcagatgctcccagcgacggcgggggcgaccgcgacggggaagaagatggcgcgaagagtggcagccacgtcgattacttggggatgagcgacgaggagctcatggagcagtgcgatatgggcacgttcaaggcgtccggccccggcggccagcactgcaacaagcgcgagtccgccgtccggctgaaacaccttcccatcggcatcatcgcccaggctgtggaggatcgatcacaacataagaaccgagcgtctgctttatctcggcttcgaaccctgattgctcttaaagttaggaggccgataaacctggaagactacactccacctgttgagcttcttcagatattacccctgaagtccagcgttagaggaaatgatgttggcccccaaatcggtccaaataactcaaaattttctccaggaatgcaagcattattagacctgctgtttgctgttgaagattctgtatcagatgcagcaaagattttaggcctaagcaccggtgctttgtcaagattgattctgtcagatgattctctccgaacggccgcgaatgaactgcgagcttcgaagggcaccggtgctgtactacgtgctcctgacgttgcaggacagcgtgcacaaggtcttctacgccgtcgtcgaggccgctgcagttcgcgcagacaacagccatcttggagggttggcgaggtatccggtctctgcaactcttccacagattggatccagattattccttacatggggtgtcttctggagttttcctgaggtgattgactgactcgagaatttgccgacgcttgaagaaggacctaatgtgagcttttacatacttgatgaacagcttgagctcttgagcaaggtgctgaatgcaggggatgacatgattggtgttgagtgcttagaagaagattgtgatggcaaggttctatttgtttgaggttgcttcaccattccccaaagcacattgcatcttgttttagtgtttttttgattgccgtcgtcgaggccgctgcagttcgcgcagacaacagccatcttggaggtatctaattccaatattgtatgtctcggttgaacttgtgaaggcgttgcaagcacatatcattaactgggatattcatatgtttgatgaggagatcggcaataccactcagggtggcaagtttgaccatgcagatcgtttgttccaaagcattgagaacgcttacataaatagcttatcaaatacaagtgacgtcaaagagcttattccagaattcttttacatgcccgagtttcttgaaaattcaaattcatatcatcttggtgtcaagcaggatggggaacctataggcgatgttgctctccctccatgggcaaaggatgataactcaagtgacgagtttgacaaagattctattgagagtgatgatagatctcttgaagagctaagctgggagacactagaacttcttgtggtacctcatatattcagatgcaggtatccaagctctgtgctaccgattaattgctgaaaactgaacttgggttcatgttaaatattcccaaggaaatataattgggcaacggtgtgtgtatatgttcagattcagaaagtgaggacaatatagcgtttgcagcagtggggattgaaatcaagtgaccaacaaacataaaaatgaggatttagaccaat

SEQ ID NO: 5923 - DNA, 1394 bp, Zea Mays
ctcgccgaccgcggcggcgcagcagcagagggagaaggcgacgtcgcaggtgtggcgggcggtggtggggtggatcggcttccttgttcaggttctgcttcagatcctccggggcacgccgtcctgcgcccaactctttccttcggcggcgtccggtacccgctcctcttcgggcctgcggcctcgaactcgtcgccggaggtggcctccgtccgtccagctctgaggcgggcccatggaaatcgttgccatatcagatcagcttcgccacggaccccatctgcgacccccggtgacgcgctccgcccacagctctgaggcgggcccatggaaatcgttgccatatcagatcagcttcgccacggaccccatctgcgacccccggtgacgcgctccgcccaccgcccaccgccgcccgggaatggctcgagcgctgctcctgctgcgagtagctgtagctcgctaccctcctctcccggcctcacccgcgctcctccagccgcagccgctgctgcgctgccacgcgccctcccagtacaaatcccagctccgcttcctctcctccctctcctcgtccgtgcccaacagctcagatgctcccagcgacggcgggggcgaccgcgacggggaagaagatggcgcgaagagtggcagccacgtcgattacttggggatgagcgacgaggagctcatggagcagtgcgatatgggcacgttcaaggcgtccggccccggcggccagcactgcaacaagcgcgagtccgccgtccggctgaaacaccttcccatcggcatcatcgcccaggctgtggaggatcgatcacaacataagaaccgagcgtctgctttatctcggcttcgaaccctgattgctcttaaagttaggaggccgataaacctggaagactacactccacctgttgagcttcttcagatattacccctgaagtccagcgttagaggaaatgatgttggcccccaaatcggtccaaataactcaaaattttctccaggaatgcaagcattattagacctgctgtttgctgttgaagattctgtatcagatgcagcaaagattttaggcctaagcaccggtgctttgtcaagattgattctgtcagatgattctctccgaacggccgcgaatgaactgcgagcttcgaagtgtttctttgattgcagggcaccggtgctgtactacgtgctcctgacgttgcaggacagcgtgcacaaggtcttctacgccgtcgtcgaggccgctgcagttcgcgcagacaacagccatcttggagggttggcgaggtatccggtctctgcaactcttccacagattggatccagattattccttacatggggtgtcttctggagttttcctgagctgtacactgatc

SEQ ID NO: 5924 - DNA, 3725 bp, Zea Mays
ctcgccgaccgcggcggcgcagcagcagagggagaaggcgacgtcgcaggtgtggcgggcggtggtggggtggatcggcttccttgttcaggttctgcttcagatcctccggggcacgccgtcctgcgcccaactctttccttcggcggcgtccggtacccgctcctcttcgggcctgcggcctcgaactcgtcgccggaggtggcctccgtccgtccagctctgaggcgggcccatggaaatcgttgccatatcagatcagcttcgccacggaccccatctgcgacccccggtgacgcgctccgcccacagctctgaggcgggcccatggaaatcgttgccatatcagatcagcttcgccacggaccccatctgcgacccccggtgacgcgctccgcccaccgcccaccgccgcccgggaatggctcgagcgctgctcctgctgcgagtagctgtagctcgctaccctcctctcccggcctcacccgcgctcctccagccgcagccgctgctgcgctgccacgcgccctcccagtacaaatcccagctccgcttcctctcctccctctcctcgtccgtgcccaacagctcagatgctcccagcgacggcgggggcgaccgcgacggggaagaagatggcgcgaagagtggcagccacgtcgattacttggggatgagcgacgaggagctcatggagcagtgcgatatgggcacgttcaaggcgtccggccccggcggccagcactgcaacaagcgcgagtccgccgtccggctgaaacaccttcccatcggcatcatcgcccaggctgtggaggatcgatcacaacataagaaccgagcgtctgctttatctcggcttcgaaccctgattgctcttaaagttaggaggccgataaacctggaagactacactccacctgttgagcttcttcagatattacccctgaagtccagcgttagaggaaatgatgttggcccccaaatcggtccaaataactcaaaattttctccaggaatgcaagcattattagacctgctgtttgctgttgaagattctgtatcagatgcagcaaagattttaggcctaagcaccggtgctttgtcaagattgattctgtcagatgattctctccgaacggccgcgaatgaactgcgagcttcgaagggcaccggtgctgtactacgtgctcctgacgttgcaggacagcgtgcacaaggtcttctacgccgtcgtcgaggccgctgcagttcgcgcagacaacagccatcttggagggttggcgaggtatccggtctctgcaactcttccacagattggatccagattattccttacatggggtgtcttctggagttttcctgagctgtacactgatctgtaacaggtgattgactgactcgagaatttgccgacgcttgaagaaggacctaatgtgagcttttacatacttgatgaacagcttgagctcttgagcaaggtgctgaatgcaggggatgacatgattggtgttgagtgcttagaagaagattgtgatggcaaggttctatttgtttgaggttgcttcaccattccccaaagcacattgcatcttgttttagtgtttttttgattgccgtcgtcgaggccgctgcagttcgcgcagacaacagccatcttggaggtatctaattccaatattgtatgtctcggttgaacttgtgaaggcgttgcaagcacatatcattaactgggatattcatatgtttgatgaggagatcggcaataccactcaggtgcacacatcaaacttgaatgagccaatgaggaccttggccgggttcatacaattttgtctgataaaaccgggtggcaagtttgaccatgcagatcgtttgttccaaagcattgagaacgcttacataaatagcttatcaaatacaagtgacgtcaaagagcttattccagaattcttttacatgcccgagtttcttgaaaattcaaattcatatcatcttggtgtcaagcaggatggggaacctataggcgatgttgctctccctccatgggcaaaggatgataactcaagtgacgagtttgacaaagattctattgagagtgatgatagatctcttgaagagctaagctgggagacactagaacttcttgtggtacctcatatattcaggtatccaagctctgtgctaccgattaattgctgaaaactgaacttgggttcatgttaaatattcccaaggaaatataattgggcaacggtgtgtgtatatgttcagattcagaaagtgaggacaatatagcgtttgcagcagtggtcgtcgccctgtgcagggagggcctgctgatcagagatcaagagggaaagcagaagacacgttgtgccgggaggaaacacacgacgaagtagagacttagaagcaataagctaaatatttagacaactttaattcgagcactccaagaggtgtctcaaacaactggttaattcgttttatgaccaaaagaggaaaaatggccatctaatagttttgtaaaacaactccctaaagataagcacttgcttaatctccccctcaactcgccaacatgtgtgtgccttctgcgcttgctatttgcttgggtagttttgtaaaacaactccctaaagataagcacttgcataatctccccctcaactcgccaacatgtgtgccttctgcgcttgctatttgcttgggtgcccctcctctggttgtacctgcaccctcctgtccatctcgggaatatatcaaatacaaaccacgttttggtgcaaaccctgtgtaaacctactaaaaaaagtttcaaaaaattctaaaaaaaaacatgaatgtacatctcagcttacctcatctatatacaaaattttatgatcaaattcatcttactctagcagttacaaaaaagacaaattttggtgcatttgaactattaccgtttatcagaaattttgtcttttttgtaactgctaaagtaagatgaatttgaccatgaaattttgtatatggatgaggtaagctgagatgtacattcatgtctttttttagaattttttaaaactttttttagtaggtttacatagggtttgcacaaaaacttggtttgcattcgatatgtttccatccatcttctcctcctgctcgattttttttttgagtttttggaagctaccctcctatctctttccttaaaaccgcaacccctttccctccgcgccctcacttcacggctgccaagaagtcttcaacgcccgacgcgtggccgcacagggcgaggtctcgctcgatggccaggcttggccttcgtgccaccacccacccacgcttcctcaccaccgtggagatggatgtgtcgctgctgtggtggccctagcttctgcgtgggcccacgtgtagatgccgctggagaagatttattagggcgttcgatggtagcctcctcgccccagtacgctgacgtgcgcctcaacactgcccccacgtcccagcagcagcactaagggctagtttgggagccaaaaaactgaaggggttttatggctcccaaactagtcctaagacactaacgtcagcgtgttgctcccctcgtcgaccatgtgggtacgttccccatttgttttctccttccttgtcctcgccgttccccatttcgcatttctacatccgtacctcggcatttcccctaagtctgccttcctctgtcgacccgtcgg

SEQ ID NO: 5925 - DNA, 4162 bp, Zea Mays
ctcgccgaccgcggcggcgcagcagcagagggagaaggcgacgtcgcaggtgtggcgggcggtggtggggtggatcggcttccttgttcaggttctgcttcagatcctccggggcacgccgtcctgcgcccaactctttccttcggcggcgtccggtacccgctcctcttcgggcctgcggcctcgaactcgtcgccggaggtggcctccgtccgtccagctctgaggcgggcccatggaaatcgttgccatatcagatcagcttcgccacggaccccatctgcgacccccggtgacgcgctccgcccacagctctgaggcgggcccatggaaatcgttgccatatcagatcagcttcgccacggaccccatctgcgacccccggtgacgcgctccgcccaccgcccaccgccgcccgggaatggctcgagcgctgctcctgctgcgagtagctgtagctcgctaccctcctctcccggcctcacccgcgctcctccagccgcagccgctgctgcgctgccacgcgccctcccagtacaaatcccagctccgcttcctctcctccctctcctcgtccgtgcccaacagctcagatgctcccagcgacggcgggggcgaccgcgacggggaagaagatggcgcgaagagtggcagccacgtcgattacttggggatgagcgacgaggagctcatggagcagtgcgatatgggcacgttcaaggcgtccggccccggcggccagcactgcaacaagcgcgagtccgccgtccggctgaaacaccttcccatcggcatcatcgcccaggctgtggaggatcgatcacaacataagaaccgagcgtctgctttatctcggcttcgaaccctgattgctcttaaagttaggaggccgataaacctggaagactacactccacctgttgagcttcttcagatattacccctgaagtccagcgttagaggaaatgatgttggcccccaaatcggtccaaataactcaaaattttctccaggaatgcaagcattattagacctgctgtttgctgttgaagattctgtatcagatgcagcaaagattttaggcctaagcaccggtgctttgtcaagattgattctgtcagatgattctctccgaacggccgcgaatgaactgcgagcttcgaagtgtttctttgattgcagggcaccggtgctgtactacgtgctcctgacgttgcaggacagcgtgcacaaggtcttctacgccgtcgtcgaggccgctgcagttcgcgcagacaacagccatcttggagggttggcgaggtatccggtctctgcaactcttccacagattggatccagattattccttacatggggtgtcttctggagttttcctgaggtatcgccactagcaaattttcgtgttttcatatatgacaccatttttaggaatacatcttaatttgtacatgaactttagagtttccaatttataattttaaattttagattagatacatatctatgtgttgttgtttggcgggacctcgaattatgacgcagttctaggtttaatagcatttgctagaactagagaacacatgtgttagatgattatgggacttttaggactaaggttagtcgattatttaattttttattccaataatggaataagaaactatgagtgggtattgtaacaagtttctacagcaggcgtattagaaattgataaatagcgctttttaccctatttcaactgggctgttctattatatttctggacctgcaattggatgttgatgttatgttcttgccataaagtccaatgtatcgtgctagctgtacactgatctgtaacaggtgattgactgactcgagaatttgccgacgcttgaagaaggacctaatgtgagcttttacatacttgatgaacagcttgagctcttgagcaaggtgctgaatgcaggggatgacatgattggtgttgagtgcttagaagaagattgtgatggcaaggttctatttgtttgaggttgcttcaccattccccaaagcacattgcatcttgttttagtgtttttttgattgccgtcgtcgaggccgctgcagttcgcgcagacaacagccatcttggaggtatctaattccaatattgtatgtctcggttgaacttgtgaaggcgttgcaagcacatatcattaactgggatattcatatgtttgatgaggagatcggcaataccactcagaatgaagatggtcaaaatcttgatgttttctttggttgcatccgcattctggactattcctgacagcatttaagtttttattacggttcaacggtcgtccagcgtaatccttttacaaccatgggtggcaagtttgaccatgcagatcgtttgttccaaagcattgagaacgcttacataaatagcttatcaaatacaagtgacgtcaaagagcttattccagaattcttttacatgcccgagtttcttgaaaattcaaattcatatcatcttggtgtcaagcaggatggggaacctataggcgatgttgctctccctccatgggcaaaggatgataactcaagtgacgagtttgacaaagattctattgagagtgatgatagatctcttgaagagctaagctgggagacactagaacttcttgtggtacctcatatattcagataattgggcaacggtgtgtgtatatgttcagattcagaaagtgaggacaatatagcgtttgcagcagtggtcgtcgccctgtgcagggagggcctgctgatcagagatcaagagggaaagcagaagacacgttgtgccgggaggaaacacacgacgaagtagagacttagaagcaataagctaaatatttagacaactttaattcgagcactccaagaggtgtctcaaacaactggttaattcgttttatgaccaaaagaggaaaaatggccatctaatagttttgtaaaacaactccctaaagataagcacttgcttaatctccccctcaactcgccaacatgtgtgtgccttctgcgcttgctatttgcttgggtagttttgtaaaacaactccctaaagataagcacttgcataatctccccctcaactcgccaacatgtgtgccttctgcgcttgctatttgcttgggtgcccctcctctggttgtacctgcaccctcctgtccatctcgggaatatatcaaatacaaaccacgttttggtgcaaaccctgtgtaaacctactaaaaaaagtttcaaaaaattctaaaaaaaaacatgaatgtacatctcagcttacctcatctatatacaaaattttatgatcaaattcatcttactctagcagttacaaaaaagacaaattttggtgcatttgaactattaccgtttatcagaaattttgtcttttttgtaactgctaaagtaagatgaatttgaccatgaaattttgtatatggatgaggtaagctgagatgtacattcatgtctttttttagaattttttaaaactttttttagtaggtttacatagggtttgcacaaaaacttggtttgcattcgatatgtttccatccatcttctcctcctgctcgattttttttttgagtttttggaagctaccctcctatctctttccttaaaaccgcaacccctttccctccgcgccctcacttcacggctgccaagaagtcttcaacgcccgacgcgtggccgcacagggcgaggtctcgctcgatggccaggcttggccttcgtgccaccacccacccacgcttcctcaccaccgtggagatggatgtgtcgctgctgtggtggccctagcttctgcgtgggcccacgtgtagatgccgctggagaagatttattagggcgttcgatggtagcctcctcgccccagtacgctgacgtgcgcctcaacactgcccccacgtcccagcagcagcactaagggctagtttgggagccaaaaaactgaaggggttttatggctcccaaactagtcctaagacactaacgtcagcgtgttgctcccctcgtcgaccatgtgggtacgttccccatttgttttctccttccttgtcctcgccgttccccatttcgcatttctacatccgtacctcggcatttcccctaagtctgccttcctctgtcgacccgtcgg

SEQ ID NO: 5926 - DNA, 2394 bp, Zea Mays
ctcgccgaccgcggcggcgcagcagcagagggagaaggcgacgtcgcaggtgtggcgggcggtggtggggtggatcggcttccttgttcaggttctgcttcagatcctccggggcacgccgtcctgcgcccaactctttccttcggcggcgtccggtacccgctcctcttcgggcctgcggcctcgaactcgtcgccggaggtggcctccgtccgtccagctctgaggcgggcccatggaaatcgttgccatatcagatcagcttcgccacggaccccatctgcgacccccggtgacgcgctccgcccacagctctgaggcgggcccatggaaatcgttgccatatcagatcagcttcgccacggaccccatctgcgacccccggtgacgcgctccgcccaccgcccaccgccgcccgggaatggctcgagcgctgctcctgctgcgagtagctgtagctcgctaccctcctctcccggcctcacccgcgctcctccagccgcagccgctgctgcgctgccacgcgccctcccagtacaaatcccagctccgcttcctctcctccctctcctcgtccgtgcccaacagctcagatgctcccagcgacggcgggggcgaccgcgacggggaagaagatggcgcgaagagtggcagccacgtcgattacttggggatgagcgacgaggagctcatggagcagtgcgatatgggcacgttcaaggcgtccggccccggcggccagcactgcaacaagcgcgagtccgccgtccggctgaaacaccttcccatcggcatcatcgcccaggctgtggaggatcgatcacaacataagaaccgagcgtctgctttatctcggcttcgaaccctgattgctcttaaagttaggaggccgataaacctggaagactacactccacctgttgagcttcttcagatattacccctgaagtccagcgttagaggaaatgatgttggcccccaaatcggtccaaataactcaaaattttctccaggaatgcaagcattattagacctgctgtttgctgttgaagattctgtatcagatgcagcaaagattttaggcctaagcaccggtgctttgtcaagattgattctgtcagatgattctctccgaacggccgcgaatgaactgcgagcttcgaagtgtttctttgattgcagggcaccggtgctgtactacgtgctcctgacgttgcaggacagcgtgcacaaggtcttctacgccgtcgtcgaggccgctgcagttcgcgcagacaacagccatcttggagggttggcgaggtatccggtctctgcaactcttccacagattggatccagattattccttacatggggtgtcttctggagttttcctgagatggccccattcacctctaccaacaggtatctaattccaatattgtatgtctcggttgaacttgtgaaggcgttgcaagcacatatcattaactgggatattcatatgtttgatgaggagatcggcaataccactcaggtgcacacatcaaacttgaatgagccaatgaggaccttggccgggttcatacaattttgtctgataaaaccgggtggcaagtttgaccatgcagatcgtttgttccaaagcattgagaacgcttacataaatagcttatcaaatacaagtgacgtcaaagagcttattccagaattcttttacatgcccgagtttcttgaaaattcaaattcatatcatcttggtgtcaagcaggatggggaacctataggcgatgttgctctccctccatgggcaaaggatgataactcaagtgacgagtttgacaaagattctattgagagtgatgatagatctcttgaagagctaagctgggagacactagaacttcttgtggtacctcatatattcagataattgggcaacggtgtgtgtatatgttcagattcagaaagtgaggacaatatagcgtttgcagcagtgtgccgaagatgatccacagccgatgctgttaacaaacacatacaggaaggtagaacttcgggtagtcgacgtgcataccctactaatgaagctggactagaccataaggagtcttcgaggctcatttcgtcgaagatagaaggaaaagaccactgtacccttggcatgtataatagtctaaatgtgtaggcttaagggcataattgaaaattcatcgaaaatgtatcccacgcctataaatagaggaacagtgccatgcattgttcagactttttgttcaagggtagaattcatttctcactatacgaagctgtaatctctctacccctctcattttagttttacgaagctcaaggtactcatgtgaattcttgttccataaaagaagaaatatatctatgtgacttctttta

SEQ ID NO: 5927 - DNA, 3159 bp, Zea Mays
ctcgccgaccgcggcggcgcagcagcagagggagaaggcgacgtcgcaggtgtggcgggcggtggtggggtggatcggcttccttgttcaggttctgcttcagatcctccggggcacgccgtcctgcgcccaactctttccttcggcggcgtccggtacccgctcctcttcgggcctgcggcctcgaactcgtcgccggaggtggcctccgtccgtccagctctgaggcgggcccatggaaatcgttgccatatcagatcagcttcgccacggaccccatctgcgacccccggtgacgcgctccgcccacagctctgaggcgggcccatggaaatcgttgccatatcagatcagcttcgccacggaccccatctgcgacccccggtgacgcgctccgcccaccgcccaccgccgcccgggaatggctcgagcgctgctcctgctgcgagtagctgtagctcgctaccctcctctcccggcctcacccgcgctcctccagccgcagccgctgctgcgctgccacgcgccctcccagtacaaatcccagctccgcttcctctcctccctctcctcgtccgtgcccaacagctcagatgctcccagcgacggcgggggcgaccgcgacggggaagaagatggcgcgaagagtggcagccacgtcgattacttggggatgagcgacgaggagctcatggagcagtgcgatatgggcacgttcaaggcgtccggccccggcggccagcactgcaacaagcgcgagtccgccgtccggctgaaacaccttcccatcggcatcatcgcccaggctgtggaggatcgatcacaacataagaaccgagcgtctgctttatctcggcttcgaaccctgattgctcttaaagttaggaggccgataaacctggaagactacactccacctgttgagcttcttcagatattacccctgaagtccagcgttagaggaaatgatgttggcccccaaatcggtccaaataactcaaaattttctccaggaatgcaagcattattagacctgctgtttgctgttgaagattctgtatcagatgcagcaaagattttaggcctaagcaccggtgctttgtcaagattgattctgtcagatgattctctccgaacggccgcgaatgaactgcgagcttcgaagtgtttctttgattgcagggcaccggtgctgtactacgtgctcctgacgttgcaggacagcgtgcacaaggtcttctacgccgtcgtcgaggccgctgcagttcgcgcagacaacagccatcttggagggttggcgaggtatccggtctctgcaactcttccacagattggatccagattattccttacatggggtgtcttctggagttttcctgaggtatcgccactagcaaattttcgtgttttcatatatgacaccatttttaggaatacatcttaatttgtacatgaactttagagtttccaatttataattttaaattttagattagatacatatctatgtgttgttgtttggcgggacctcgaattatgacgcagttctaggtttaatagcatttgctagaactagagaacacatgtgttagatgattatgggacttttaggactaaggttagtcgattatttaattttttattccaataatggaataagaaactatgagtgggtattgtaacaagtttctacagcaggcgtattagaaattgataaatagcgctttttaccctatttcaactgggctgttctattatatttctggacctgcaattggatgttgatgttatgttcttgccataaagtccaatgtatcgtgctagctgtacactgatctgtaacaggtgattgactgactcgagaatttgccgacgcttgaagaaggacctaatgtgagcttttacatacttgatgaacagcttgagctcttgagcaaggtgctgaatgcaggggatgacatgattggtgttgagtgcttagaagaagattgtgatggcaaggttctatttgtttgaggttgcttcaccattccccaaagcacattgcatcttgttttagtgtttttttgattgccgtcgtcgaggccgctgcagttcgcgcagacaacagccatcttggaggtatctaattccaatattgtatgtctcggttgaacttgtgaaggcgttgcaagcacatatcattaactgggatattcatatgtttgatgaggagatcggcaataccactcagaatgaagatggtcaaaatcttgatgttttctttggttgcatccgcattctggactattcctgacagcatttaagtttttattacggttcaacggtcgtccagcgtaatccttttacaaccatgggtggcaagtttgaccatgcagatcgtttgttccaaagcattgagaacgcttacataaatagcttatcaaatacaagtgacgtcaaagagcttattccagaattcttttacatgcccgagtttcttgaaaattcaaattcatatcatcttggtgtcaagcaggatggggaacctataggcgatgttgctctccctccatgggcaaaggatgataactcaagtgacgagtttgacaaagattctattgagagtgatgatagatctcttgaagagctaagctgggagacactagaacttcttgtggtacctcatatattcagataattgggcaacggtgtgtgtatatgttcagattcagaaagtgaggacaatatagcgtttgcagcagtgtgccgaagatgatccacagccgatgctgttaacaaacacatacaggaaggtagaacttcgggtagtcgacgtgcataccctactaatgaagctggactagaccataaggagtcttcgaggctcatttcgtcgaagatagaaggaaaagaccactgtacccttggcatgtataatagtctaaatgtgtaggcttaagggcataattgaaaattcatcgaaaatgtatcccacgcctataaatagaggaacagtgccatgcattgttcagactttttgttcaagggtagaattcatttctcactatacgaagctgtaatctctctacccctctcattttagttttacgaagctcaaggtactcatgtgaattcttgttccataaaagaagaaatatatctatgtgacttctttta

SEQ ID NO: 5928 - DNA, 1906 bp, Zea Mays
gtaatccttttacaaccatgggtggcaagtttgaccatgcagatcgtttgttccaaagcattgagaacgcttacataaatagcttatcaaatacaagtgacgtcaaagagcttattccagaattcttttacatgcccgagtttcttgaaaattcaaattcatatcatcttggtgtcaagcaggatggggaacctataggcgatgttgctctccctccatgggcaaaggatgataactcaagtgacgagtttgacaaagattctattgagagtgatgatagatctcttgaagagctaagctgggagacactagaacttcttgtggtacctcatatattcagatgcaggtatccaagctctgtgctaccgattaattgctgaaaactgaacttgggttcatgttaaatattcccaaggaaatataattgggcaacggtgtgtgtatatgttcagattcagaaagtgaggacaatatagcgtttgcagcagtggtcgtcgccctgtgcagggagggcctgctgatcagagatcaagagggaaagcagaagacacgttgtgccgggaggaaacacacgacgaagtagagacttagaagcaataagctaaatatttagacaactttaattcgagcactccaagaggtgtctcaaacaactggttaattcgttttatgaccaaaagaggaaaaatggccatctaatagttttgtaaaacaactccctaaagataagcacttgcttaatctccccctcaactcgccaacatgtgtgtgccttctgcgcttgctatttgcttgggtagttttgtaaaacaactccctaaagataagcacttgcataatctccccctcaactcgccaacatgtgtgccttctgcgcttgctatttgcttgggtgcccctcctctggttgtacctgcaccctcctgtccatctcgggaatatatcaaatacaaaccacgttttggtgcaaaccctgtgtaaacctactaaaaaaagtttcaaaaaattctaaaaaaaaacatgaatgtacatctcagcttacctcatctatatacaaaattttatgatcaaattcatcttactctagcagttacaaaaaagacaaattttggtgcatttgaactattaccgtttatcagaaattttgtcttttttgtaactgctaaagtaagatgaatttgaccatgaaattttgtatatggatgaggtaagctgagatgtacattcatgtctttttttagaattttttaaaactttttttagtaggtttacatagggtttgcacaaaaacttggtttgcattcgatatgtttccatccatcttctcctcctgctcgattttttttttgagtttttggaagctaccctcctatctctttccttaaaaccgcaacccctttccctccgcgccctcacttcacggctgccaagaagtcttcaacgcccgacgcgtggccgcacagggcgaggtctcgctcgatggccaggcttggccttcgtgccaccacccacccacgcttcctcaccaccgtggagatggatgtgtcgctgctgtggtggccctagcttctgcgtgggcccacgtgtagatgccgctggagaagatttattagggcgttcgatggtagcctcctcgccccagtacgctgacgtgcgcctcaacactgcccccacgtcccagcagcagcactaagggctagtttgggagccaaaaaactgaaggggttttatggctcccaaactagtcctaagacactaacgtcagcgtgttgctcccctcgtcgaccatgtgggtacgttccccatttgttttctccttccttgtcctcgccgttccccatttcgcatttctacatccgtacctcggcatttcccctaagtctgccttcctctgtcgacccgtcgg

SEQ ID NO: 5929 - DNA, 433 bp, Zea Mays
cttctgcgtacagttatgtagcccagcttcataacttgaaggatgataactcaagtgacgagtttgacaaagattctattgagagtgatgatagatctcttgaagagctaagctgggagacactagaacttcttgtggtacctcatatattcagacgaagcacatggagatcaaccttcacttcgtccgtgagcgtgtcgccgacggtgatgttcgcattctcagcatcccgaccacttcgtagtttgccgacattttcaccaaggggctgccgtcgagtgtattcactgagtttcgatctagtctcaacatctgtacaggatagaattgagactgtaggaggtgttagactcctgctaagggttaggcctgggccttcttgtatttacctgattacccctatgtaatgggcttggcccacctaactgccata

SEQ ID NO: 5930 - DNA, 3356 bp, Zea Mays
gtagaccccaagccccaaacagctagctcttccccacttcgcctgcggcggcgctccctcccgccggtttgctcgctgggccctggcgcgttcgtctcaacgaagcactcgcaccgccggccaccccgaagcaatcgccactgctatctcggtgtcctctccctccacccggactcggattgacttcctatctctcgtcgggggccaagcatgatggaggtgggtttgaacccgggggaggagctggacttcggggacaaccaggaggacgacgacgacgcgggggacatctcacccgccagcaaggagctggccgccatggtggcggcggcggcggcggcggagacagtcgagcttgacgacggcggcgccggtgtcgaggcggccgcctccgctgccgccgccgcgtcgtcgtcgtcagcggcggcgcggtacggggacgaccgcacgccgcgggacgggatggtgttcaagtcctacgaggaggtgctcaacttctacaagcgctatgccctgcgcacgggcttcggcgtctgcgtcaagaagtcctccttcaccaaggccggcctctgccgccgcctcgtcctcgtctgcaacaagtggggcaacggcaaggaggacgcctgctaccaggccaggcccacggccaagaccaactgccaggccaccgtcgtcgccagactcctgggggacgacttgctgcacctcacggatgtgaacctggagcacaaccacgcgctcaacccatccgccgcacgcttcctcaggtgctacaagacgctgcctagcgggttgagcaaagatctcgtggtgagggctgccagaggggaatgctcggtggcgggtgacatcgatgtcccgatatttgatgaatgggggcggcttaagaccgggcaagctgatgtcctggccatcaacgctttcttcacccagatgcaggcaaagcttccaaactccttctatgtcatggacttctatgtggagggccatctgaggagtgttctctgggctgattccagatccagggcagcgtatcagtatttcagcgacgctgtttggattgatacggcatgcttaaggaacaagtatcatgtcccgcttgtttcgtttctgggtgtcaatcatcatggtcagcttgtattgctaggctgtggattgctgtcagatgagagcacagagagcttcttgtggctgttcaagtcatggttaacttgtatgaagggacagcctccaaatgccatagttaccgatgaatgtgtggcgataaaagccgcagttcgagaagtgtttccgaagacacgccatagaataagtgattggcatgtagtgagaagtatttcagaaaaaataggtgacttgccagaatatgaagcgatgagaaccaatttggttactgtaatatatgattctttaaacgacaatgagtttgaggcaaggtggaagaactggattgatagatttagccttcaggataatgaatggatcacctttctgtatgagaatcggcacttgtgggcccctgccttccttagggacactttctcagctgggctctgtactgttagccagcgtgaaagtccaagtacattttttgaggatgcagtcagttcagagaccacattggtgacgttccttgccagctacatgacacttttggataacaaatacaaaatggagcaacaagatgattttgattcattaaatagcagcaggctcctgatatcaaagtaccaaatggaagaacagctatccagattgtacaccttgaatatgtttatgaagttccaggatgagctaaaggcaaccatgcattgtcaagttcagctggatgggtcagcatcttcttttatagttattgatttgactgaagcagggagtgaaatgctgaataaaaagtacgaggttgttcactgcatggcgacaaacaggatggagtgtaactgtggcctatttcagtttcatggtatcgtttgtcggcatgcattatctgtgcttaaatggcagcaagtatacgacatccccccttgctatgtacttaacagtttcttcgtctcgtcgagattgggatggtatccgacgagaagtataggcatgcagtaaggcttcttaaagacatgaaagagactcttcttgatgataatctgtgccgtgatttggagcagaagcttacaccagctgagcgtgcaattgtgaatggtgacaaccatacacaacctggttcatctgagggcggtgctgcaaaaaagcggcgaggccgtcctcctaaaaagaataaagagataaacatggattccatggaccctttactagtatcctcggatgtaactcagaaggacacttttcattctgcttcaactacctcaaaccttggcactcatgtccggacgcatggcattgttgatctcatggaagaagtcaatccaagcgagctgtcatttgatagccgttacggggtgcaatctggccactcgcaccattttggtaataaccaactaaatacaggaaacacactgcggtttggccaatctacatcagcagcagagcagtctagggttcagtgggtgtttcataatggcatgtatcaggatgaccaagtgacttacggcagacggacatcataacaattggacttgttaggctccagggtttgccgtttcaggaaatcgggtcaggggtcctcggtttttggactttggagcaccgatgacttaagtgatcctccattgtgcttcgaacgttgagccttgggagatgcatgctggaactggctgctggtgatggtggcggcggcggcatctgaaggcaggatacactgtagaaacagaagtttgccactaagccagccgaacgcttccataagccatcaatgttagccaactaactgacatgtgtatatacacacacatcatctcagaaagaagccgtcattccgtgggaagtgctgcgtaaactcctgataataggcgtggtcagcgtcggacaagaaattgagagcttcattttctttctttcacgtgggaaagatacaattttgttgcctcctgacgatcagctaaaagggggaggaaatatccatgctcttcatctgggaaagatgcaaaaaccatccagctttatcatctttgctccttcagtaccgtgcctggaatcctgctttaccaatttttagcacccaaaaaaagaaaaacaaaaaaaaactatctgtggcgccccttgacacaaactattttcccggttctaaactattaagagatgtagtaatgcaaaccatgaaaaatccacggaggccagaaatcttgcggacaaattctgtgggtctgtttgtcggctcagccatgaggcgcaactttaatgac

SEQ ID NO: 5931 - DNA, 3371 bp, Zea Mays
cccaagccccaaacagctagctcttccccacttcgcctgcggcggcgctccctcccgccggtttgctcgctgggccctggcgcgttcgtctcaacgaagcactcgcaccgccggccaccccgaagcaatcgccactgctatctcggtgtcctctccctccacccggactcggattgacttcctatctctcgtcgggggccaagcatgatggaggtgggtttgaacccgggggaggagctggacttcggggacaaccaggaggacgacgacgacgcgggggacatctcacccgccagcaaggagctggccgccatggtggcggcggcggcggcggcggagacagtcgagcttgacgacggcggcgccggtgtcgaggcggccgcctccgctgccgccgccgcgtcgtcgtcgtcagcggcggcgcggtacggggacgaccgcacgccgcgggacgggatggtgttcaagtcctacgaggaggtgctcaacttctacaagcgctatgccctgcgcacgggcttcggcgtctgcgtcaagaagtcctccttcaccaaggccggcctctgccgccgcctcgtcctcgtctgcaacaagtggggcaacggcaaggaggacgcctgctaccaggccaggcccacggccaagaccaactgccaggccaccgtcgtcgccagactcctgggggacgacttgctgcacctcacggatgtgaacctggagcacaaccacgcgctcaacccatccgccgcacgcttcctcaggtgctacaagacgctgcctagcgggttgagcaaagatctcgtggtgagggctgccagaggggaatgctcggtggcgggtgacatcgatgtcccgatatttgatgaatgggggcggcttaagaccgggcaagctgatgtcctggccatcaacgctttcttcacccagatgcaggcaaagcttccaaactccttctatgtcatggacttctatgtggagggccatctgaggagtgttctctgggctgattccagatccagggcagcgtatcagtatttcagcgacgctgtttggattgatacggcatgcttaaggaacaagtatcatgtcccgcttgtttcgtttctgggtgtcaatcatcatggtcagcttgtattgctaggctgtggattgctgtcagatgagagcacagagagcttcttgtggctgttcaagtcatggttaacttgtatgaagggacagcctccaaatgccatagttaccgatgaatgtgtggcgataaaagccgcagttcgagaagtgtttccgaagacacgccatagaataagtgattggcatgtagtgagaagtatttcagaaaaaataggtgacttgccagaatatgaagcgatgagaaccaatttggttactgtaatatatgattctttaaacgacaatgagtttgaggcaaggtggaagaactggattgatagatttagccttcaggataatgaatggatcacctttctgtatgagaatcggcacttgtgggcccctgccttccttagggacactttctcagctgggctctgtactgttagccagcgtgaaagtccaagtacattttttgaggatgcagtcagttcagagaccacattggtgacgttccttgccagctacatgacacttttggataacaaatacaaaatggagcaacaagatgattttgattcattaaatagcagcaggctcctgatatcaaagtaccaaatggaagaacagctatccagattgtacaccttgaatatgtttatgaagttccaggatgagctaaaggcaaccatgcattgtcaagttcagctggatgggtcagcatcttcttttatagttattgatttgactgaagcagggagtgaaatgctgaataaaaagtacgaggttgttcactgcatggcgacaaacaggatggagtgtaactgtggcctatttcagtttcatggtatcgtttgtcggcatgcattatctgtgcttaaatggcagcaagtatacgacatccccccttgctatgtacttaacagtttcttcgtctcgtcgagattgggatggtatccgacgagaagtataggcatgcagtaaggcttcttaaagacatgaaagagactcttcttgatgataatctgtgccgtgatttggagcagaagcttacaccagctgagcgtgcaattgtgaatggtgacaaccatacacaacctggttcatctgagggcggtgctgcaaaaaagcggcgaggccgtcctcctaaaaagaataaagagataaacatggattccatggtaaacccgtatggaaataaggaccctttactagtatcctcggatgtaactcagaaggacacttttcattctgcttcaactacctcaaaccttggcactcatgtccggacgcatggcattgttgatctcatggaagaagtcaatccaagcgagctgtcatttgatagccgttacggggtgcaatctggccactcgcaccattttggtaataaccaactaaatacaggaaacacactgcggtttggccaatctacatcagcagcagagcagtctagggttcagtgggtgtttcataatggcatgtatcaggatgaccaagtgacttacggcagacggacatcataacaattggacttgttaggctccagggtttgccgtttcaggaaatcgggtcaggggtcctcggtttttggactttggagcaccgatgacttaagtgatcctccattgtgcttcgaacgttgagccttgggagatgcatgctggaactggctgctggtgatggtggcggcggcggcatctgaaggcaggatacactgtagaaacagaagtttgccactaagccagccgaacgcttccataagccatcaatgttagccaactaactgacatgtgtatatacacacacatcatctcagaaagaagccgtcattccgtgggaagtgctgcgtaaactcctgataataggcgtggtcagcgtcggacaagaaattgagagcttcattttctttctttcacgtgggaaagatacaattttgttgcctcctgacgatcagctaaaagggggaggaaatatccatgctcttcatctgggaaagatgcaaaaaccatccagctttatcatctttgctccttcagtaccgtgcctggaatcctgctttaccaatttttagcacccaaaaaaagaaaaacaaaaaaaaactatctgtggcgccccttgacacaaactattttcccggttctaaactattaagagatgtagtaatgcaaaccatgaaaaatccacggaggccagaaatcttgcggacaaattctgtgggtctgtttgtcggctcagccatgaggcgcaactttaatgac

SEQ ID NO: 5932 - DNA, 3451 bp, Zea Mays
caagccccaaacagctagctcttccccacttcgcctgcggcggcgctccctcccgccggtttgctcgctgggccctggcgcgttcgtctcaacgaagcactcgcaccgccggccaccccgaagcaatcgccactgctatctcggtgtcctctccctccacccggactcggattgacttcctatctctcgtcgcagggggccaagcatgatggaggtgggtttgaacccgggggaggagctggacttcggggacaaccaggaggacgacgacgacgcgggggacatctcacccgccagcaaggagctggccgccatggtggcggcggcggcggcggcggagacagtcgagcttgacgacggcggcgccggtgtcgaggcggccgcctccgctgccgccgccgcgtcgtcgtcgtcagcggcggcgcggtacggggacgaccgcacgccgcgggacgggatggtgttcaagtcctacgaggaggtgctcaacttctacaagcgctatgccctgcgcacgggcttcggcgtctgcgtcaagaagtcctccttcaccaaggccggcctctgccgccgcctcgtcctcgtctgcaacaagtggggcaacggcaaggaggacgcctgctaccaggccaggcccacggccaagaccaactgccaggccaccgtcgtcgccagactcctgggggacgacttgctgcacctcacggatgtgaacctggagcacaaccacgcgctcaacccatccgccgcacgcttcctcaggtgctacaagacgctgcctagcgggttgagcaaagatctcgtggtgagggctgccagaggggaatgctcggtggcgggtgacatcgatgtcccgatatttgatgaatgggggcggcttaagaccgggcaagctgatgtcctggccatcaacgctttcttcacccagatgcaggcaaagcttccaaactccttctatgtcatggacttctatgtggagggccatctgaggagtgttctctgggctgattccagatccagggcagcgtatcagtatttcagcgacgctgtttggattgatacggcatgcttaaggaacaagtatcatgtcccgcttgtttcgtttctgggtgtcaatcatcatggtcagcttgtattgctaggctgtggattgctgtcagatgagagcacagagagcttcttgtggctgttcaagtcatggttaacttgtatgaagggacagcctccaaatgccatagttaccgatgaatgtgtggcgataaaagccgcagttcgagaagtgtttccgaagacacgccatagaataagtgattggcatgtagtgagaagtatttcagaaaaaataggtgacttgccagaatatgaagcgatgagaaccaatttggttactgtaatatatgattctttaaacgacaatgagtttgaggcaaggtggaagaactggattgatagatttagccttcaggataatgaatggatcacctttctgtatgagaatcggcacttgtgggcccctgccttccttagggacactttctcagctgggctctgtactgttagccagcgtgaaagtccaagtacattttttgaggatgcagtcagttcagagaccacattggtgacgttccttgccagctacatgacacttttggataacaaatacaaaatggagcaacaagatgattttgattcattaaatagcagcaggctcctgatatcaaagtaccaaatggaagaacagctatccagattgtacaccttgaatatgtttatgaagttccaggatgagctaaaggcaaccatgcattgtcaagttcagctggatgggtcagcatcttcttttatagttattgatttgactgaagcagggagtgaaatgctgaataaaaagtacgaggttgttcactgcatggcgacaaacaggatggagtgtaactgtggcctatttcagtttcatggtatcgtttgtcggcatgcattatctgtgcttaaatggcagcaagtatacgacatccccccttgctatgtacttaacaggtggcgggctgacttcaagcagttgcactacctagataatccatcaaaggatttagcaacaagtaatcatgtcgagcgttatgattatatttctttgcagtttcttcgtctcgtcgagattgggatggtatccgacgagaagtataggcatgcagtaaggcttcttaaagacatgaaagagactcttcttgatgataatctgtgccgtgatttggagcagaagcttacaccagctgagcgtgcaattgtgaatggtgacaaccatacacaacctggttcatctgagggcggtgctgcaaaaaagcggcgaggccgtcctcctaaaaagaataaagagataaacatggattccatggaccctttactagtatcctcggatgtaactcagaaggacacttttcattctgcttcaactacctcaaaccttggcactcatgtccggacgcatggcattgttgatctcatggaagaagtcaatccaagcgagctgtcatttgatagccgttacggggtgcaatctggccactcgcaccattttggtaataaccaactaaatacaggaaacacactgcggtttggccaatctacatcagcagcagagcagtctagggttcagtgggtgtttcataatggcatgtatcaggatgaccaagtgacttacggcagacggacatcataacaattggacttgttaggctccagggtttgccgtttcaggaaatcgggtcaggggtcctcggtttttggactttggagcaccgatgacttaagtgatcctccattgtgcttcgaacgttgagccttgggagatgcatgctggaactggctgctggtgatggtggcggcggcggcatctgaaggcaggatacactgtagaaacagaagtttgccactaagccagccgaacgcttccataagccatcaatgttagccaactaactgacatgtgtatatacacacacatcatctcagaaagaagccgtcattccgtgggaagtgctgcgtaaactcctgataataggcgtggtcagcgtcggacaagaaattgagagcttcattttctttctttcacgtgggaaagatacaattttgttgcctcctgacgatcagctaaaagggggaggaaatatccatgctcttcatctgggaaagatgcaaaaaccatccagctttatcatctttgctccttcagtaccgtgcctggaatcctgctttaccaatttttagcacccaaaaaaagaaaaacaaaaaaaaactatctgtggcgccccttgacacaaactattttcccggttctaaactattaagagatgtagtaatgcaaaccatgaaaaatccacggaggccagaaatcttgcggacaaattctgtgggtctgtttgtcggctcagccatgaggcgcaactttaatgac

SEQ ID NO: 5933 - DNA, 3798 bp, Zea Mays
ctcttccccacttcgcctgcggcggcgctccctcccgccggtttgctcgctgggccctggcgcgttcgtctcaacgaagcactcgcaccgccggccaccccgaagcaatcgccactgctatctcggtgtcctctccctccacccggactcggattgacttcctatctctcgtcgggggccaagcatgatggaggtgggtttgaacccgggggaggagctggacttcggggacaaccaggaggacgacgacgacgcgggggacatctcacccgccagcaaggagctggccgccatggtggcggcggcggcggcggcggagacagtcgagcttgacgacggcggcgccggtgtcgaggcggccgcctccgctgccgccgccgcgtcgtcgtcgtcagcggcggcgcggtacggggacgaccgcacgccgcgggacgggatggtgttcaagtcctacgaggaggtgctcaacttctacaagcgctatgccctgcgcacgggcttcggcgtctgcgtcaagaagtcctccttcaccaaggccggcctctgccgccgcctcgtcctcgtctgcaacaagtggggcaacggcaaggaggacgcctgctaccaggccaggcccacggccaagaccaactgccaggccaccgtcgtcgccagactcctgggggacgacttgctgcacctcacggatgtgaacctggagcacaaccacgcgctcaacccatccgccgcacgcttcctcaggtgctacaagacgctgcctagcgggttgagcaaagatctcgtggtgagggctgccagaggggaatgctcggtggcgggtgacatcgatgtcccgatatttgatgaatgggggcggcttaagaccgggcaagctgatgtcctggccatcaacgctttcttcacccagatgcaggcaaagcttccaaactccttctatgtcatggacttctatgtggagggccatctgaggagtgttctctgggctgattccagatccagggcagcgtatcagtatttcagcgacgctgtttggattgatacggcatgcttaaggaacaagtatcatgtcccgcttgtttcgtttctgggtgtcaatcatcatggtcagcttgtattgctaggctgtggattgctgtcagatgagagcacagagagcttcttgtggctgttcaagtcatggttaacttgtatgaagggacagcctccaaatgccatagttaccgatgaatgtgtggcgataaaagccgcagttcgagaagtgtttccgaagacacgccatagaataagtgattggcatgtagtgagaagtatttcagaaaaaataggtgacttgccagaatatgaagcgatgagaaccaatttggttactgtaatatatgattctttaaacgacaatgagtttgaggcaaggtggaagaactggattgatagatttagccttcaggataatgaatggatcacctttctgtatgagaatcggcacttgtgggcccctgccttccttagggacactttctcagctgggctctgtactgttagccagcgtgaaagtccaagtacattttttgaggatgcagtcagttcagagaccacattggtgacgttccttgccagctacatgacacttttggataacaaatacaaaatggagcaacaagatgattttgattcattaaatagcagcaggctcctgatatcaaagtaccaaatggaagaacagctatccagattgtacaccttgaatatgtttatgaagttccaggatgagctaaaggcaaccatgcattgtcaagttcagctggatgggtcagcatcttcttttatagttattgatttgactgaagcagggagtgaaatgctgaataaaaagtacgaggttgttcactgcatggcgacaaacaggatggagtgtaactgtggcctatttcagtttcatggtatcgtttgtcggcatgcattatctgtgcttaaatggcagcaagtatacgacatccccccttgctatgtacttaacaggtggcgggctgacttcaagcagttgcactacctagataatccatcaaaggatttagcaacaagtaatcatgtcgagcgttatgattatatttctttgcagtttcttcgtctcgtcgagattgggatggtatccgacgagaagtataggcatgcagtaaggcttcttaaagacatgaaagagactcttcttgatgataatctgtgccgtgatttggagcagaagcttacaccagctgagcgtgcaattgtgaatggtgacaaccatacacaacctggttcatctgagggcggtgctgcaaaaaagcggcgaggccgtcctcctaaaaagaataaagagataaacatggattccatggaccctttactagtatcctcggatgtaactcagaaggacacttttcattctgcttcaactacctcaaaccttggcactcatgtccggacgcatggcattgttgatctcatggaagaagtcaatccaagcgagctgtcatttgatagccgttacggggtgcaatctggccactcgcaccattttggtaataaccaactaaatacaggaaacacactgcggtttggccaatctacatcagcagcagagcagtctagggttcagtgggtgtttcataatggcatgtatcaggatgaccaagtgacttacggcagacggacatcataacaattggacttgttaggctccagggtttgccgtttcagatagaggagtgactgaaactttgttgagaaaatatagcattttacataagaaccctgtggaacaggaagtcaggaaggccatgaaaatctgcttaataagagctccatcggcatacagtatttgttatggaagctttatgtgtttaggccttgttcgtttaggaggtggatcgaggggaattagaggaattgaataggaagggatttgatccccctcaatcccctccgatccccatacaaccgaacatggcctgagtagaaagttttcgtctaagcggcattcagtgatgagctatatttccaaattttcatctgtccattttctgacgattttatttcatgccacatgtcctgcatggaatgtgcaggaaatcgggtcaggggtcctcggtttttggactttggagcaccgatgacttaagtgatcctccattgtgcttcgaacgttgagccttgggagatgcatgctggaactggctgctggtgatggtggcggcggcggcatctgaaggcaggatacactgtagaaacagaagtttgccactaagccagccgaacgcttccataagccatcaatgttagccaactaactgacatgtgtatatacacacacatcatctcagaaagaagccgtcattccgtgggaagtgctgcgtaaactcctgataataggcgtggtcagcgtcggacaagaaattgagagcttcattttctttctttcacgtgggaaagatacaattttgttgcctcctgacgatcagctaaaagggggaggaaatatccatgctcttcatctgggaaagatgcaaaaaccatccagctttatcatctttgctccttcagtaccgtgcctggaatcctgctttaccaatttttagcacccaaaaaaagaaaaacaaaaaaaaactatctgtggcgccccttgacacaaactattttcccggttctaaactattaagagatgtagtaatgcaaaccatgaaaaatccacggaggccagaaatcttgcggacaaattctgtgggtctgtttgtcggctcagccatgaggcgcaactttaatgac

SEQ ID NO: 5934 - DNA, 3713 bp, Zea Mays
cccacttcgcctgcggcggcgctccctcccgccggtttgctcgctgggccctggcgcgttcgtctcaacgaagcactcgcaccgccggccaccccgaagcaatcgccactgctatctcggtgtcctctccctccacccggactcggattgacttcctatctctcgtcgggggccaagcatgatggaggtgggtttgaacccgggggaggagctggacttcggggacaaccaggaggacgacgacgacgcgggggacatctcacccgccagcaaggagctggccgccatggtggcggcggcggcggcggcggagacagtcgagcttgacgacggcggcgccggtgtcgaggcggccgcctccgctgccgccgccgcgtcgtcgtcgtcagcggcggcgcggtacggggacgaccgcacgccgcgggacgggatggtgttcaagtcctacgaggaggtgctcaacttctacaagcgctatgccctgcgcacgggcttcggcgtctgcgtcaagaagtcctccttcaccaaggccggcctctgccgccgcctcgtcctcgtctgcaacaagtggggcaacggcaaggaggacgcctgctaccaggccaggcccacggccaagaccaactgccaggccaccgtcgtcgccagactcctgggggacgacttgctgcacctcacggatgtgaacctggagcacaaccacgcgctcaacccatccgccgcacgcttcctcaggtgctacaagacgctgcctagcgggttgagcaaagatctcgtggtgagggctgccagaggggaatgctcggtggcgggtgacatcgatgtcccgatatttgatgaatgggggcggcttaagaccgggcaagctgatgtcctggccatcaacgctttcttcacccagatgcaggcaaagcttccaaactccttctatgtcatggacttctatgtggagggccatctgaggagtgttctctgggctgattccagatccagggcagcgtatcagtatttcagcgacgctgtttggattgatacggcatgcttaaggaacaagtatcatgtcccgcttgtttcgtttctgggtgtcaatcatcatggtcagcttgtattgctaggctgtggattgctgtcagatgagagcacagagagcttcttgtggctgttcaagtcatggttaacttgtatgaagggacagcctccaaatgccatagttaccgatgaatgtgtggcgataaaagccgcagttcgagaagtgtttccgaagacacgccatagaataagtgattggcatgtagtgagaagtatttcagaaaaaataggtgacttgccagaatatgaagcgatgagaaccaatttggttactgtaatatatgattctttaaacgacaatgagtttgaggcaaggtggaagaactggattgatagatttagccttcaggataatgaatggatcacctttctgtatgagaatcggcacttgtgggcccctgccttccttagggacactttctcagctgggctctgtactgttagccagcgtgaaagtccaagtacattttttgaggatgcagtcagttcagagaccacattggtgacgttccttgccagctacatgacacttttggataacaaatacaaaatggagcaacaagatgattttgattcattaaatagcagcaggctcctgatatcaaagtaccaaatggaagaacagctatccagattgtacaccttgaatatgtttatgaagttccaggatgagctaaaggcaaccatgcattgtcaagttcagctggatgggtcagcatcttcttttatagttattgatttgactgaagcagggagtgaaatgctgaataaaaagtacgaggttgttcactgcatggcgacaaacaggatggagtgtaactgtggcctatttcagtttcatggtatcgtttgtcggcatgcattatctgtgcttaaatggcagcaagtatacgacatccccccttgctatgtacttaacagtttcttcgtctcgtcgagattgggatggtatccgacgagaagtataggcatgcagtaaggcttcttaaagacatgaaagagactcttcttgatgataatctgtgccgtgatttggagcagaagcttacaccagctgagcgtgcaattgtgaatggtgacaaccatacacaacctggttcatctgagggcggtgctgcaaaaaagcggcgaggccgtcctcctaaaaagaataaagagataaacatggattccatggtaaacccgtatggaaataaggaccctttactagtatcctcggatgtaactcagaaggacacttttcattctgcttcaactacctcaaaccttggcactcatgtccggacgcatggcattgttgatctcatggaagaagtcaatccaagcgagctgtcatttgatagccgttacggggtgcaatctggccactcgcaccattttggtaataaccaactaaatacaggaaacacactgcggtttggccaatctacatcagcagcagagcagtctagggttcagtgggtgtttcataatggcatgtatcaggatgaccaagtgacttacggcagacggacatcataacaattggacttgttaggctccagggtttgccgtttcagatagaggagtgactgaaactttgttgagaaaatatagcattttacataagaaccctgtggaacaggaagtcaggaaggccatgaaaatctgcttaataagagctccatcggcatacagtatttgttatggaagctttatgtgtttaggccttgttcgtttaggaggtggatcgaggggaattagaggaattgaataggaagggatttgatccccctcaatcccctccgatccccatacaaccgaacatggcctgagtagaaagttttcgtctaagcggcattcagtgatgagctatatttccaaattttcatctgtccattttctgacgattttatttcatgccacatgtcctgcatggaatgtgcaggaaatcgggtcaggggtcctcggtttttggactttggagcaccgatgacttaagtgatcctccattgtgcttcgaacgttgagccttgggagatgcatgctggaactggctgctggtgatggtggcggcggcggcatctgaaggcaggatacactgtagaaacagaagtttgccactaagccagccgaacgcttccataagccatcaatgttagccaactaactgacatgtgtatatacacacacatcatctcagaaagaagccgtcattccgtgggaagtgctgcgtaaactcctgataataggcgtggtcagcgtcggacaagaaattgagagcttcattttctttctttcacgtgggaaagatacaattttgttgcctcctgacgatcagctaaaagggggaggaaatatccatgctcttcatctgggaaagatgcaaaaaccatccagctttatcatctttgctccttcagtaccgtgcctggaatcctgctttaccaatttttagcacccaaaaaaagaaaaacaaaaaaaaactatctgtggcgccccttgacacaaactattttcccggttctaaactattaagagatgtagtaatgcaaaccatgaaaaatccacggaggccagaaatcttgcggacaaattctgtgggtctgtttgtcggctcagccatgaggcgcaactttaatgac

SEQ ID NO: 5935 - DNA, 3875 bp, Zea Mays
gcctgcggcggcgctccctcccgccggtttgctcgctgggccctggcgcgttcgtctcaacgaagcactcgcaccgccggccaccccgaagcaatcgccactgctatctcggtgtcctctccctccacccggactcggattgacttcctatctctcgtcggtaagcaaccctagcccatttgaatcactggtgatgactgtatcctatcgtccccaagagtttgttcgcgtgattccgcctctgattgggtcgtggatcagcagggggccaagcatgatggaggtgggtttgaacccgggggaggagctggacttcggggacaaccaggaggacgacgacgacgcgggggacatctcacccgccagcaaggagctggccgccatggtggcggcggcggcggcggcggagacagtcgagcttgacgacggcggcgccggtgtcgaggcggccgcctccgctgccgccgccgcgtcgtcgtcgtcagcggcggcgcggtacggggacgaccgcacgccgcgggacgggatggtgttcaagtcctacgaggaggtgctcaacttctacaagcgctatgccctgcgcacgggcttcggcgtctgcgtcaagaagtcctccttcaccaaggccggcctctgccgccgcctcgtcctcgtctgcaacaagtggggcaacggcaaggaggacgcctgctaccaggccaggcccacggccaagaccaactgccaggccaccgtcgtcgccagactcctgggggacgacttgctgcacctcacggatgtgaacctggagcacaaccacgcgctcaacccatccgccgcacgcttcctcaggtgctacaagacgctgcctagcgggttgagcaaagatctcgtggtgagggctgccagaggggaatgctcggtggcgggtgacatcgatgtcccgatatttgatgaatgggggcggcttaagaccgggcaagctgatgtcctggccatcaacgctttcttcacccagatgcaggcaaagcttccaaactccttctatgtcatggacttctatgtggagggccatctgaggagtgttctctgggctgattccagatccagggcagcgtatcagtatttcagcgacgctgtttggattgatacggcatgcttaaggaacaagtatcatgtcccgcttgtttcgtttctgggtgtcaatcatcatggtcagcttgtattgctaggctgtggattgctgtcagatgagagcacagagagcttcttgtggctgttcaagtcatggttaacttgtatgaagggacagcctccaaatgccatagttaccgatgaatgtgtggcgataaaagccgcagttcgagaagtgtttccgaagacacgccatagaataagtgattggcatgtagtgagaagtatttcagaaaaaataggtgacttgccagaatatgaagcgatgagaaccaatttggttactgtaatatatgattctttaaacgacaatgagtttgaggcaaggtggaagaactggattgatagatttagccttcaggataatgaatggatcacctttctgtatgagaatcggcacttgtgggcccctgccttccttagggacactttctcagctgggctctgtactgttagccagcgtgaaagtccaagtacattttttgaggatgcagtcagttcagagaccacattggtgacgttccttgccagctacatgacacttttggataacaaatacaaaatggagcaacaagatgattttgattcattaaatagcagcaggctcctgatatcaaagtaccaaatggaagaacagctatccagattgtacaccttgaatatgtttatgaagttccaggatgagctaaaggcaaccatgcattgtcaagttcagctggatgggtcagcatcttcttttatagttattgatttgactgaagcagggagtgaaatgctgaataaaaagtacgaggttgttcactgcatggcgacaaacaggatggagtgtaactgtggcctatttcagtttcatggtatcgtttgtcggcatgcattatctgtgcttaaatggcagcaagtatacgacatccccccttgctatgtacttaacagtttcttcgtctcgtcgagattgggatggtatccgacgagaagtataggcatgcagtaaggcttcttaaagacatgaaagagactcttcttgatgataatctgtgccgtgatttggagcagaagcttacaccagctgagcgtgcaattgtgaatggtgacaaccatacacaacctggttcatctgagggcggtgctgcaaaaaagcggcgaggccgtcctcctaaaaagaataaagagataaacatggattccatggtaaacccgtatggaaataaggaccctttactagtatcctcggatgtaactcagaaggacacttttcattctgcttcaactacctcaaaccttggcactcatgtccggacgcatggcattgttgatctcatggaagaagtcaatccaagcgagctgtcatttgatagccgttacggggtgcaatctggccactcgcaccattttgtttggccaatctacatcagcagcagagcagtctagggttcagtgggtgtttcataatggcatgtatcaggatgaccaagtgacttacggcagacggacatcataacaattggacttgttaggctccagggtttgccgtttcaggtttctttctcttgagattttattcccgtgtgtgccatgatgaggtgatagatagatcatgtctttcttgcaagttaatatactagccattgcttctacagatagaggagtgactgaaactttgttgagaaaatatagcattttacataagaaccctgtggaacaggaagtcaggaaggccatgaaaatctgcttaataagagctccatcggcatacagtatttgttatggaagctttatgtgtttaggccttgttcgtttaggaggtggatcgaggggaattagaggaattgaataggaagggatttgatccccctcaatcccctccgatccccatacaaccgaacatggcctgagtagaaagttttcgtctaagcggcattcagtgatgagctatatttccaaattttcatctgtccattttctgacgattttatttcatgccacatgtcctgcatggaatgtgcaggaaatcgggtcaggggtcctcggtttttggactttggagcaccgatgacttaagtgatcctccattgtgcttcgaacgttgagccttgggagatgcatgctggaactggctgctggtgatggtggcggcggcggcatctgaaggcaggatacactgtagaaacagaagtttgccactaagccagccgaacgcttccataagccatcaatgttagccaactaactgacatgtgtatatacacacacatcatctcagaaagaagccgtcattccgtgggaagtgctgcgtaaactcctgataataggcgtggtcagcgtcggacaagaaattgagagcttcattttctttctttcacgtgggaaagatacaattttgttgcctcctgacgatcagctaaaagggggaggaaatatccatgctcttcatctgggaaagatgcaaaaaccatccagctttatcatctttgctccttcagtaccgtgcctggaatcctgctttaccaatttttagcacccaaaaaaagaaaaacaaaaaaaaactatctgtggcgccccttgacacaaactattttcccggttctaaactattaagagatgtagtaatgcaaaccatgaaaaatccacggaggccagaaatcttgcggacaaattctgtgggtctgtttgtcggctcagccatgaggcgcaactttaatgac

SEQ ID NO: 5936 - DNA, 3381 bp, Zea Mays
gcctgcggcggcgctccctcccgccggtttgctcgctgggccctggcgcgttcgtctcaacgaagcactcgcaccgccggccaccccgaagcaatcgccactgctatctcggtgtcctctccctccacccggactcggattgacttcctatctctcgtcgggggccaagcatgatggaggtgggtttgaacccgggggaggagctggacttcggggacaaccaggaggacgacgacgacgcgggggacatctcacccgccagcaaggagctggccgccatggtggcggcggcggcggcggcggagacagtcgagcttgacgacggcggcgccggtgtcgaggcggccgcctccgctgccgccgccgcgtcgtcgtcgtcagcggcggcgcggtacggggacgaccgcacgccgcgggacgggatggtgttcaagtcctacgaggaggtgctcaacttctacaagcgctatgccctgcgcacgggcttcggcgtctgcgtcaagaagtcctccttcaccaaggccggcctctgccgccgcctcgtcctcgtctgcaacaagtggggcaacggcaaggaggacgcctgctaccaggccaggcccacggccaagaccaactgccaggccaccgtcgtcgccagactcctgggggacgacttgctgcacctcacggatgtgaacctggagcacaaccacgcgctcaacccatccgccgcacgcttcctcaggtgctacaagacgctgcctagcgggttgagcaaagatctcgtggtgagggctgccagaggggaatgctcggtggcgggtgacatcgatgtcccgatatttgatgaatgggggcggcttaagaccgggcaagctgatgtcctggccatcaacgctttcttcacccagatgcaggcaaagcttccaaactccttctatgtcatggacttctatgtggagggccatctgaggagtgttctctgggctgattccagatccagggcagcgtatcagtatttcagcgacgctgtttggattgatacggcatgcttaaggaacaagtatcatgtcccgcttgtttcgtttctgggtgtcaatcatcatggtcagcttgtattgctaggctgtggattgctgtcagatgagagcacagagagcttcttgtggctgttcaagtcatggttaacttgtatgaagggacagcctccaaatgccatagttaccgatgaatgtgtggcgataaaagccgcagttcgagaagtgtttccgaagacacgccatagaataagtgattggcatgtagtgagaagtatttcagaaaaaataggtgacttgccagaatatgaagcgatgagaaccaatttggttactgtaatatatgattctttaaacgacaatgagtttgaggcaaggtggaagaactggattgatagatttagccttcaggataatgaatggatcacctttctgtatgagaatcggcacttgtgggcccctgccttccttagggacactttctcagctgggctctgtactgttagccagcgtgaaagtccaagtacattttttgaggatgcagtcagttcagagaccacattggtgacgttccttgccagctacatgacacttttggataacaaatacaaaatggagcaacaagatgattttgattcattaaatagcagcaggctcctgatatcaaagtaccaaatggaagaacagctatccagattgtacaccttgaatatgtttatgaagttccaggatgagctaaaggcaaccatgcattgtcaagttcagctggatgggtcagcatcttcttttatagttattgatttgactgaagcagggagtgaaatgctgaataaaaagtacgaggttgttcactgcatggcgacaaacaggatggagtgtaactgtggcctatttcagtttcatggtatcgtttgtcggcatgcattatctgtgcttaaatggcagcaagtatacgacatccccccttgctatgtacttaacaggtggcgggctgacttcaagcagttgcactacctagataatccatcaaaggatttagcaacaagtaatcatgtcgagcgttatgattatatttctttgcagtttcttcgtctcgtcgagattgggatggtatccgacgagaagtataggcatgcagtaaggcttcttaaagacatgaaagagactcttcttgatgataatctgtgccgtgatttggagcagaagcttacaccagctgagcgtgcaattgtgaatggtgacaaccatacacaacctggttcatctgagggcggtgctgcaaaaaagcggcgaggccgtcctcctaaaaagaataaagagataaacatggattccatggaccctttactagtatcctcggatgtaactcagaaggacacttttcattctgcttcaactacctcaaaccttggcactcatgtccggacgcatggcattgttgatctcatggaagaagtcaatccaagcgagctgtcatttgatagccgttacggggtgcaatctggccactcgcaccattttgtttggccaatctacatcagcagcagagcagtctagggttcagtgggtgtttcataatggcatgtatcaggatgaccaagtgacttacggcagacggacatcataacaattggacttgttaggctccagggtttgccgtttcaggaaatcgggtcaggggtcctcggtttttggactttggagcaccgatgacttaagtgatcctccattgtgcttcgaacgttgagccttgggagatgcatgctggaactggctgctggtgatggtggcggcggcggcatctgaaggcaggatacactgtagaaacagaagtttgccactaagccagccgaacgcttccataagccatcaatgttagccaactaactgacatgtgtatatacacacacatcatctcagaaagaagccgtcattccgtgggaagtgctgcgtaaactcctgataataggcgtggtcagcgtcggacaagaaattgagagcttcattttctttctttcacgtgggaaagatacaattttgttgcctcctgacgatcagctaaaagggggaggaaatatccatgctcttcatctgggaaagatgcaaaaaccatccagctttatcatctttgctccttcagtaccgtgcctggaatcctgctttaccaatttttagcacccaaaaaaagaaaaacaaaaaaaaactatctgtggcgccccttgacacaaactattttcccggttctaaactattaagagatgtagtaatgcaaaccatgaaaaatccacggaggccagaaatcttgcggacaaattctgtgggtctgtttgtcggctcagccatgaggcgcaactttaatgac

SEQ ID NO: 5937 - DNA, 1028 bp, Zea Mays
atggccgatatgcgacgagcacaacatcgaccacaccggaaagtacgccggcgactccgacctccagctcgagcgctccgggctggtggcgtcgccggcaagcgcaagaaggccgccacgagcggcaagcccaagcgaccgccctccgccttcttcgtcttcataagctggagcgggctgccactggcaactctacgagagaagctgcccaggttcctgcagaagtgcgcttcgagtctgaccccctccgcccatggttctgtcgcctccagatctcttgagatggcaggggaggaggagaggaagcaggtgctcctctcgtacgttgtccccacagtctcctcgtggaacactacaacctccagtactacgggttctggttccagaatgggacacaagcgaagtagaagcgtgtgggctagatcagcggaggaagaagattgccgccccaaccgcgtctatctttggtttgttgttgtttttacttcaagagtctacacaacaatactccaagatctaggtactgattttctaattaatggtcaaatggcaaagagggaggcaaccgtggtggaccggacacgatctccatggaggaatcatctttcgaacggtgagtggaagaggatggatccggtgtgtccacggaagcctgaaaaaggtccaggcacagtgaagaaaaaagttctggtgcgtccatgcccacctagaatcttgcaaacaaagaagccaggagtagagcagtcacctgaaaaattgctcataactaattgtcgggcggccaacagggttcggaagagggtgtccacgtgcgcagcaagttgggattcagagaaatcaccatacgagacacttggtaaggggtttcgatcggagatggtggcggcggcggccgcacatagagccagcttcccgttgcgtctgcagcagatccttgctggaagctgcaccgtctcacctgtggtcaaggtcgagtctgagccgattttgtggggtcctagatccagacgtcggtcgacaggtcgctg

SEQ ID NO: 5938 - DNA, 2738 bp, Zea Mays
gaaggatccaggggcaaaaccgggaaatcctccaagctgaggttgaagccgctcgatttgctcaccagaaattcagattttcgagtggaattcgcttaatatagcaatgcactagggtttactgtgcaccactaggctactgcctctgctattaggaagccgacatctgttgtttccgaagtctttcaagtctctgttgggtggcgttgctattgtgggtgtgataacatgataaagcaatttcttggacgtctccccaagaagccatccaaatctggagataaggatcctattggccggcccagcccctcggtgtcgcaccagccattgggtccgagagctggagacagggccaccaacttgagtagccatccaccggttatctccagctctgggctcagttatgggagtggcatgcatgtcggcaatgcatacacgaaggcacacgtgaacggtgattcggccgcttcagcatttcggtcgttgccgagcttcaaggacgtgcccaacacagagaaacagaacttgtttaatgagaagttgaacttgtgctgcgcccaatttgacttcaccgatccaacaaagaacataaaggagaaggagataaagaggcaaactttggtggagctcgttgactatattgcctcggccagtgggaaattttctgaggcaagcatgcaagagatcacaaaaatggtttctgcaaacctgttcaggacgctgagtactcctcctagagacaacaaagtggatggctttgatgtggatgaggaggagcctgtcatggaccctgcatggccacacttgcagattgtctatgagttgttcttgagattcattcagtctcaagagacagacgccaagttggctaaacggtacattgatcattcgtttgttctgaggctacttgacctctttgattcagaagaccctagggagagagagtacctcaagatgatacttcaccgtgtctatggaaagttcatggttcatcggccctatattcggaaagccattaacaacattttctatcagttcatctatgaaactgaaaaacacaatggaatcgcagagttattggagattttgggaagtatcatcaatgggtttgcattgccacttaaggaagagcataaattgttccttgttcgagctttaattccacttcacaagccaaagtgcatcgcgatgtatcatcagcaattatcttactgtatcacccagtttgtcgaaaaagattgcaaacttgcagatacagttatcagaggcctgctaaaatattggccaatcactaatagctccaaggaggtgctgtttctgggggagttggaagagatattggaagctacgcaacctgcagagtttcagaaatgcatggtccctctcttccgccagatcgcacgttgcctgaatagctcacactttcaggttgctgagcgggcgctatttttgtggaataacgaccacatcgagagtctgatcaaacaaaacagcagggttatattgcctatcatctttcctgcactggagagaaatgccagtgggcactggaaccaagctgtgcaaagcctcactctaaacgtccgaaaactgttctctgacaatgaccctggactattcacggagagtctgcggaaatacgaggaagagaaagcgagagagaaggaggttaagtcgaagcaagaggccacatggagacgccttgaagagatggcatcagcgaaagcgacaagcggcgcggcagttctcgtctctcgacccttatcccggcagtcttcggctgtgtagcgaattttcatgtggtggtcgtgagaacattgtacaggattgagttgtatatacgaggtatattaaggtgggcaaattgacaaatgatatcgtcggagaagccagccagatgggttacagggctaggcacacatcattttcttggtcccgaatctgggcttctgctaagatctacagctggtcgcggtatcatcattatgtttatccttgtcaggagttggctatgattcaattgttttcacctgctggtcctgcagtcttgccatgcatgggtatctgtttctggagacaaaaaatcggtggaagtcgatagaacttagagcctggaaacgagtcgtgctgttgttcttggagtctggaattgttgcgtttctttctagtacaattcatgtgttgtcatcattagaagttaaatcctttgtgctcatcatcatcatacgtatgtggatccaattataaatgcctgataaatggttaagggttcacgatgaagatgacatggattcgtcacgcatgcagctctacttattgtaattggaacgtgcattctgattgtctcaaaatcacggcttcccctggcgggctttcatggccagcaggtccttgaacgctgggcggcagtagccgtcgccactgaagaacatgccggcgacgaccttgtacatggcctccgtcatgtggacgccgtcccagttgacgtactcggcggggcgcgcgcaggccgtggtgacctgcggcgagccgcaggtggcgaagaggtcgaagttgtaggcgccgccgccggagccgcagcaggtgcggaagggctcggcgaagccgtggcgcgcggggctccgcatcacggcgaggtgcgcggcgtagtagtcggcgtacgcgaggacggcggccgggtggcggcggcgcagcgcgcggagggccgccaggaggcggcggttgtgcgcgtagctctg

SEQ ID NO: 5939 - DNA, 4652 bp, Zea Mays
ctacatctatctgttagattgcattcttattaggcatggttgtgtggcctagcccagcctattagggttaggaggaaccctatgcctatatattgtactccctacacctaatcaatagatatctaaattattctccccaaatcctctagcatggaatcagttagcctccaaccttagtggcccctgagcagcaaccgccctcctcatggttggcgatagacaattgcctccctccaccatggccggcgccccctcctcttcttcccctccatttcatggccactcttgggcacctatggctgccagctcctctccagcagcccccatcttcaccacctcctctgttgcaccgctgctgacgtcctccgcaccgagtgctggcccaccgccgtctgcactaccgacgagtggggcgacgccggtccctgccacacctctccagtcgccgcccaacagtcatgcatcgtcacccagacccagtagcctctccgccaccaccccctctccagccaccaccatgggtaagagcaccggtggccaaaagtgtctaggcctagccggcttcgatgcagccaccgtcgacctaggcacctctactagcctggactaacgccagaagatgaggttgttcctaaggaacacgacgtagacggaaatggaccgccgggtgttcggacaccctgtctagtcagcgttggtatcatggctatctggaacaaggaaaaaaagaggactttcggaatttcagatacctcaacacagccttcattactcttttacctaagaaagaggatgccatccttgccaaggactttcggcctattagcttgatccacagcttcgcaaagttaatcacgaagatcatggcaagcagacttagtggttatatggacaagctagtttctaggaaccaaactgcgtttatcaagggccgattcatccaagataatttcatgttagttcagcaaactgcaagactgctgcacgctcaaaaacagcctagaatccttctcaagttggacatttccaaggccttcgattcggtgtcttggtccttcttacttgaagtattggaaaaggttggattcggccccatttggagagatgtgatcagtgggctgcttatgacctcctctacccaaattttgcttaatggagttcctggggaattcattcaacacttgaggggcctgcggcagggggactcgttatcccctcttctcttcatcatcgttatggatgttctcaatggcctaattgttaaagctgctgatgagggtttgcttcaacccctctcaactcgctccatccagcaccgaatatcgctctatgctgatgatgtggtaattttcttgagaccggctgctagtgatctgcacttggtaacaaggattttggagctgtttggggacgcctcggggcttaaaaccaatgttcagaaaagcagtgtggctcccattcactgctctccggtagacatggaaatggtaacccagatttttccttgcaaagttgaaacacttcctcttaaatatctcgggttgcctctttccctcaggaagctaagcaaggagcagctgcaaccactaatcgataggcttgcggacctcttacctaattggaaggccgacctgatgactcgagctggtagagccatccaggtgcagcatgtgctcacggcaacagttatatatcacgccatggcattggatttacctaagtgggctatcaaagccattgacaagattagacgttgctttctttggaaaggtcgtaaggatgtgctcagtggccactgcttagtcgcttggggcaaagtgacacgcccaaaggagcttggtgggcttggcatctcagatttacaaaagctgaattgggcccttcgggttagatggctgtggttggaaagaacatatccctcgaagtcttgggctgatttaccgctccagagttccagcactctgaaatctatcctctctacagctttgattacagaaattggtgatggtcgtaacaccttattttggagggacagatggttgatggggttgaggattgaggatctaactcctcatattttcaccctcgtcccgaccaggattaccaataggagaacggtggctgaaggtatcgtggagatggcttggattcgggacctgagaggcaccatcacttgggatgtcctctctgattttttaactcttagtgaagccattgcagattactccattaatgttggagtgccagacaagcatatctggaaattctccccgacaggccaatactcttcaaagtcggcttatgatatgttatttcttggttccacttctttgggcgcatatgagtgcatttgggaatcttgggcaccttcaaagtgcagtttcttcctttggcttgtcatgcacaacagatgctggaccgcagaccgtcttgctagaagggtgctaccccaccccagtgtgtgccccctttgcgaccaagaagaggaaacaatacaacatcttctcatctcttgcgtctttgaacgacagttatggtattccttgttaagcaggtctgggttgcctaacctttcaccagataatgctaattgcagccttgatgactggtggagcagggctgtggagaagattccccgtgatctccaatccggcttcaattctctagttattcttggcgcttggagcctttggcgtcatcgcaacgactgtgtgtttaatgggagatcgccgagcctggcgagtgctctcaccctcgctggcgatgagctcaggatgtggtgtagtgccggggcgaaagggttgaacctgctttcaactcttatgtttatgcttgacccagggggatagtctagtggcttgttcagagtggttgtgtgtggttgttgtgttacgtcttgtgtcttgttgtgtcatgtgtgtgtgtgtcgtgtcaggtgtgtgtcgtgtgtggtgtgttgtaccttcttctatctattaatggaatgatacgcagatctcctgcgtgttcgagaaaaaaattcagcgtcggtgtagacgatcagctcgtgggtggaggagcgccgaagaagcccttagtagagtgtaccatgaaggtaccagataatccacttgagagctgtcacatgtgattcatgtggatcataaatgtggaggcatacctgctagaccacataagatatgtcaggcttggtgaaggtgaggtactagaggacgtcgacaaggctctgataggcagggcttggtacaactgattcgcttcttacttgctcttcgtctctctttggggtttactgagaccaagtcagacacttccctgttcatctatcagcgtggcagtgacaccgtgtacctcctcttgcatgttgacaacattatgctcactgcctctacttcggttctcttgcactagatgattatagctcttcagcatagatctaggcccccttcatcactttcatggcattactatcaatcatcgctcggatggcatgtttcttcagcagtgccaatacaccttggatgtattggagcgttttggcatgtaggattgtaagtcgtgtgcgactctggttgacacacgggcaaaggtctctgatgatggtcctccagtcgaccccaccgcctagtggagccttgctagagccctccagtacctcaccttcaccagacccgacatcgcctatgtagtctaggaggtatgcctccacatgcatgatccacaggagacgcaattgacaacgtcaaacagattctctggtacctccatggtacactcgagtactcaactatgggcttctttggcacttctccacccacgagttgaccgtcgacagtctacgccaacgctagctggacagggtgctcgaacacccgtaggtccacctcctactaagttgtgttccttgtggacaacctcatttcctggtcctccaaacgtcagcacgtggtctcccgctccagtgttgaggctgagtaccatgctatcgctaatggcgtggctgaggcgagctggctccgccagctccttcaagagctccacaacccactcaccaggcttccaatgacgtctacttctccgtcaatccagtccagcaccaacgcacaaagcagttgagatcaatctttacttcgtccgtgagtgtgttgccatcagggacgtggagctgtcggggacgttcgtgttctccgcatcaagacaagctcgtagtttgcaaacatcttcactaaaaggtcttccatccttggtgttatcgaggtttcagtcgagtctcgacagctgccatggctagtgttccgaatgcaggaaggtgttagaatgtatttgtattatggtcgttgttatggttgtgggttatgggcctagcccagccatgtagcctattaggcctattagggttaggcagaaaccctagacctatatattttaatccatacacctaattaatagatatctcaattattctccccaaatcttgtaacactatatttgagctaaaacaagttttcaacatatttagtagtcaaccatattccgacttcgatgggatctctcctaggttgtctagagttttagtacaagctggtgagaaccgtcttcttttggagttagctggagagaagggaatcaccttcctcactgctcctgttgag

SEQ ID NO: 5940 - DNA, 1609 bp, Zea Mays
gagactgaacctcgggcgcccgccgttatttggtagcgtaaattcgaattccacggcccaccagaatccgttctatagctactcggagaaaaacctgacgaaatggaggaacaagcgcacgcattctggctggccacacccgcaggccgcagagcaggggggtcacaacaagctgaaggtctaaccgcggagccggcggactggggcggcggagacgcggcggcggcggggcggaggtcgcggcggagtagcgtggccgggcgacgaggaagcaatcggccgcggccgcggccgcgacgggcgaggagcggaggagtgggtgagcggcgcgggacgcagaggccggccatctgaccggacgaggcggaggcggcgagcatcgcgcctgtgccggcgatccagaggctcatctcgtttgcctcgctcgctcggctcgagtatatagggagccgggaccggtagagagcgacgacgcccggcattggtgagggacaggacaggtgagctgaggtggccgtgtcgcgtcgggcggcctcgtggccttcgccaggacgtggtggtcgcatcgaggcggagcggccgcgacgggcccaccagactctgcgtcatctctcatcttctgcgccgcatgcttctgttgacaatccgtgtgcgcggctgccatttctgaacagttcttggacggttaatctattttagttagcaatttagcatctgttagtcaagctcgaagtctagtctagtggtcgaagaaaggacaaaccaggcgaccatgttattgtttaattagattaaattattagatttgtgtatcttaggccacggagggtattttatggttttctttttctaagcctttgtttgaatgcactagaatttatggttagctattaaaattagttagacatgtttatatatcattagctaatagtccaactaactattagctacactctcacttgcccattagtttattaactgatttaacctagctaaaatcagctaatagttagttagcattagcaattttttaaccaaccaactattagctctaatacatttaaacagatcctaaattgtttctttttttgataaatcatggcaaacgattggtcacttaaaagcttagcaattatttgagtttgacaaatacttaagtggataaaataaatatttaattaggacaaactatagattaaattaaaaaatagtgtataatcatgtagtagtgcctaaataggataaacaatagtttatccatataatttggaacgcgttagagtatctaatactacattatttaaagtatttaggacataaaaaattaagccccaacagttaagtcctaaattatgaattttagaggtgaattatattattaggaaagaaaatattaagaacgatacattaaacaagaatagagctaagtttaaaaaatactacaattttggaaactttagatccagacctaagtttagaacatcttaaaacaagaatctagctgttgggagaatctaagtatagcgggttatgtacgagggaagatgaaaggatccatactctatagggtttaggatcttaaaagtgacgaattcttattgcggcaatt

SEQ ID NO: 5941 - DNA, 2376 bp, Zea Mays
gtcttcttccccaatttctcgcggcgtcgttccgtcccaaatatcgccccgcgatcccccacctcgccgactggctcccccgctccacctcgtcgacgggcagaggagacccctcagggccgggatcggactcctctttcaccgccaacgcataccagtgatgaagatcttccgctgaagcttgctcaagctgcaataaagcatgacggtggacctagttttgaggtggatgcgctgagttttgaaggtggcgagggatctttgctgcggggttctatttgttctcagtgatttttggcaaacactctttggttagattaagaatcatggaaaggtacaaattgatacggaagataggtgatggaacctgtgggaatgtttttatggcttctaatgtagaaactaatgaaattgttgctgttaaaaaaatgaagagaaaattttgtcattgggaagaatgtattagtctgcgagaagtgaaggcccttcagaaactatttcaccctaacattgtgaagctgaaggaagtgacgatggaaaaccatgagctgttcttcatctttgaacacatggtttagtccttgctacatctagcatgttttttactatatttttgtataaattaaaggaagagaaaaaaaggctaattcaccatgctattccctaaggcacacattggtgagatgatgatttgtgatggttaacacgagaacgacattaaatgtactaattttttggtgtatgttgtattatattagccaattagttcacctatgtttcttcattaaatgagttaacctattcccttatatttgtgatgtattatgctcacttagtgacaggtgtatacttctttcagatgaggcatcgaattttcctaagttgctttcttacttgcatctaaccggtatttatgtagtttgttccttgctgaaatgtcagctgatttttctttcaggagtgcaatttatatgatgtcataagggaaaggcaagttgctttccctgaaagggatataaggaactttatggtccagatactgcaaggtcttgcatatatgcataataatgggtattttcaccgtgatttaaaacctgagaatttgttggtgacaaatggtattattaaaattgctgactttgggttggcaagagaaatatcttccaatcctccttacactgattatgtttccaccagatggtatcgggctccagaggttctactgcaatcttcagtttatacacctgctattgacatgtgggcggttggtgctattttggctgagctttttacactgtccccactttttcctggtgaaagtgaaactgaccagctttacaaaatatgcactgtgcttgggacccctgattgcactatttggccagagggaatgaacctgcctcgttcatgcagctttaagttttttcagaatcctccaagaaacttatgggagcttattcctaatgcttcatctgaagcaatcgatttgatccagcaactttgttcctgggatcctcgaaggaggccaactgctgagcaagcattacaacatcctttcttcaatgtgtgcaattgggtaccaagacctgtacatgatgcttaccatacaaaaacaaacggacctaaagctgaaccaagattggaactgaacctgtgggatttcagcacagaacctgatgattgtgtccttgatttaactctcagtctgaagccaagtttttctggaacagaccttggtaagcatgttccacgacgtacagaagaggaaattctcctgtacccgggatttgagaatacccctgtgaagtccggtttttggcctctggtgccatctgatcgtcccgttggtgatgttccggccataccatcctggcagcaggcgtacatggttgacagccaaggcgcattttctggctctccgttcttgcagtcgaacctgttggagaaccgttcgttagcacctatccggcaggtgaatttcttctgacggagacaggattaacagattcatacgattcttgatacgtccagcttctcgctgtatacacactatcttgaataaagtgttgccagtagaggaaatgtatatacagttcgttcgtagctcttgagcttctttctttctagagtacctctttttttttaatcgtctgttcatattccacaccactcctatgtaaataacggcatgcatgataatctctctcccaaaaacaaacaattttgtttgtacgccggctgctttgattttagaaaactttaaaacagatacagtatttgcaatacttcagttttaaaaacaaagattttagagcagctccaaaagagcacaaaatttgttcctaaaatctttatcagcatagttggaaaataaaa

SEQ ID NO: 5942 - DNA, 2537 bp, Zea Mays
gtcttcttccccaatttctcgcggcgtcgttccgtcccaaatatcgccccgcgatcccccacctcgccgactggctcccccgctccacctcgtcgacgggcagaggagacccctcagggccgggatcggactcctctttcaccgatttttccatgcactttaggctaaaaatgctttggtctgaaacctatctgcccttttttctggccgccaacggtttcagccaacgcataccagtgatgaagatcttccgctgaagcttgctcaagctgcaataaagcatgacggttgtgcacataatgatgcttaatcattcatgttgcgaaaccctccagtggaacttccttcttctgatgcaaccatgtataggtggacctagttttgaggtggatgcgctgagttttgaaggtggcgagggatctttgctgcggggttctatttgttctcagtgatttttggcaaacactctttggttagattaagaatcatggaaaggtacaaattgatacggaagataggtgatggaacctgtgggaatgtttttatggcttctaatgtagaaactaatgaaattgttgctgttaaaaaaatgaagagaaaattttgtcattgggaagaatgtattagtctgcgagaagtgaaggcccttcagaaactatttcaccctaacattgtgaagctgaaggaagtgacgatggaaaaccatgagctgttcttcatctttgaacacatggtttagtccttgctacatctagcatgttttttactatatttttgtataaattaaaggaagagaaaaaaaggctaattcaccatgctattccctaaggcacacattggtgagatgatgatttgtgatggttaacacgagaacgacattaaatgtactaattttttggtgtatgttgtattatattagccaattagttcacctatgtttcttcattaaatgagttaacctattcccttatatttgtgatgtattatgctcacttagtgacaggtgtatacttctttcagatgaggcatcgaattttcctaagttgctttcttacttgcatctaaccggtatttatgtagtttgttccttgctgaaatgtcagctgatttttctttcaggagtgcaatttatatgatgtcataagggaaaggcaagttgctttccctgaaagggatataaggaactttatggtccagatactgcaaggtcttgcatatatgcataataatgggtattttcaccgtgatttaaaacctgagaatttgttggtgacaaatggtattattaaaattgctgactttgggttggcaagagaaatatcttccaatcctccttacactgattatgtttccaccagatggtatcgggctccagaggttctactgcaatcttcagtttatacacctgctattgacatgtgggcggttggtgctattttggctgagctttttacactgtccccactttttcctggtgaaagtgaaactgaccagctttacaaaatatgcactgtgcttgggacccctgattgcactatttggccagagggaatgaacctgcctcgttcatgcagctttaagttttttcagaatcctccaagaaacttatgggagcttattcctaatgcttcatctgaagcaatcgatttgatccagcaactttgttcctgggatcctcgaaggaggccaactgctgagcaagcattacaacatcctttcttcaatgtgtgcaattgggtaccaagacctgtacatgatgcttaccatacaaaaacaaacggacctaaagctgaaccaagattggaactgaacctgtgggatttcagcacagaacctgatgattgtgtccttgatttaactctcagtctgaagccaagtttttctggaacagaccttggtaagcatgttccacgacgtacagaagaggaaattctcctgtacccgggatttgagaatacccctgtgaagtccggtttttggcctctggtgccatctgatcgtcccgttggtgatgttccggccataccatcctggcagcaggcgtacatggttgacagccaaggcgcattttctggctctccgttcttgcagtcgaacctgttggagaaccgttcgttagcacctatccggcaggtgaatttcttctgacggagacaggattaacagattcatacgattcttgatacgtccagcttctcgctgtatacacactatcttgaataaagtgttgccagtagaggaaatgtatatacagttcgttcgtagctcttgagcttctttctttctagagtacctctttttttttaatcgtctgttcatattccacaccactcctatgtaaataacggcatgcatgataatctctctcccaaaaacaaacaattttgtttgtacgccggctgctttgattttagaaaactttaaaacagatacagtatttgcaatacttcagttttaaaaacaaagattttagagcagctccaaaagagcacaaaatttgttcctaaaatctttatcagcatagttggaaaataaaa

SEQ ID NO: 5943 - DNA, 2693 bp, Zea Mays
gtcttcttccccaatttctcgcggcgtcgttccgtcccaaatatcgccccgcgatcccccacctcgccgactggctcccccgctccacctcgtcgacgggcagaggagacccctcagggccgggatcggactcctctttcaccgcaggcaattgaactcacgcagggtatacggttaataaggccaaagtataccaatttgattgccgtgtctgtcgactgcactcgcaaccgaatcgaatgtggaaagtgcctgtctccagaggtcctttatagcctgttttaggctttgttttgcacgatttttccatgcactttaggctaaaaatgctttggtctgaaacctatctgcccttttttctggccgccaacggtttcagccaacgcataccagtgatgaagatcttccgctgaagcttgctcaagctgcaataaagcatgacggttgtgcacataatgatgcttaatcattcatgttgcgaaaccctccagtggaacttccttcttctgatgcaaccatgtataggtggacctagttttgaggtggatgcgctgagttttgaaggtggcgagggatctttgctgcggggttctatttgttctcagtgatttttggcaaacactctttggttagattaagaatcatggaaaggtacaaattgatacggaagataggtgatggaacctgtgggaatgtttttatggcttctaatgtagaaactaatgaaattgttgctgttaaaaaaatgaagagaaaattttgtcattgggaagaatgtattagtctgcgagaagtgaaggcccttcagaaactatttcaccctaacattgtgaagctgaaggaagtgacgatggaaaaccatgagctgttcttcatctttgaacacatggtttagtccttgctacatctagcatgttttttactatatttttgtataaattaaaggaagagaaaaaaaggctaattcaccatgctattccctaaggcacacattggtgagatgatgatttgtgatggttaacacgagaacgacattaaatgtactaattttttggtgtatgttgtattatattagccaattagttcacctatgtttcttcattaaatgagttaacctattcccttatatttgtgatgtattatgctcacttagtgacaggtgtatacttctttcagatgaggcatcgaattttcctaagttgctttcttacttgcatctaaccggtatttatgtagtttgttccttgctgaaatgtcagctgatttttctttcaggagtgcaatttatatgatgtcataagggaaaggcaagttgctttccctgaaagggatataaggaactttatggtccagatactgcaaggtcttgcatatatgcataataatgggtattttcaccgtgatttaaaacctgagaatttgttggtgacaaatggtattattaaaattgctgactttgggttggcaagagaaatatcttccaatcctccttacactgattatgtttccaccagatggtatcgggctccagaggttctactgcaatcttcagtttatacacctgctattgacatgtgggcggttggtgctattttggctgagctttttacactgtccccactttttcctggtgaaagtgaaactgaccagctttacaaaatatgcactgtgcttgggacccctgattgcactatttggccagagggaatgaacctgcctcgttcatgcagctttaagttttttcagaatcctccaagaaacttatgggagcttattcctaatgcttcatctgaagcaatcgatttgatccagcaactttgttcctgggatcctcgaaggaggccaactgctgagcaagcattacaacatcctttcttcaatgtgtgcaattgggtaccaagacctgtacatgatgcttaccatacaaaaacaaacggacctaaagctgaaccaagattggaactgaacctgtgggatttcagcacagaacctgatgattgtgtccttgatttaactctcagtctgaagccaagtttttctggaacagaccttggtaagcatgttccacgacgtacagaagaggaaattctcctgtacccgggatttgagaatacccctgtgaagtccggtttttggcctctggtgccatctgatcgtcccgttggtgatgttccggccataccatcctggcagcaggcgtacatggttgacagccaaggcgcattttctggctctccgttcttgcagtcgaacctgttggagaaccgttcgttagcacctatccggcaggtgaatttcttctgacggagacaggattaacagattcatacgattcttgatacgtccagcttctcgctgtatacacactatcttgaataaagtgttgccagtagaggaaatgtatatacagttcgttcgtagctcttgagcttctttctttctagagtacctctttttttttaatcgtctgttcatattccacaccactcctatgtaaataacggcatgcatgataatctctctcccaaaaacaaacaattttgtttgtacgccggctgctttgattttagaaaactttaaaacagatacagtatttgcaatacttcagttttaaaaacaaagattttagagcagctccaaaagagcacaaaatttgttcctaaaatctttatcagcatagttggaaaataaaa

SEQ ID NO: 5944 - DNA, 2819 bp, Zea Mays
ttcctcccccgttcccctctctctctctctctctctctccactcgcctccgctcgcggtggagtgccccaatcctccacctcttcttcgccccccccgcctcctctttctcctcaaccctactccgacgcggcgccacgagacaacagcgggcgcgcggagcaaacgagaactaaaacgagagggaggtcgcggcgcccgattcggtcgcgctcgcgcgggggcgccccggattggattggattggatccttggatccccccgcgcgcggaggggaattcggcgcccagatccccgcgattccggcgccggcgccgggcatgagaggccgtagggcatgcctgtggtggtggcccctggcgcgggacgagtgagccggcggcgggaggacgaggaacaggacctgtggctgaggctgaggcccgaggcggccgtgccatgtctcgctgcttcccgtttccgccaccacgatatgagaagaccgtgcgccccgacgcccagctagcctcgcagcagcagcagcttgacaaggagaaacacaaagagaagaaacataagaaggacaagaaggacaaagatagaaaggaaggtaaagaaaagaaggataaagacaggagtagggataagcacaaagataagaaagatcgtaaagaaaaacacaaagacgagaaaaaagacaagagcaaagataaaaacagggagtcaggcgaaggaattcaaagaaatgacgaggctctccatggtcagaaggttggagagagcagcagggggtctgaagaaattaaggatcttaaattcagggaggagttggtcagaggagtacaggatgagaaaggggcagcgagtcaaactattgaaaattatgctgtttcaaatgatcgaaatcgcaaaggcttcattgcttcacctgcaatggagactgaaaggtccgcgcataataaagtgcatattcagtctggtaatgcttcaaggaaaactgagggatttatacaacagagcatcaatgccaatcgacaaaagaatgggacatcagtacaacattctgaaagcttcaccacttctgctcgaagaactgctggtggctttccaccagcacctacaacggaggataaattcaaagctgcaaggctttcatccagtaatgaagctgcacccagaaaagagggggttggacagcgaatcagtaacattagcatatcgcttcaaaagagaactgagaacacaaacaaagatgtcgcgaagaaagaagttggcacctcctctccattgcctccaaatcctgctaatgctatgcataagggaaatggcaaggttggtaggccaatggacaacacacaaggatccatgcagagatttggcagcccatcaacatcaagtgcaacatgggggatggatagaggagcacctaggtcatccatcccaagcccgagcattacaatacggagaccgaatggcatggtacgaccagctgaaaatctttctgtctctgctaagaaacctgatgcaggaggcctttcacctgctatgggtaaggaaaaggaacaaggtggaaggttgctgcaagctaatatttcaactgatcagaaactggcagctgaaagtcgttctgcctctgctaagaaacctgatgcaggaggcctttcacctgctatgggtaaggaaaaggaacaaggtggaagattgctgcaagctaatatttcaactgatcagaaactggcagctgaaagtcgttctgtctctgctaagaaacctgatgcaggaggcctttcacctgctatgggtaaggaaaaggaacagggtggaaggttgctgcaaggtaatatttcaactgatcagaaactgggagctgaaaaccgttctgtctctgctaagaaacctgatgcaggaggcctttcacctgctatgggcaaggaaaaggaacaaggtggaaggttgctgcaggctaatatttcaactgatcagaaactggttatgtcaaagcctccagctgtggagaaagctgcagatgggagagctgaaaggatggagaaggtcagagatggggcaccagatattgccaagaaagaggacaaaaagagtgatcggcatgagaaaaagaaaaggaaagagaaagataaacacaaagagaagaaaaaggagaaagaggcaaagaaggagaaaagggaacataaccacaaagagcataataaaacaagagaaaacagtataagttatcccatagatagtcttaacttgaagcactcggtccctcctttagccccaccagttgatgatggaaaatctgttgtgcctgatgagaacctgaagaagcgaaagaaccatgaaacgaatggttacttacaaaacaaccttgatatgcggcctacaaagttgccgagaccagcactccccagcaatcgtgtggagaatggtacagcatctcatgtagccgcgccactctcttctgtgaagcaggaagccataaatattgaaaaggctgaaaggctccacaaggaagagaaggtcaatggcaaccaacagggtcagcagcgaggtccagtcgatccggtggctgcttatgagaatggcacaagctctaggaagccacctcaccccgactgcaagtatcttagccagatatacagcattcctgaagcacctcaaatgatggaattgcctgggcaggaaggtgaggactggctgttcgacaaaggcggcacccagccaaggaagccggccagttcagcgcctgaggctgatggagtcccccaagtgtgggctcaggctctgaaaattgaccatgctgatgtcattgctctgccatacgtgatacccttttag

SEQ ID NO: 5945 - DNA, 2767 bp, Zea Mays
ttcctcccccgttcccctctctctctctctctctctctccactcgcctccgctcgcggtggagtgccccaatcctccacctcttcttcgccccccccgcctcctctttctcctcaaccctactccgacgcggcgccacgagacaacagcgggcgcgcggagcaaacgagaactaaaacgagagggaggtcgcggcgcccgattcggtcgcgctcgcgcgggggcgccccggattggattggattggatccttggatccccccgcgcgcggaggggaattcggcgcccagatccccgcgattccggcgccggcgccgggcatgagaggccgtagggcatgcctgtggtggtggcccctggcgcgggacgagtgagccggcggcgggaggacgaggaacaggacctgtggctgaggctgaggcctgagaggagcagtcgtcaagtaggaggaggaggaggtcggggtgggtgatccgaggcccgaggcggccgtgccatgtctcgctgcttcccgtttccgccaccacgatatgagaagaccgtgcgccccgacgcccagctagcctcgcagcagcagcagcttgacaaggagaaacacaaagagaagaaacataagaaggacaagaaggacaaagatagaaaggaaggtaaagaaaagaaggataaagacaggagtagggataagcacaaagataagaaagatcgtaaagaaaaacacaaagacgagaaaaaagacaagagcaaagataaaaacagggagtcaggcgaaggaattcaaagaaatgacgaggctctccatggtcagaaggttggagagagcagcagggggtctgaagaaattaaggatcttaaattcagggaggagttggtcagaggagtacaggatgagaaaggggcagcgagtcaaactattgaaaattatgctgtttcaaatgatcgaaatcgcaaaggcttcattgcttcacctgcaatggagactgaaaggtccgcgcataataaagtgcatattcagtctggtaatgcttcaaggaaaactgagggatttatacaacagagcatcaatgccaatcgacaaaagaatgggacatcagtacaacattctgaaagcttcaccacttctgctcgaagaactgctggtggctttccaccagcacctacaacggaggataaattcaaagctgcaaggctttcatccagtaatgaagctgcacccagaaaagagggggttggacagcgaatcagtaacattagcatatcgcttcaaaagagaactgagaacacaaacaaagatgtcgcgaagaaagaagttggcacctcctctccattgcctccaaatcctgctaatgctatgcataagggaaatggcaaggttggtaggccaatggacaacacacaaggatccatgcagagatttggcagcccatcaacatcaagtgcaacatgggggatggatagaggagcacctaggtcatccatcccaagcccgagcattacaatacggagaccgaatggcatggtacgaccagctgaaaatctttctgtctctgctaagaaacctgatgcaggaggcctttcacctgctatgggtaaggaaaaggaacaaggtggaaggttgctgcaagctaatatttcaactgatcagaaactggcagctgaaagtcgttctgcctctgctaagaaacctgatgcaggaggcctttcacctgctatgggtaaggaaaaggaacaaggtggaagattgctgcaagctaatatttcaactgatcagaaactggcagctgaaagtcgttctgtctctgctaagaaacctgatgcaggaggcctttcacctgctatgggtaaggaaaaggaacagggtggaaggttgctgcaaggtaatatttcaactgatcagaaactgggagctgaaaaccgttctgtctctgctaagaaacctgatgcaggaggcctttcacctgctatgggcaaggaaaaggaacaaggtggaaggttgctgcaggctaatatttcaactgatcagaaactggttatgtcaaagcctccagctgtggagaaagctgcagatgggagagctgaaaggatggagaaggtcagagatggggcaccagatattgccaagaaagaggacaaaaagagtgatcggcatgagaaaaagaaaaggaaagagaaagataaacacaaagagaagaaaaaggagaaagaggcaaagaaggagaaaagggaacataaccacaaagagcataataaaacaagagaaaacagtataagttatcccatagatagtcttaacttgaagcactcggtccctcctttagccccaccagttgatgatggaaaatctgttgtgcctgatgagaacctgaagaagcgaaagaaccatgaaacgaatggttacttacaaagaagccataaatattgaaaaggctgaaaggctccacaaggaagagaaggtcaatggcaaccaacagggtcagcagcgaggtccagtcgatccggtggctgcttatgagaatggcacaagctctaggaagccacctcaccccgactgcaagtatcttagccagatatacagcattcctgaagcacctcaaatgatggaattgcctgggcaggaaggtgaggactggctgttcgacaaaggcggcacccagccaaggaagccggccagttcagcgcctgaggctgatggagtcccccaagtgtgggctcaggctctgaaaattgaccatgctgatgtcattgctctgccatacgtgatacccttttag

SEQ ID NO: 5946 - DNA, 2752 bp, Zea Mays
ttcctcccccgttcccctctctctctctctctctctctccactcgcctccgctcgcggtggagtgccccaatcctccacctcttcttcgccccccccgcctcctctttctcctcaaccctactccgacgcggcgccacgagacaacagcgggcgcgcggagcaaacgagaactaaaacgagagggaggtcgcggcgcccgattcggtcgcgctcgcgcgggggcgccccggattggattggattggatccttggatccccccgcgcgcggaggggaattcggcgcccagatccccgcgattccggcgccggcgccgggcatgagaggccgtagggcatgcctgtggtggtggcccctggcgcgggacgagtgagccggcggcgggaggacgaggaacaggacctgtggctgaggctgaggcctgagaggagcagtcgtcaagtaggaggaggaggaggtcggggagaaacacaaagagaagaaacataagaaggacaagaaggacaaagatagaaaggaaggtaaagaaaagaaggataaagacaggagtagggataagcacaaagataagaaagatcgtaaagaaaaacacaaagacgagaaaaaagacaagagcaaagataaaaacagggagtcaggcgaaggaattcaaagaaatgacgaggctctccatggtcagaaggttggagagagcagcagggggtctgaagaaattaaggatcttaaattcagggaggagttggtcagaggagtacaggatgagaaaggggcagcgagtcaaactattgaaaattatgctgtttcaaatgatcgaaatcgcaaaggcttcattgcttcacctgcaatggagactgaaaggtccgcgcataataaagtgcatattcagtctggtaatgcttcaaggaaaactgagggatttatacaacagagcatcaatgccaatcgacaaaagaatgggacatcagtacaacattctgaaagcttcaccacttctgctcgaagaactgctggtggctttccaccagcacctacaacggaggataaattcaaagctgcaaggctttcatccagtaatgaagctgcacccagaaaagagggggttggacagcgaatcagtaacattagcatatcgcttcaaaagagaactgagaacacaaacaaagatgtcgcgaagaaagaagttggcacctcctctccattgcctccaaatcctgctaatgctatgcataagggaaatggcaaggttggtaggccaatggacaacacacaaggatccatgcagagatttggcagcccatcaacatcaagtgcaacatgggggatggatagaggagcacctaggtcatccatcccaagcccgagcattacaatacggagaccgaatggcatggtacgaccagctgaaaatctttctgtctctgctaagaaacctgatgcaggaggcctttcacctgctatgggtaaggaaaaggaacaaggtggaaggttgctgcaagctaatatttcaactgatcagaaactggcagctgaaagtcgttctgcctctgctaagaaacctgatgcaggaggcctttcacctgctatgggtaaggaaaaggaacaaggtggaagattgctgcaagctaatatttcaactgatcagaaactggcagctgaaagtcgttctgtctctgctaagaaacctgatgcaggaggcctttcacctgctatgggtaaggaaaaggaacagggtggaaggttgctgcaaggtaatatttcaactgatcagaaactgggagctgaaaaccgttctgtctctgctaagaaacctgatgcaggaggcctttcacctgctatgggcaaggaaaaggaacaaggtggaaggttgctgcaggctaatatttcaactgatcagaaactggttatgtcaaagcctccagctgtggagaaagctgcagatgggagagctgaaaggatggagaaggtcagagatggggcaccagatattgccaagaaagaggacaaaaagagtgatcggcatgagaaaaagaaaaggaaagagaaagataaacacaaagagaagaaaaaggagaaagaggcaaagaaggagaaaagggaacataaccacaaagagcataataaaacaagagaaaacagtataagttatcccatagatagtcttaacttgaagcactcggtccctcctttagccccaccagttgatgatggaaaatctgttgtgcctgatgagaacctgaagaagcgaaagaaccatgaaacgaatggttacttacaaaacaaccttgatatgcggcctacaaagttgccgagaccagcactccccagcaatcgtgtggagaatggtacagcatctcatgtagccgcgccactctcttctgtgaagcaggaagccataaatattgaaaaggctgaaaggctccacaaggaagagaaggtcaatggcaaccaacagggtcagcagcgaggtccagtcgatccggtggctgcttatgagaatggcacaagctctaggaagccacctcaccccgactgcaagtatcttagccagatatacagcattcctgaagcacctcaaatgatggaattgcctgggcaggaaggtgaggactggctgttcgacaaaggcggcacccagccaaggaagccggccagttcagcgcctgaggctgatggagtcccccaagtgtgggctcaggctctgaaaattgaccatgctgatgtcattgctctgccatacgtgatacccttttag

SEQ ID NO: 5947 - DNA, 712 bp, Zea Mays
gcaaggggaggggatgggcagcgttcaccgctgcagttagcgttacggtccgttctgcaatccaaacatccgatggagcccctatcctgcacgcccgcagaaccgtgccaccgcccctcccgagacttccgccacgcctccccaccgtgcgagattgccgcccccggccgcgagtgtgctgtgtgcccgtcgagacaactgttgtctccttccccaacctgcagaatcgtgcccaccaccgccacctctcgcgcgaggcccggatgaaggcaatggagtatggatctgtgccagtatagataagcttttccagctatgaatcaagaacaatgaccctttgcattgggatcgacagatcaagggtgggatggttaggggttcgttgcggccatagccttcattgcaaggcttattcctccataaggaagctgtgaactgggcatctgctagagaaccacatgacctacatgaggcaccaactcctgaaattaagggtacaagtatcttatttttaaaggagggagagcaaggatctgtagccttgagaccccatacagatagatgcacaatatgtgtgaacaaaaaaaaacaaacaagaattatttcctataaaaatatatgtacaaatctgtgttggatgattctaatctttgaacacagggctttcattgcttcggatttggatttctgtggtttatatgtgcatcaattg

SEQ ID NO: 5948 - DNA, 793 bp, Zea Mays
gcagcgttcaccgctgcagttagcgttacggtccgttctgcaatccaaacatccgatggagcccctatcctgcacgcccgcagaaccgtgccaccgcccctcccgagacttccgccacgcctccccaccgtgcgagattgccgcccccggccgcgagtgtgctgtgtgcccgtcgagacaactgttgtctccttccccaacctgcagaatcgtgcccaccaccgccacctctcgcgcgaggcccggatgaaggcaatggagtatggatctgtgccagtatagataagcttttccagctatgaatcaaggggggtcagaggtgtatggttgtcgcaatacaacaatgtctctatacatcatctcaacctatggagatttgtctctttctcaagcacttgatgactttaacaatgaccctttgcattgggatcgacagatcaagggtgggatggttaggggttcgttgcggccatagccttcattgcaaggcttattcctccataaggaagctgtgaactgggcatctgctagagaaccacatgacctacatgaggcaccaactcctgaaattaagggtacaagtatcttatttttaaaggagggagagcaaggatctgtagccttgagaccccatacagatagatgcacaatatgtgtgaacaaaaaaaaacaaacaagaattatttcctataaaaatatatgtacaaatctgtgttggatgattctaatctttgaacacagggctttcattgcttcggatttggatttctgtggtttatatgtgcatcaattg

SEQ ID NO: 5949 - DNA, 1309 bp, Zea Mays
gttagcgttacggtccgttctgcaatccaaacatccgatggagcccctatcctgcacgcccgcagaaccgtgccaccgcccctcccgagacttccgccacgcctccccaccgtgcgagattgccgcccccggccgcgagtgtgctgtgtgcccgtcgagacaactgttgtctccttccccaacctgcagaatcgtgcccaccaccgccacctctcgcgcgaggcccgggtctgcggccaccggcacagccagcatccttccctgcctgctcgctatgcatcatgtccgcgttcagcgagacaaccgtcgtcctcccttgctgagttaagtctccttgtgtgcagatgaaggcaatggagtatggatctgtgccagtatagataagcttttccagctatgaatcaaggtaaaaacgaaaaagcactaatttgggcaatccatcagtttgatatgatttagttgaaatgttttttgtatccagagtgagtagaaaccgcatgactatgagaagcttgagtatgggccaaagtaggatttacatcagttaattgacggttatatatgttacgtacaagttataagcttttccatttatatgtacttgtaaccaggggggtcagaggtgtatggttgtcgcaatacaacaatgtctctatacatcatctcaacctatggagatttgtctctttctcaagcacttgatgactttgtaagtttgcaatctcaagggagaatagctatcctgtcacgggctgttcattgtgcacaatcaacatctcttaatagatcaaataatgttctgaacaacagcataggtcaaagttgcaatcggaaggctcaggaagctgattgagtgaagctatcttattttctgacgttacttgcttcttgaatttaacataatttacttcccaatgtgcagaacaatgaccctttgcattgggatcgacagatcaagggtgggatggttaggggttcgttgcggccatagccttcattgcaaggcttattcctccataaggaagctgtgaactgggcatctgctagagaaccacatgacctacatgaggcaccaactcctgaaattaagggtacaagtatcttatttttaaaggagggagagcaaggatctgtagccttgagaccccatacagatagatgcacaatatgtgtgaacaaaaaaaaacaaacaagaattatttcctataaaaatatatgtacaaatctgtgttggatgattctaatctttgaacacagggctttcattgcttcggatttggatttctgtggtttatatgtgcatcaattg

SEQ ID NO: 5950 - DNA, 980 bp, Zea Mays
gttagcgttacggtccgttctgcaatccaaacatccgatggagcccctatcctgcacgcccgcagaaccgtgccaccgcccctcccgagacttccgccacgcctccccaccgtgcgagattgccgcccccggccgcgagtgtgctgtgtgcccgtcgagacaactgttgtctccttccccaacctgcagaatcgtgcccaccaccgccacctctcgcgcgaggcccggatgaaggcaatggagtatggatctgtgccagtatagataagcttttccagctatgaatcaaggtaaaaacgaaaaagcactaatttgggcaatccatcagtttgatatgatttagttgaaatgttttttgtatccagagtgagtagaaaccgcatgactatgagaagcttgagtatgggccaaagtaggatttacatcagttaattgacggttatatatgttacgtacaagttataagcttttccatttatatgtacttgtaaccaggggggtcagaggtgtatggttgtcgcaatacaacaatgtctctatacatcatctcaacctatggagatttgtctctttctcaagcacttgatgactttaacaatgaccctttgcattgggatcgacagatcaagggtgggatggttaggggttcgttgcggccatagccttcattgcaaggcttattcctccataaggaagctgtgaactgggcatctgctagagaaccacatgacctacatgaggcaccaactcctgaaattaagggtacaagtatcttatttttaaaggagggagagcaaggatctgtagccttgagaccccatacagatagatgcacaatatgtgtgaacaaaaaaaaacaaacaagaattatttcctataaaaatatatgtacaaatctgtgttggatgattctaatctttgaacacagggctttcattgcttcggatttggatttctgtggtttatatgtgcatcaattg

SEQ ID NO: 5951 - DNA, 236 bp, Zea Mays
ctgcaatccaaacatccgatggagcccctatcctgcacgcccgcagaaccgtgccaccgcccctcccgagacttccgccacgcctccccaccgtgcgagattgccgcccccggccgcgagtgtgctgtgtgcccgtcgagacaactgttgtctccttccccaacctgcagaatcgtgcccaccaccgccacctctcgcgcgaggcccggatgaaggcaatggagtatggatctgtg

SEQ ID NO: 5952 - DNA, 1044 bp, Zea Mays
cgcagaaccgtgccaccgcccctcccgagacttccgccacgcctccccaccgtgcgagattgccgcccccggccgcgagtgtgctgtgtgcccgtcgagacaactgttgtctccttccccaacctgcagaatcgtgcccaccaccgccacctctcgcgcgaggcccgggtctgcggccaccggcacagccagcatccttccctgcctgctcgctatgcatcatgtccgcgttcagcgagacaaccgtcgtcctcccttgctgagttaagtctccttgtgtgcagatgaaggcaatggagtatggatctgtgccagtatagataagcttttccagctatgaatcaaggggggtcagaggtgtatggttgtcgcaatacaacaatgtctctatacatcatctcaacctatggagatttgtctctttctcaagcacttgatgactttgtaagtttgcaatctcaagggagaatagctatcctgtcacgggctgttcattgtgcacaatcaacatctcttaatagatcaaataatgttctgaacaacagcataggtcaaagttgcaatcggaaggctcaggaagctgattgagtgaagctatcttattttctgacgttacttgcttcttgaatttaacataatttacttcccaatgtgcagaacaatgaccctttgcattgggatcgacagatcaagggtgggatggttaggggttcgttgcggccatagccttcattgcaaggcttattcctccataaggaagctgtgaactgggcatctgctagagaaccacatgacctacatgaggcaccaactcctgaaattaagggtacaagtatcttatttttaaaggagggagagcaaggatctgtagccttgagaccccatacagatagatgcacaatatgtgtgaacaaaaaaaaacaaacaagaattatttcctataaaaatatatgtacaaatctgtgttggatgattctaatctttgaacacagggctttcattgcttcggatttggatttctgtggtttatatgtgcatcaattg

SEQ ID NO: 5953 - DNA, 1478 bp, Zea Mays
accagggggggtcagaggtgtatggttgtcgcaatacaacaatgtctctatacatcatctcagcctatggagatttgtctctttctcaagcacttgatgagtttaacaacgaccctttgcattggcatcaacagaccaaggttgcgatggtaaggggtttattgcgggaccatagccttcattgcaaggcttattcccataagaaagctgtgaactgggcatctgctagagaagcacatgatctacatgatgcaccaagtcctgaaattaagggtacaagtatcttattttaaaggagggagagcaaagatctatagccttgagaccccatacagatagctacacaaatatgtgtgcaaaaaaaaaaacaaacaagaattatttcctataaaaatatatgtacaaatctgtgttggatgattctaatctttgaacacagggctttcattgcttcggatttgggtttctgtggtttatatgtgcatcaattgtcatgtgcgtggcctgtgtctgcttattcaccccatccttgcccatgtaattaattaacttaccattgggttcatgatctgcatgaaaaacaagaattgttttggagtaatttattccaaaggtcaggtgtctatttgacttgatggtatgtatctaaacaaactacagttatttagaagtagttagcaaaaaatcgcaatcatgttcatggtactaaaactctgaaagcaggaaagaggaaagcaacgggttgtatcttcattaggctattctcaatgaactgaagaaaacaacatgtgcccagatattgacaagtctaagttgaaggacaaaatattggtaatatcatcagtttcatatataaagatcaaacatcacccatagtgaatagtacgggacaaccacaatccagctttcacgcccgagaggccgaggcttccgttcttgaagttggagtagccgactggtcgtgatcgctctgagttgaaagtgagcgagcacaggcttgtttgaggggcacaaaatttaacagtgtggacaagtctaagagcaagcaaaaatcaaagcaacaagctcttggatcagaactactccagccaggcaaaaatcatctagtaagaagggattcagagccatctgatcgtttgactcgcgaaagcaaccagcaactctcgaggatagcggtcgccaccgtatagtaggtagaaaatgccgccgtcggttcgcgggcgacgagcaacgagcatgcatgcgggcacgtggcgacgaccgacctggtgatccatccatcgccgccgcgcaagcaaccggcacgtacaggcgagaaccagacaccaccgccacgcgggcgcgcgagcgaagaggaggatggagaaggagggacgaaatgacatgtatcagtgatagggagagagacgatgggaagagaaggaaacacgtaacctttcaacgaaacgtgacaatatgacatgttcccctagcttgct

SEQ ID NO: 5954 - DNA, 2186 bp, Zea Mays
cgatccttggaaagttcgatccagccgatggctgacacaaatgcatgcaagacattcagtgcattacgccagagacaagtagcggtgtcaaccgctttagcacctggcagaaccctatttatagcctccatgaccaaaggcgatgcacaagccttatccctcagctcggctcgcaccaacagccctcgccgttaaatcaacatctagtagcaatggcggcgcaggtcgtcgcagcaggcgacggcggcagctggcctcagcaatggcggctcacgctcgtgctggcggctctcgtccctctgctcagcctctgcctactcctagcgagaacaacaagaagagcaagagcaagtagctggagcagcagcagcaaaggccggcgcctcgacgtccaccgcctgccgccggggccaccgaggttgccgctcctgggcaatctgcaccagctgggctcgctgccgcaccggagcctgcgcgagctggcgcgccgccacgggcccgtcatgctgctgcgcctgggcagcgtgcccacgctggtggtgtcgtcggcggacgcggcgcgggaggtcatgaaggcgcgcgacgccgactgctgcagccgccccgacacgccgggggccaggcgcctctcgtacggccacaaggacgtcgccttcgcgccctacaccgactactggcgccagatgcgcaagctcttcgtcgtcgagctcctcagcgcgcgccgcgtccgggccgccgaccacgccagggaggccgaggtggacaagctcatcgccaggctgagcagcgccggcggcaagccggtgcagctggaggaccacatgttcgcgctcatggacggcgtcatcggcaccgtggcgttcgggaacatctacggcgcggagcagttcgcgcacaggaaccacttccacgacgtgctggacgaggccttgagcgccaaggccggattctccgcggaggactactaccccaacgccgccggccgcctcgtcgaccgcctcaccggcgccgccgcccgccgcgagagggtgttcagggaccttgacgccttcttcgacaccatcatcgaccagcacctggtcgacccgtcgtcatcgctgtccagcgccacgacgacgcccgacctcatcgacgtcttcgtcgacctcatggaggagagccggcgccagccacaggtccacggctccctccgattcactagggaccacatcaaagggctgctctcgaacgttttcaccgctggcgtggacacgagctcggtgaccatggtgtgggcgatggcggagctgatccggaggccggcgatgctgaggaaggcgcaggaggaggtccggtccgtggtgggcggcgacagggagagggtgcacccggacgacgtgcccaagctcaggtacctgaaggcggtggtgaaggagacgctgcggctgcacccggcggcgccgctgctgctgccgagggagacgatgcggcacgtgagcgtctgcgggtacgacgtgccggccaagacgcgggtgctggtgaacgcatgggccatcggcagggacccccgcagctgggggcccaggcccgaggagttcgaccccgccaggttcgaagacggcggcgacgtggggttcaacggcacgcacttcgagctcatccccttcggcgccggccgccggatgtgcccgggcatagccatgggcgtggccaccatggagttcacgctggctaacttgctctactgcttcgactgggagctcccggagggagtgggggtcgaggacgtgagcatggaagaggccggaagcctcaccgtccacaagaaaacgccgctcctccttgtccccacaagatacaaagccaactgtcagagtcgtcactctttccaattttgaaaacaacgagtctgatggacagactaagctgaagactggggacaagctgtgtttcaaggaaaggggaatgtgatgattgacggtgaagaagatgaagactgggcgcaagcttcagatggcgtcgatgatctagagaagcagagaaaaggatggcacgagagaaacgtttgagtacagagtagtattatgggccccaacgggctatgtaaaagagtcatgagttggcccatgtaatcggttctcaaatgcttataagcgcgcgatgctgaaagagacaacaagaaatagaatgagaaaccaattccccct

SEQ ID NO: 5955 - DNA, 1766 bp, Zea Mays
ccctcagctcggctcgcaccaacagccctcgccgttaaatcaacatctagtagcaatggcggcgcaggtcgtcgcagcaggcgacggcggcagctggcctcagcaatggcggctcacgctcgtgctggcggctctcgtccctctgctcagcctctgcctactcctagcgagaacaacaagaagagcaagagcaagtagctggagcagcagcagcaaaggccggcgcctcgacgtccaccgcctgccgccggggccaccgaggttgccgctcctgggcaatctgcaccagctgggctcgctgccgcaccggagcctgcgcgagctggcgcgccgccacgggcccgtcatgctgctgcgcctgggcagcgtgcccacgctggtggtgtcgtcggcggacgcggcgcgggaggtcatgaaggcgcgcgacgccgactgctgcagccgccccgacacgccgggggccaggcgcctctcgtacggccacaaggacgtcgccttcgcgccctacaccgactactggcgccagatgcgcaagctcttcgtcgtcgagctcctcagcgcgcgccgcgtccgggccgccgaccacgccagggaggccgaggtggacaagctcatcgccaggctgagcagcgccggcggcaagccggtgcagctggaggaccacatgttcgcgctcatggacggcgtcatcggcaccgtggcgttcgggaacatctacggcgcggagcagttcgcgcacaggaaccacttccacgacgtgctggacgaggccttgagcgccaaggccggattctccgcggaggactactaccccaacgccgccggccgcctcgtcgaccgcctcaccggcgccgccgcccgccgcgagagggtgttcagggaccttgacgccttcttcgacaccatcatcgaccagcacctggtcgacccgtcgtcatcgctgtccagcgccacgacgacgcccgacctcatcgacgtcttcgtcgacctcatggaggagagccggcgccagccacaggtccacggctccctccgattcactagggaccacatcaaagggctgctctcgaacgttttcaccgctggcgtggacacgagctcggtgaccatggtgtgggcgatggcggagctgatccggaggccggcgatgctgaggaaggcgcaggaggaggtccggtccgtggtgggcggcgacagggagagggtgcacccggacgacgtgcccaagctcaggtacctgaaggcggtggtgaaggagacgctgcggctgcacccggcggcgccgctgctgctgccgagggagacgatgcggcacgtgagcgtctgcgggtacgacgtgccggccaagacgcgggtgctggtgaacgcatgggccatcggcagggacccccgcagctgggggcccaggcccgaggagttcgaccccgccaggttcgaagacggcggcgacgtggggttcaacggcacgcacttcgagctcatccccttcggcgccggccgccggatgtgcccgggcatagccatgggcgtggccaccatggagttcacgctggctaacttgctctactgcttcgactgggagctcccggagggagtgggggtcgaggacgtgagcatggaagaggccggaagcctcaccgtccacaagaaaacgccgctcctccttgtccccacaagatacaaagccaactgtcagagtcgtcactctttccaattttgaaaacaacgctgacttgtaccagtttccatgtcatcggtgtatcatg

SEQ ID NO: 5956 - DNA, 3340 bp, Zea Mays
cacaagcagagcaccaagcggcaggcaggagagagaggcctcgcatggaggtaggaggcccatctctgatagccaagcatgatttgcccgtagtctgactctgagtgtgctcctgctacgggcaaatcatcttggccatctgagtacctccctacgctgtccccatgtcaggaggccctgctcttcttcggtcggttttaaggcctgtttggagaggagcctacggcgccgcagcccgccacacctgcggcggccgatttgggcgccacacccgcggcagccggagtgtggcgcggtgtggcgcccgagccagcccaccaaacaggcccttagatagccaaaacgcagtacacacagcgctgcttaccttgacgacgaccacttgtgttggagcagcagtcatctacagccaaaactcttcacttccttcgccattgccgtgttaccagcccagccagcgacgtgggcgtgccgcgacagggttttttccccctgggaaacgttgtgttctggcagatgccacaaaaggtaccttgggctcggcaaatcccttcaaccctgagcctctttcattcatccacgcaagtgacaaggccaagaaccactccagctcaatgatcctctagcatgcttatacttatggcaaaaaatgtaccggactatcgtgttcgacaaccatcacattttttttggagatgacatttcaaaaagaccaaaaactatgatctctcatgatccatctgctactctttgggtatcaatgcctcatcagcttatcgtttccttgcaccttccgtgcagctctctgcccacagcacgccttaaccagttgctaataagagagaagacagaaaaatatctcagacatcagaaggattggacttgaagtaacttggcatagaaacatcagttgcctactaatctatataagtagctaaaaacatcttgccgacttagattctgttctttagttcagatatgccacatgcccacaggacaacacacactacaaacagtgtcacggtgcccaaacaaactgctaaatcatgcccatttcctggtggaaatcctggtatcgcgctattgctgtgtttaccaacaaaattagcatggctttatagtatatctagcagcgacacggttttagtgcagcggctggtagccaattttgtctatctatcacatgaacacttgtgttaggaaaaagaaagtagagcattgtatgtcattattggcttattgcattatacaacaatgaatgactaggtgatcataatttttttggcaacataaataaatggtaaatttattaagtctcgcataaaaatatatttgatttcatgatgggtttaaaatggacataaacactcgtgttgaaataaggactcggttgaggcataggagagctctattctacaataggaaatgtgcatttaatacataaaaggaatattaatgtgtagccaattaaccagaggaatttaaagaacataagcagaaatggaaacagcaatactaggttatagactattaattagccatgctaaacttgtaatcatgaatagaactcaaaattgcagtaattctaaaaggtattcatcggaacatacatgggcattttcctcacaacagagtgataatttacatataaagagaatagagaaagtcgaaccaagttcacttgaaaaggcaaataaaatctagacagccaattagaagttcagttaaaggaccaaatcatgtcacgactgggtacctgggtgccataagaagcagaattgataacagtatatcacataatgtgtgccgctcagttaaaaaaaaaacttatactataaaatgtaatgtacagtgttttctcatcataacaatcaatgggcaattgatgcattaatttcaacaaaatatgcacaaaaacgatggaaacaacattcatgaacgatctccaacatcatttatgctcaagatttatccaatttggttaaatcatgatgcaaaatgtatgaataaaagattaattgtggaacttggtgttgactttattatcgaaacaagtcaggcgaacaattgctactctcattcgacaaggaattattcctatggagattgtgggttgacctcaatagccctttagaacattggattctgttcatcaaaccctggccttaagggaggctcaagaggcacacatatttcaaaagagatcttctttttgattgatttctcgcaagatgtgcaaggtcaaaacaaagaagccggtccctgcatgatttggagaatatatacctaccgttattatcaagaaaaagattcaaaggaaaaaagaagtgtgctgatgtgccccaaatgtatggatggtacgttgacttgtattttctttatgtatctatcgtatctgctcttgtgcacacataaagaaaatggggcaagaatctaaaaggcagaaatcacagcacgtaatttctagttgccacccagccgccgtgcatcaccaataacctgatctacccaagcttgtcacctcagtgtgcatgggctggcgaaagtgcatttgcatttcccatctggtgtagatataggatgcatgtgcccataggggcacaccaatataccaaacagcattccttgaacagctcacaaaccaaaagcggtgcatcatatttttactacagaatctctatttatagtaccagatgatccaatcctatcctatcatgcattttgcacttgctgttgatggaattgcaaaatgccagcataataaatggttatgagaggcacaatttgctctgattgtgctttctagcttgtgcagaatttgcatatccctcttttcacaacctttccagttgccttctgtgcacataatgtttagtgaaagtcaatgtgaaagattgatttatggcacggttctgatagaaagtatcatgtataataaaaccatgcaagtaataaaaaggcgcacatttttcacatataattatgagcctgaacatgataaaacagtggcatcatgttaatgcaactagttcgctgcaatccattatttcaatgtcttctaaactattccttttgagcatcttctcaacggcatcataatacagcaaaggtgaggcggacatcaaacctatatacagcatactcagagcagcactagttattcccgtcattcactactagctctctacggaaaggaattggcaaaaataaaagagagacatgaggagacgctaagagctcaccaactcaggacgcgttgtcgctccggagcttgaggatggcggcgtacatcttcctcctggagccaacagccccaatgcccatgtccttgaggtcctcc

SEQ ID NO: 5957 - DNA, 2202 bp, Zea Mays
ccgtccgtttccgcgccgcagcagccgcctatataaacaaggcgcctcccgtcccagcgccccgcttccctgtctcgccgccacctcctctgcgctccccgttccccaggtcgcgcgcacccgctcccgcaccggagaacccaccgcacgccggcctcgttccgagatggcggcggcgctgcgcttcccgggggtcgcgagggagtctctgtctctggacgcgcccgtcgccgcctccaagctcgggagggagcggcgcccggcccccgcgagcgcgaacccggggccgcaatgctggaggcggaggaggggcctggcggtgcgctgccagacggggtccaccgcaccgcccgtccttaggacggaggaggcccccgcggctgcggcgggggcaaggaatgcccaggcggggttcaccgtcgtcatgaagttcggcggctcgtcgctcgcgtcagccgagcggatgcgggaggtggccggcctcatccttagcttccccgacgagacgcccgtcgtcgtcctctccgccatggggaagaccaccaataacctcctcctggccggcgagaaggcggtgagctgcggcgcccccaaggcgtccgaaatccctgagctcgctgtcatcaaggacctgcatcttaggacggttgatgagctcggtttagataggtcgattgtttcaggtttattggatgaattggagcaacttcttaaaggagttgctatgatgaaagagctgacccttaggacaagagattaccttgtttcctttggtgaatgtatgtcgacaagaatatttgctgcatatttgaacaaacttgggaaaaaagcacgccagtatgatgcatttgatattggctttataaccaccgatgatttcacaaatgcggatattcttgaagccacttaccctgctgttgcgaagaggctacatgaagactggatggatgaccctgctattcctatagtcactggttttcttgggaaggcaggggtggtagtgacttgacagctacaaccattggcaaagccttgggattaagagaaatccaggtttggaaggatgtagatggtgtgttgacatgtgatcctaatatatatgcaaatgctatacccgtgccctacttgacttttgatgaggctgctgagcttgcctactttggtgcacaggttttgcatccccagtcaatgcgaccggctagggatggtgatattccagtgagagtaaagaactcatacaatcgtcatgcacctggtactgtcatcactaaatccagagatatgagcaagagcatattgactagcattgtgttgaaatctaatgttaccatgctggatatagtgagcacaaggatgcttggccaatacgggtttttagcaaaggtattctcaatatttgaagatttgggcatctctgttgactgtgtggctactagtgaagtcagcatctcgttgactctagatccatcaaaactatggagtcgtgaattgatccagcaggaacttgatcatgtcgttgaagagcttaaaaaatttgcagttgttcatctgctgcaacgtagatcgatcatctcactgatagggaatgtacagcgatcgtcattgattcttgaaaaggcattcaacgttctgcgaagaaatggtgttaatgtccagatgatctcacaaggggcgtccaaggtgaacatttccttggtagtcaatgacagtgaggcaaaacagtgcgtacaagccctccattcagcgttctttgagaatggcttcttgtcggaggtagagggagctgacgttccccagaacggagcctctctgaactcaaatggcgctgtctatggaaactagtcgactctgcaactgatttcttcaaaatttgtgtaccattggtaggttgaatggtggtgattcatagctatttatttagggcatcagtcatgttggtgcaaattttcttgatgttttaagagcttattaccagaacagtctgcatggtataccttgcgattgggtgctaccaagtagtagccaatgtcttggggatctgccacatgtttaaggcattccaaggcttatatgtatctgagttgtattgtatgtgagaactattgagttgtattgtggtgattaagtttggtagttttagactgaactcggtggatggtccattatcatgcaagcgaatgtggtcttctgtttctgttacca

SEQ ID NO: 5958 - DNA, 2116 bp, Zea Mays
ccgtccgtttccgcgccgcagcagccgcctatataaacaaggcgcctcccgtcccagcgccccgcttccctgtctcgccgccacctcctctgcgctccccgttccccaggtcgcgcgcacccgctcccgcaccggagaacccaccgcacgccggcctcgttccgagatggcggcggcgctgcgcttcccgggggtcgcgagggagtctctgtctctggacgcgcccgtcgccgcctccaagctcgggagggagcggcgcccggcccccgcgagcgcgaacccggggccgcaatgctggaggcggaggaggggcctggcggtgcgctgccagacggggtccaccgcaccgcccgtccttaggacggaggaggcccccgcggctgcggcgggggcaaggaatgcccaggcggggttcaccgtcgtcatgaagttcggcggctcgtcgctcgcgtcagccgagcggatgcgggaggtggccggcctcatccttagcttccccgacgagacgcccgtcgtcgtcctctccgccatggggaagaccaccaataacctcctcctggccggcgagaaggcggtgagctgcggcgcccccaaggcgtccgaaatccctgagctcgctgtcatcaaggacctgcatcttaggacggttgatgagctcggtttagataggtcgattgtttcaggtttattggatgaattggagcaacttcttaaaggagttgctatgatgaaagagctgacccttaggacaagagattaccttgtttcctttggtgaatgtatgtcgacaagaatatttgctgcatatttgaacaaacttgggaaaaaagcacgccagtatgatgcatttgatattggctttataaccaccgatgatttcacaaatgcggatattcttgaagccacttaccctgctgttgcgaagaggctacatgaagactggatggatgaccctgctattcctatagtcactggttttcttgggaagggatgtaaatcatgtgctgtcaccactttaggcaggggtggtagtgacttgacagctacaaccattggcaaagccttgggattaagagaaatccaggttttgcatccccagtcaatgcgaccggctagggatggtgatattccagtgagagtaaagaactcatacaatcgtcatgcacctggtactgtcatcactaaatccagagatatgagcaagagcatattgactagcattgtgttgaaatctaatgttaccatgctggatatagtgagcacaaggatgcttggccaatacgggtttttagcaaaggtattctcaatatttgaagatttgggcatctctgttgactgtgtggctactagtgaagtcagcatctcgttgactctagatccatcaaaactatggagtcgtgaattgatccagcaggaacttgatcatgtcgttgaagagcttaaaaaatttgcagttgttcatctgctgcaacgtagatcgatcatctcactgatagggaatgtacagcgatcgtcattgattcttgaaaaggcattcaacgttctgcgaagaaatggtgttaatgtccagatgatctcacaaggggcgtccaaggtgaacatttccttggtagtcaatgacagtgaggcaaaacagtgcgtacaagccctccattcagcgttctttgagaatggcttcttgtcggaggtagagggagctgacgttccccagaacggagcctctctgaactcaaatggcgctgtctatggaaactagtcgactctgcaactgatttcttcaaaatttgtgtaccattggtaggttgaatggtggtgattcatagctatttatttagggcatcagtcatgttggtgcaaattttcttgatgttttaagagcttattaccagaacagtctgcatggtataccttgcgattgggtgctaccaagtagtagccaatgtcttggggatctgccacatgtttaaggcattccaaggcttatatgtatctgagttgtattgtatgtgagaactattgagttgtattgtggtgattaagtttggtagttttagactgaactcggtggatggtccattatcatgcaagcgaatgtggtcttctgtttctgttacca

SEQ ID NO: 5959 - DNA, 1479 bp, Zea Mays
acaacagaaaaaaaacatttgggtcgtcgagtttgggtccgaacaaaaaatgagcccaacggcaccaccgggaccgggaccgactggagacactgcttgcaattgcgccacgcccgccacgccgccaggccgccactagggtttttcggagcctcgtcatcgtctccgaccccgtgtctccgaacaacatcgcgcggccgccgcctcctcccagtcgccatggtcaggctcaccgctgacctgatatggaagagcccgcacttcttcaacgccgtcaaggagcgcgagctcgacctccgaggcaacaagatcgccgtcatcgagaatgtcggagccaccgaggaccagtttgacacaattgacttgtcggataatgagattgtcaagcttgaaaacttcccatacttgaatcgtcttggcactctactagttaataataacagaatcacacgtatcaatcccaatcttggcgagattgatcccctggcatctcttccaaagctacaattccttagcttactggataatactgtaactaagcagccagattacaggctgtatgtgatccataaattgaagcatttgcgtttgctggatttcaagaaagtgaaacaacaggagagagttgcggcagcgaaaaagttccactcaaaggaagcagaggaagaggcaaagaaggtgcctgccaaaacgtttactcctggtctgcctgatgctcaggacatcacaatggagccacaaggtcctaaagtagttgctccaactcctgaacaaatcacagctatcaaggctgctattgcaaatgcccacactctcgaggaagctgcaaggctagaacaggtactaagcactggccaagttcctgctgaatttgcagtgcccaggcccgatgcaaacatggccgaagcttcagatggagccgagaagatggacacagatggtgagaaccaagagggcggtgaggctgatgggcagaaacaaggcgaaggaagcaccccaattcaggaggattgaagtcatggtgacatgggctgggtcatccattgtctgagttaggtttgccagttttcgtgggggtgcaggaaagagctagagccttgttgccgcagaactccccctctatggatcgcatgtggatgctaacaagattcttgcttatttttgcagtagatggtactgagaacagaatcagatgttgtaaactatacatacagtcgtgcatgttgccgaatggaccattgtttcggtcgtagcgcttgtgtcggtgcctgactgcagtctgcagagcgagatgtcgccctgccgcctatccttttctcggagtgctttattacaagtttgagtgatggatcctgttgagttgaggcggatgatcgtcatctattgctggatgtttcgtttttttctttcttgtatcgttttgtatacgtgcaattgtagtcaatggttggacttgtcttgtaggccgtctactatgat

SEQ ID NO: 5960 - DNA, 1711 bp, Zea Mays
acaacagaaaaaaaacatttgggtcgtcgagtttgggtccgaacaaaaaatgagcccaacggcaccaccgggaccgggaccgactggagacactgcttgcaattgcgccacgcccgccacgccgccaggccgccactagggtttttcggagcctcgtcatcgtctccgaccccgtgtctccgaacaacatcgcgcggccgccgcctcctcccagtcgccatggtcaggctcaccgctgacctgatatggaagagcccgcacttcttcaacgccgtcaaggagcgcgagctcgacctccgaggcaacaagatcgccgtcatcgagaatgtcggagccaccgaggaccagtttgacacaattgacttgtcggataatgagattgtcaagcttgaaaacttcccatacttgaatcgtcttggcactctactagttaataataacagaatcacacgtatcaatcccaatcttggcgagattgatcccctggcatctcttccaaagctacaattccttagcttactggataatactgtaactaagcagccagattacaggctgtatgtgatccataaattgaagcatttgcgtttgctggatttcaagaaagtgaaacaacaggtttgttcatttcctttggaatggctccaaaatatgttttgggatggaccccagaagtgctgggctgctggcagcaaaagagacaaacaagcaactcttttgactttggattttcacgaattagatgcattaacaccatggaatgctttgtctggcatgttttccattatccagtctgcaaatgttgcttttatttctgattttcttgggagattttttttttgctttgtaggagagagttgcggcagcgaaaaagttccactcaaaggaagcagaggaagaggcaaagaaggtgcctgccaaaacgtttactcctggtctgcctgatgctcaggacatcacaatggagccacaaggtcctaaagtagttgctccaactcctgaacaaatcacagctatcaaggctgctattgcaaatgcccacactctcgaggaagctgcaaggctagaacaggtactaagcactggccaagttcctgctgaatttgcagtgcccaggcccgatgcaaacatggccgaagcttcagatggagccgagaagatggacacagatggtgagaaccaagagggcggtgaggctgatgggcagaaacaaggcgaaggaagcaccccaattcaggaggattgaagtcatggtgacatgggctgggtcatccattgtctgagttaggtttgccagttttcgtgggggtgcaggaaagagctagagccttgttgccgcagaactccccctctatggatcgcatgtggatgctaacaagattcttgcttatttttgcagtagatggtactgagaacagaatcagatgttgtaaactatacatacagtcgtgcatgttgccgaatggaccattgtttcggtcgtagcgcttgtgtcggtgcctgactgcagtctgcagagcgagatgtcgccctgccgcctatccttttctcggagtgctttattacaagtttgagtgatggatcctgttgagttgaggcggatgatcgtcatctattgctggatgtttcgtttttttctttcttgtatcgttttgtatacgtgcaattgtagtcaatggttggacttgtcttgtaggccgtctactatgat

SEQ ID NO: 5961 - DNA, 1655 bp, Zea Mays
acaacagaaaaaaaacatttgggtcgtcgagtttgggtccgaacaaaaaatgagcccaacggcaccaccgggaccgggaccgactggagacactgcttgcaattgcgccacgcccgccacgccgccaggccgccactagggtttttcggagcctcgtcatcgtctccgaccccgtgtctccgaacaacatcgcgcggccgccgcctcctcccagtcgccatggtcaggctcaccgctgacctgatatggaagagcccgcacttcttcaacgccgtcaaggagcgcgagctcgacctccgaggcaacaagatcgccgtcatcgagaatgtcggagccaccgaggaccagtttgacacaattgacttgtcggataatgagattgtcaagcttgaaaacttcccatacttgaatcgtcttggcactctactagttaataataacagaatcacacgtatcaatcccaatcttggcgagtttttgccaaagctgcatacgctggtgctcacgaataatcgtctgacaaatcttgcagagattgatcccctggcatctcttccaaagctacaattccttagcttactggataatactgtaactaagcagccagattacaggctgtatgtgatccataaattgaagcatttgcgtttgctggatttcaagaaagtgaaacaacaggtttgttcatttcctttggaatggctccaaaatatgttttgggatggaccccagaagtgctgggctgctggcagcaaaagagacaaacaagcaactcttttgactttggattttcacgaattagatgcattaacaccatggaatgctttgtctggcatgttttccattatccagtctgcaaatgttgcttttatttctgattttcttgggagattttttttttgctttgtaggagagagttgcggcagcgaaaaagttccactcaaaggaagcagaggaagaggcaaagaaggtgcctgccaaaacgtttactcctggtctgcctgatgctcaggacatcacaatggagccacaaggtcctaaagtagttgctccaactcctgaacaaatcacagctatcaaggctgctattgcaaatgcccacactctcgaggaagctgcaaggctagaacaggtactaagcactggccaagttcctgctgaatttgcagtgcccaggcccgatgcaaacatggccgaagcttcagatggagccgagaagatggacacagatggtgagaaccaagagggcggtgaggctgatgggcagaaacaaggcgaaggaagcaccccaattcaggaggattgaagtcatggtgacatgggctgggtcatccattgtctgatagatggtactgagaacagaatcagatgttgtaaactatacatacagtcgtgcatgttgccgaatggaccattgtttcggtcgtagcgcttgtgtcggtgcctgactgcagtctgcagagcgagatgtcgccctgccgcctatccttttctcggagtgctttattacaagtttgagtgatggatcctgttgagttgaggcggatgatcgtcatctattgctggatgtttcgtttttttctttcttgtatcgttttgtatacgtgcaattgtagtcaatggttggacttgtcttgtaggccgtctactatgat

SEQ ID NO: 5962 - DNA, 1271 bp, Zea Mays
gtgggatttatcttctacatcagcatactgcttgagatgatcaatctcgatgctcagatcaaccatcttagaatgaccagtttgacacaattgacttgtcggataatgagattgtcaagcttgaaaacttcccatacttgaatcgtcttggcactctactagttaataataacagaatcacacgtatcaatcccaatcttggcgagtttttgccaaagctgcatacgctggtgctcacgaataatcgtctgacaaatcttgcagagattgatcccctggcatctcttccaaagctacaattccttagcttactggataatactgtaactaagcagccagattacaggctgtatgtgatccataaattgaagcatttgcgtttgctggatttcaagaaagtgaaacaacaggagagagttgcggcagcgaaaaagttccactcaaaggaagcagaggaagaggcaaagaaggtgcctgccaaaacgtttactcctggtctgcctgatgctcaggacatcacaatggagccacaaggtcctaaagtagttgctccaactcctgaacaaatcacagctatcaaggctgctattgcaaatgcccacactctcgaggaagctgcaaggctagaacaggtactaagcactggccaagttcctgctgaatttgcagtgcccaggcccgatgcaaacatggccgaagcttcagatggagccgagaagatggacacagatggtgagaaccaagagggcggtgaggctgatgggcagaaacaaggcgaaggaagcaccccaattcaggaggattgaagtcatggtgacatgggctgggtcatccattgtctgagttaggtttgccagttttcgtgggggtgcaggaaagagctagagccttgttgccgcagaactccccctctatggatcgcatgtggatgctaacaagattcttgcttatttttgcagtagatggtactgagaacagaatcagatgttgtaaactatacatacagtcgtgcatgttgccgaatggaccattgtttcggtcgtagcgcttgtgtcggtgcctgactgcagtctgcagagcgagatgtcgccctgccgcctatccttttctcggagtgctttattacaagtttgagtgatggatcctgttgagttgaggcggatgatcgtcatctattgctggatgtttcgtttttttctttcttgtatcgttttgtatacgtgcaattgtagtcaatggttggacttgtcttgtaggccgtctactatgat

SEQ ID NO: 5963 - DNA, 1456 bp, Zea Mays
cgatgctcagatcaaccatcttagaatgaccagtttgacacaattgacttgtcggataatgagattgtcaagcttgaaaacttcccatacttgaatcgtcttggcactctactagttaataataacagaatcacacgtatcaatcccaatcttggcgagtttttgccaaagctgcatacgctggtgctcacgaataatcgtctgacaaatcttgcagagattgatcccctggcatctcttccaaagctacaattccttagcttactggataatactgtaactaagcagccagattacaggctgtatgtgatccataaattgaagcatttgcgtttgctggatttcaagaaagtgaaacaacaggtttgttcatttcctttggaatggctccaaaatatgttttgggatggaccccagaagtgctgggctgctggcagcaaaagagacaaacaagcaactcttttgactttggattttcacgaattagatgcattaacaccatggaatgctttgtctggcatgttttccattatccagtctgcaaatgttgcttttatttctgattttcttgggagattttttttttgctttgtaggagagagttgcggcagcgaaaaagttccactcaaaggaagcagaggaagaggcaaagaaggtgcctgccaaaacgtttactcctggtctgcctgatgctcaggacatcacaatggagccacaaggtcctaaagtagttgctccaactcctgaacaaatcacagctatcaaggctgctattgcaaatgcccacactctcgaggaagctgcaaggctagaacaggtactaagcactggccaagttcctgctgaatttgcagtgcccaggcccgatgcaaacatggccgaagcttcagatggagccgagaagatggacacagatggtgagaaccaagagggcggtgaggctgatgggcagaaacaaggcgaaggaagcaccccaattcaggaggattgaagtcatggtgacatgggctgggtcatccattgtctgagttaggtttgccagttttcgtgggggtgcaggaaagagctagagccttgttgccgcagaactccccctctatggatcgcatgtggatgctaacaagattcttgcttatttttgcagtagatggtactgagaacagaatcagatgttgtaaactatacatacagtcgtgcatgttgccgaatggaccattgtttcggtcgtagcgcttgtgtcggtgcctgactgcagtctgcagagcgagatgtcgccctgccgcctatccttttctcggagtgctttattacaagtttgagtgatggatcctgttgagttgaggcggatgatcgtcatctattgctggatgtttcgtttttttctttcttgtatcgttttgtatacgtgcaattgtagtcaatggttggacttgtcttgtaggccgtctactatgat

SEQ ID NO: 5964 - DNA, 1160 bp, Zea Mays
gctcagatcaaccatcttagaatgaccagtttgacacaattgacttgtcggataatgagattgtcaagcttgaaaacttcccatacttgaatcgtcttggcactctactagttaataataacagaatcacacgtatcaatcccaatcttggcgagattgatcccctggcatctcttccaaagctacaattccttagcttactggataatactgtaactaagcagccagattacaggctgtatgtgatccataaattgaagcatttgcgtttgctggatttcaagaaagtgaaacaacaggagagagttgcggcagcgaaaaagttccactcaaaggaagcagaggaagaggcaaagaaggtgcctgccaaaacgtttactcctggtctgcctgatgctcaggacatcacaatggagccacaaggtcctaaagtagttgctccaactcctgaacaaatcacagctatcaaggctgctattgcaaatgcccacactctcgaggaagctgcaaggctagaacaggtactaagcactggccaagttcctgctgaatttgcagtgcccaggcccgatgcaaacatggccgaagcttcagatggagccgagaagatggacacagatggtgagaaccaagagggcggtgaggctgatgggcagaaacaaggcgaaggaagcaccccaattcaggaggattgaagtcatggtgacatgggctgggtcatccattgtctgagttaggtttgccagttttcgtgggggtgcaggaaagagctagagccttgttgccgcagaactccccctctatggatcgcatgtggatgctaacaagattcttgcttatttttgcagtagatggtactgagaacagaatcagatgttgtaaactatacatacagtcgtgcatgttgccgaatggaccattgtttcggtcgtagcgcttgtgtcggtgcctgactgcagtctgcagagcgagatgtcgccctgccgcctatccttttctcggagtgctttattacaagtttgagtgatggatcctgttgagttgaggcggatgatcgtcatctattgctggatgtttcgtttttttctttcttgtatcgttttgtatacgtgcaattgtagtcaatggttggacttgtcttgtaggccgtctactatgat

SEQ ID NO: 5965 - DNA, 794 bp, Zea Mays
ctgaagtccacaaagttttgttaaggaaggcaggagaagcattaggaatggtaccatgccaataggatgctcagcttttatgctccaggttggtgtggggaagttcgtgatgttatttacactgacagtggaaaggtgacggtcatataccgcgtgactgtgcgcggaacagatggagaggttcacagggaggctgctggaacagcatcgctgagcgatgaacggttcgacgaccccgtgtctgcggcagaagaggcagcgttctgcaaagcctgcgcgaggttcggtttcggcctttacctgtaccatgaagacgagacaccatagaagaccaacaatttctccacatcgtctatgccggccctgttctgtttagatttgcgcttgaggggctgtgctctactgttgttgatcagtaagtctatcagatacccatcccattgctgctaggtccttgagctgttgtaacgctggtactatgttgtttgctcgttttggtagctttgtcttgcaaaaaaatgttgtcagctacaattggtatggattatggaactattagtatatatgcaatacttttttgttgcttacctctaatatacacatctcacactgttcaagtttatagaaaaaatcacgtagcatcgaatttgtttcaatgaatccgccatgaaatatttcttattttgtattctggactagatgctgacatattttttttttctaaaatcttagaagttactgaaaatggtttgacacaagctctgtctctttttaagcggaccggcgaaccagtt

SEQ ID NO: 5966 - DNA, 727 bp, Zea Mays
cgtcgccctcgcctcctgctggttggtgtggggaagttcgtgatgttatttacactgacagtggaaaggtgacggtcatataccgcgtgactgtgcgcggaacagatggagaggttcacagggaggctgctggaacagcatcgctgagcgatgaacggttcgacgaccccgtgtctgcggcagaagaggcagcgttctgcaaagcctgcgcgaggttcggtttcggcctttacctgtaccatgaagacgagacaccatagaagaccaacaatttctccacatcgtctatgccggccctgttctgtttagatttgcgcttgaggggctgtgctctactgttgttgatcagtaagtctatcagatacccatcccattgctgctaggtccttgagctgttgtaacgctggtactatgttgtttgctcgttttggtagctttgtcttgcaaaaaaatgttgtcagctacaattggtatggattatggaactattagtatatatgcaatacttttttgttgcttacctctaatatacacatctcacactgttcaagtttatagaaaaaatcacgtagcatcgaatttgtttcaatgaatccgccatgaaatatttcttattttgtattctggactagatgctgacatattttttttttctaaaatcttagaagttactgaaaatggtttgacacaagctctgtctctttttaagcggaccggcgaaccagtt

SEQ ID NO: 5967 - DNA, 973 bp, Zea Mays
ccccccgccggccgctgcggcaggaccaagggaacaacgagtcgccttcttgcgcgcgcgctcaccattccgcttcccggcacccgccgccttcccgagccgccgcccggctcgcgtgcccgtcgccgccgcggcgccggagcgcaggccgccgggcgcggtggcgtccaccaccaactacgtcgtgccgctcgacgcggcgccgtccgggatcacgcgcccgctcgtcgagatcctccgcgacctcaacaagcgcgtcccggacgccatcgtgcggccctcctcccggcgcgcctccgcctccgaccccgtcatcccctggtaccatgccaataggatgctcagcttttatgctccaggttcacagggaggctgctggaacagcatcgctgagcgatgaacggttcgacgaccccgtgtctgcggcagaagaggcagcgttctgcaaagcctgcgcgaggttcggtttcggcctttacctgtaccatgaagacgagacaccatagaagaccaacaatttctccacatcgtctatgccggccctgttctgtttagatttgcgcttgaggggctgtgctctactgttgttgatcagtaagtctatcagatacccatcccattgctgctaggtccttgagctgttgtaacgctggtactatgttgtttgctcgttttggtagctttgtcttgcaaaaaaatgttgtcagctacaattggtatggattatggaactattagtatatatgcaatacttttttgttgcttacctctaatatacacatctcacactgttcaagtttatagaaaaaatcacgtagcatcgaatttgtttcaatgaatccgccatgaaatatttcttattttgtattctggactagatgctgacatattttttttttctaaaatcttagaagttactgaaaatggtttgacacaagctctgtctctttttaagcggaccggcgaaccagtt

SEQ ID NO: 5968 - DNA, 1065 bp, Zea Mays
ccccccgccggccgctgcggcaggaccaagggaacaacgagtcgccttcttgcgcgcgcgctcaccattccgcttcccggcacccgccgccttcccgagccgccgcccggctcgcgtgcccgtcgccgccgcggcgccggagcgcaggccgccgggcgcggtggcgtccaccaccaactacgtcgtgccgctcgacgcggcgccgtccgggatcacgcgcccgctcgtcgagatcctccgcgacctcaacaagcgcgtcccggacgccatcgtgcggccctcctcccggcgcgcctccgcctccgaccccgtcatcccctggtaccatgccaataggatgctcagcttttatgctccaggttggtgtggggaagttcgtgatgttatttacactgacagtggaaaggtgacggtcatataccgcgtgactgtgcgcggaacagatggagaggttcacagggaggctgctggaacagcatcgctgagcgatgaacggttcgacgaccccgtgtctgcggcagaagaggcagcgttctgcaaagcctgcgcgaggttcggtttcggcctttacctgtaccatgaagacgagacaccatagaagaccaacaatttctccacatcgtctatgccggccctgttctgtttagatttgcgcttgaggggctgtgctctactgttgttgatcagtaagtctatcagatacccatcccattgctgctaggtccttgagctgttgtaacgctggtactatgttgtttgctcgttttggtagctttgtcttgcaaaaaaatgttgtcagctacaattggtatggattatggaactattagtatatatgcaatacttttttgttgcttacctctaatatacacatctcacactgttcaagtttatagaaaaaatcacgtagcatcgaatttgtttcaatgaatccgccatgaaatatttcttattttgtattctggactagatgctgacatattttttttttctaaaatcttagaagttactgaaaatggtttgacacaagctctgtctctttttaagcggaccggcgaaccagtt

SEQ ID NO: 5969 - DNA, 765 bp, Zea Mays
ccaccacctaccgccgttactgtaccatgccaataggatgctcagcttttatgctccaggttggtgtggggaagttcgtgatgttatttacactgacagtggaaaggtgacggtcatataccgcgtgactgtgcgcggaacagatggagaggttcacagggaggctgctggaacagcatcgctgagcgatgaacggttcgacgaccccgtgtctgcggcagaagaggcagcgttctgcaaagcctgcgcgaggttcggtttcggcctttacctgtaccatgaagacgagacaccatagaagaccaacaatttctccacatcgtctatgccggccctgttctgtttagatttgcgcttgaggggctgtgctctactgttgttgatcagtaagtctatcagatacccatcccattgctgctaggtccttgagctgttgtaacgctggtactatgttgtttgctcgttttggtagctttgtcttgcaaaaaaatgttgtcagctacaattggtatggattatggaactattagtatatatgcaatacttttttgttgcttacctctaatatacacatctcacactgttcaagtttatagaaaaaatcacgtagcatcgaatttgtttcaatgaatccgccatgaaatatttcttattttgtattctggactagatgctgacatattttttttttctaaaatcttagaagttactgaaaatggtttgacacaagctctgtctctttttaagcggaccggcgaaccagtt

SEQ ID NO: 5970 - DNA, 966 bp, Zea Mays
aggaccgccctcttcgctgcacccaatcccttgtcctgtcctcgaaccgtccgccgccgcgttcaacatgggcgacccgccgacgctcaagaggcccaagctcgagaaggccgacgacgactccacctactgcccccgcccgtcctccaatggcgccgcgcccgtacgcacaccaggcgccaccgccgccataggggcggcgccgggtgacgacgtggaggaggaggatgacatcgcggaggaggcggtcatcgccctgatcgcgcaccgcgagcgcgacgtcgagcgctgcaagctcaagttgctccactaccagtctctcctggacaccgcggagatgaagctggaggaggcgcactcgaggctcgccaggttccgagatcgcaagccgccgccaactcggtcggaacccaagccaccgacgccgccaatccagagggaacacaagccatccccgccgccgatccagagggatctcaagccatcgccgcagccgctaatccagaaggctccttcgcccgcgccgcagccgtcggcgaggccgcagcttgtcatccctgggaccagcaaccgaccgaccccgcgccctgagcccatgcctgggttgaagagggccgccgccccgtcatcgtcttcatcaccggcgccaccagagcggtcaaggaaagaggagaagaagcccaagataaagatggaacagaaggagcatcagaacttgattccgagtgttgggaaatcatctgcgactgtgcttagatttcaaggcggaaatttggtctcgagccaacacaggaggaagcttaggtgtcttgagctatgccctgctaatgatcagcttgttgttaccagtgcgctggacggattggttactttatggcaagtggagactagaggatttatgccaacaggagccttaggcaatgctttatacttgaagcctcactctcaaaatgatcatgtattgac

SEQ ID NO: 5971 - DNA, 2332 bp, Zea Mays
aggaccgccctcttcgctgcacccaatcccttgtcctgtcctcgaaccgtccgccgccgcgttcaacatgggcgacccgccgacgctcaagaggcccaagctcgagaaggccgacgacgactccacctactgcccccgcccgtcctccaatggcgccgcgcccgtacgcacaccaggcgccaccgccgccataggggcggcgccgggtgacgacgtggaggaggaggatgacatcgcggaggaggcggtcatcgccctgatcgcgcaccgcgagcgcgacgtcgagcgctgcaagctcaagttgctccactaccagtctctcctggacaccgcggagatgaagctggaggaggcgcactcgaggctcgccaggttccgagatcgcaagccgccgccaactcggtcggaacccaagccaccgacgccgccaatccagagggaacacaagccatccccgccgccgatccagagggatctcaagccatcgccgcagccgctaatccagaaggctccttcgcccgcgccgcagccgtcggcgaggccgcagcttgtcatccctgggaccagcaaccgaccgaccccgcgccctgagcccatgcctgggttgaagagggccgccgccccgtcatcgtcttcatcaccggcgccaccagagcggtcaaggaaagaggagaagaagcccaagataaagatggaacagaaggagcatcagaacttgattccgagtgttgggaaatcatctgcgactgtgcttagatttcaaggcggaaatttggtctcgagccaacacaggaggaagcttaggtgtcttgagctatgccctgctaatgatcagcttgttgttaccagtgcgctggacggattggttactttatggcaagtggagactagaggaccttctctctcatttcgtggcaaaacggatttcttttccccaaagcatagatggcctgaagatatagcttggcatccagatggtgagacaatttttgctgtatacactgctgataatggtgattctcaggtttcaatgacaaaccttatatcaggacaaataatctactttcttgaaatattactaaatggtgttccacaatttttccgctggactgaaacagaggaaagttactttcctacccgagaagcctcacacaaaaggcatcataaacgacataagtttcatgccctggtctgatgtatgctttgtaactggaggaagcgaccatggcgttatactttgggaagacaaagatgatttatggaaacccaagagagtgcataaggatttccattcatccgctgtcatgggtgttgctggaatgcaacagaaaaaaacaatattatcagtaggctgtgacaagaggataataggatttgatctctctgctggaaggacagagttcaagaacctaattgatagcaaatgcatgagtgtgttagcaaacccatgcgattgcaacttatacatggtgcagacaggggctccaggtagacagctgcgcttgtttgatgtcaggcttaggcaatctgaggttcatgcatttggttggaaacaagagagcagtgagtctcagtcggctctaattaaccagtcatggtctccagatggatggtacatgtcgtctggttcagcagatcctgtgatccacatcttcgacatcaggcatcatggccagaatccttgccagtctgttcaggcacaccagaagcgggtgttcaaagctgtttggcaccgaacgttgccatatctgacctccatatcatcggacctcaacattgggatccacaaatattcatgaaacgttttgggctgattttggcgcttggcaaattttttgttgtggattaggaaccatgaagacctgtgaaattttcaggactttgcatcaatcgaagatacagcaaattcagcatgctttcgctggacctgcttcaccattgactttctctgtgggagaaccatgcagctcagcagctgaagagccccacggttggatgtttgcgcgagctgacccaaacttttccaccttttgagctgctgctggagtggtatggtaggccattcatccgaacactgtttggctcgatgtgttgccctggttatttctgggaaggaaacagtcaactatacacattatatccaacatattcagcaatgtattccccctgtctttttgcagtgaatttgcccttgttggttggttggttgacagggcattcagaattttttatcagcatgattttagagcagctagtataacagtataccaactatatattttctctgtcctacaaaaattaatatgaattttagctttgaatcagaacaaac

SEQ ID NO: 5972 - DNA, 1901 bp, Zea Mays
aggaccgccctcttcgctgcacccaatcccttgtcctgtcctcgaaccgtccgccgccgcgttcaacatgggcgacccgccgacgctcaagaggcccaagctcgagaaggccgacgacgactccacctactgcccccgcccgtcctccaatggcgccgcgcccgtacgcacaccaggcgccaccgccgccataggggcggcgccgggtgacgacgtggaggaggaggatgacatcgcggaggaggcggtcatcgccctgatcgcgcaccgcgagcgcgacgtcgagcgctgcaagctcaagttgctccactaccagtctctcctggacaccgcggagatgaagctggaggaggcgcactcgaggctcgccaggttccgagatcgcaagccgccgccaactcggtcggaacccaagccaccgacgccgccaatccagagggaacacaagccatccccgccgccgatccagagggatctcaagccatcgccgcagccgctaatccagaaggctccttcgcccgcgccgcagccgtcggcgaggccgcagcttgtcatccctgggaccagcaaccgaccgaccccgcgccctgagcccatgcctgggttgaagagggccgccgccccgtcatcgtcttcatcaccggcgccaccagagcggtcaaggaaagaggagaagaagcccaagataaagatggaaggagcatcagaacttgattccgagtgttgggaaatcatctgcgactgtgcttagatttcaaggcggaaatttggtctcgagccaacacaggaggaagcttaggtgtcttgagctatgccctgctaatgatcagcttgttgttaccagtgcgctggacggattggttactttatggcaagtggagactagaggaccttctctctcatttcgtggcaaaacggatttcttttccccaaagcatagatggcctgaagatatagcttggcatccagatggtgagacaatttttgctgtatacactgctgataatggtgattctcaggtttcaatgacaaaccttatatcaggacaaggctccaggtagacagctgcgcttgtttgatgtcaggcttaggcaatctgaggttcatgcatttggttggaaacaagagagcagtgagtctcagtcggctctaattaaccagtcatggtctccagatggatggtacatgtcgtctggttcagcagatcctgtgatccacatcttcgacatcaggcatcatggccagaatccttgccagtctgttcaggcacaccagaagcgggtgttcaaagctgtttggcaccgaacgttgccatatctgacctccatatcatcggacctcaacattgggatccacaaatattcatgaaacgttttgggctgattttggcgcttggcaaattttttgttgtggattaggaaccatgaagacctgtgaaattttcaggactttgcatcaatcgaagatacagcaaattcagcatgctttcgctggacctgcttcaccattgactttctctgtgggagaaccatgcagctcagcagctgaagagccccacggttggatgtttgcgcgagctgacccaaacttttccaccttttgagctgctgctggagtggtatggtaggccattcatccgaacactgtttggctcgatgtgttgccctggttatttctgggaaggaaacagtcaactatacacattatatccaacatattcagcaatgtattccccctgtctttttgcagtgaatttgcccttgttggttggttggttgacagggcattcagaattttttatcagcatgattttagagcagctagtataacagtataccaactatatattttctctgtcctacaaaaattaatatgaattttagctttgaatcagaacaaac

SEQ ID NO: 5973 - DNA, 1906 bp, Zea Mays
aggaccgccctcttcgctgcacccaatcccttgtcctgtcctcgaaccgtccgccgccgcgttcaacatgggcgacccgccgacgctcaagaggcccaagctcgagaaggccgacgacgactccacctactgcccccgcccgtcctccaatggcgccgcgcccgtacgcacaccaggcgccaccgccgccataggggcggcgccgggtgacgacgtggaggaggaggatgacatcgcggaggaggcggtcatcgccctgatcgcgcaccgcgagcgcgacgtcgagcgctgcaagctcaagttgctccactaccagtctctcctggacaccgcggagatgaagctggaggaggcgcactcgaggctcgccaggttccgagatcgcaagccgccgccaactcggtcggaacccaagccaccgacgccgccaatccagagggaacacaagccatccccgccgccgatccagagggatctcaagccatcgccgcagccgctaatccagaaggctccttcgcccgcgccgcagccgtcggcgaggccgcagcttgtcatccctgggaccagcaaccgaccgaccccgcgccctgagcccatgcctgggttgaagagggccgccgccccgtcatcgtcttcatcaccggcgccaccagagcggtcaaggaaagaggagaagaagcccaagataaagatggaacagaaggagcatcagaacttgattccgagtgttgggaaatcatctgcgactgtgcttagatttcaaggcggaaatttggtctcgagccaacacaggaggaagcttaggtgtcttgagctatgccctgctaatgatcagcttgttgttaccagtgcgctggacggattggttactttatggcaagtggagactagaggaccttctctctcatttcgtggcaaaacggatttcttttccccaaagcatagatggcctgaagatatagcttggcatccagatggtgagacaatttttgctgtatacactgctgataatggtgattctcaggtttcaatgacaaaccttatatcaggacaaggctccaggtagacagctgcgcttgtttgatgtcaggcttaggcaatctgaggttcatgcatttggttggaaacaagagagcagtgagtctcagtcggctctaattaaccagtcatggtctccagatggatggtacatgtcgtctggttcagcagatcctgtgatccacatcttcgacatcaggcatcatggccagaatccttgccagtctgttcaggcacaccagaagcgggtgttcaaagctgtttggcaccgaacgttgccatatctgacctccatatcatcggacctcaacattgggatccacaaatattcatgaaacgttttgggctgattttggcgcttggcaaattttttgttgtggattaggaaccatgaagacctgtgaaattttcaggactttgcatcaatcgaagatacagcaaattcagcatgctttcgctggacctgcttcaccattgactttctctgtgggagaaccatgcagctcagcagctgaagagccccacggttggatgtttgcgcgagctgacccaaacttttccaccttttgagctgctgctggagtggtatggtaggccattcatccgaacactgtttggctcgatgtgttgccctggttatttctgggaaggaaacagtcaactatacacattatatccaacatattcagcaatgtattccccctgtctttttgcagtgaatttgcccttgttggttggttggttgacagggcattcagaattttttatcagcatgattttagagcagctagtataacagtataccaactatatattttctctgtcctacaaaaattaatatgaattttagctttgaatcagaacaaac

SEQ ID NO: 5974 - DNA, 2052 bp, Zea Mays
aggaccgccctcttcgctgcacccaatcccttgtcctgtcctcgaaccgtccgccgccgcgttcaacatgggcgacccgccgacgctcaagaggcccaagctcgagaaggccgacgacgactccacctactgcccccgcccgtcctccaatggcgccgcgcccgtacgcacaccaggcgccaccgccgccataggggcggcgccgggtgacgacgtggaggaggaggatgacatcgcggaggaggcggtcatcgccctgatcgcgcaccgcgagcgcgacgtcgagcgctgcaagctcaagttgctccactaccagtctctcctggacaccgcggagatgaagctggaggaggcgcactcgaggctcgccaggttccgagatcgcaagccgccgccaactcggtcggaacccaagccaccgacgccgccaatccagagggaacacaagccatccccgccgccgatccagagggatctcaagccatcgccgcagccgctaatccagaaggctccttcgcccgcgccgcagccgtcggcgaggccgcagcttgtcatccctgggaccagcaaccgaccgaccccgcgccctgagcccatgcctgggttgaagagggccgccgccccgtcatcgtcttcatcaccggcgccaccagagcggtcaaggaaagaggagaagaagcccaagataaagatggaacagaaggagcatcagaacttgattccgagtgttgggaaatcatctgcgactgtgcttagatttcaaggcggaaatttggtctcgagccaacacaggaggaagcttaggtgtcttgagctatgccctgctaatgatcagcttgttgttaccagtgcgctggacggattggttactttatggcaagtggagactagaggaccttctctctcatttcgtggcaaaacggatttcttttccccaaagcatagatggcctgaagatatagcttggcatccagatggtgagacaatttttgctgtatacactgctgataatggtgattctcaggtttcaatgacaaaccttatatcaggacaaaggaaagttactttcctacccgagaagcctcacacaaaaggcatcataaacgacataagtttcatgccctggtctgatgtatgctttgtaactggaggaagcgaccatggcgttatactttgggaagacaaagatgatttatggaaacccaagagagtgcataaggatttccattcatccgctgtcatgggtgttgctggaatgcaacagaaaaaaacaatattatcagtaggctgtgacaagaggataataggatttgatctctctgctggaaggacagagttcaagaacctaattgatagcaaatgcatgagtgtgttagcaaacccatgcgattgcaacttatacatggtgcagacaggggctccaggtagacagctgcgcttgtttgatgtcaggcttaggcaatctgaggttcatgcatttggttggaaacaagagagcagtgagtctcagtcggctctaattaaccagtcatggtctccagatggatggtacatgtcgtctggttcagcagatcctgtgatccacatcttcgacatcaggcatcatggccagaatccttgccagtctgttcaggcacaccagaagcgggtgttcaaagctgtttggcaccgaacgttgccatatctgacctccatatcatcggacctcaacattgggatccacaaatattcatgaaacgttttgggctgattttggcgcttggcaaattttttgttgtggattaggaaccatgaagacctgtgaaattttcaggactttgcatcaatcgaagatacagcaaattcagcatgctttcgctggacctgcttcaccattgactttctctgtgggagaaccatgcagctcagcagctgaagagccccacggttggatgtttgcgcgagctgacccaaacttttccaccttttgagctgctgctggagtggtatggtgtttcttgcaagcaaacgccatctgtgagagtgaacgttctaaaggcgcgacgggtgcgg

SEQ ID NO: 5975 - DNA, 5327 bp, Zea Mays
caatcactcaaacgctatacaagacaaatcacggcgtgggcgtctctggtcggtcgctttccctcctcagcttcagccttcagctcctctcctttcctctcctctcctctcctctcctctccacagctgcagccagagccacccaccttatcgtcatcctcgctcgctcctcatcgccagcgcctcctcctcctcctccttcttccccaccgctgccgacatggctgcgcaagaagagaagaccgctgttgttgttgctgctgctgccgatgtcgcgacagaggagcctacgccggcggcggagcagcaacctcagccggctggggcggcgcgcagggcaggaccatcggcgcccggcggggctccgcccaaccccttcgacttctccaccatgatgaaccttctcaatgaccctagcatcaaggagatggcagagcagatcgccaaggacccggcgttcacggagatggcggagcagctgcagaagacggtggtgtccccgcggcagcaacagcagcagcaggcgcggcagcagcagcagcagctggacccgcagaagtacgtggcgacgatgcagcagctgatgcagaacccgcagttcgtggccatggcggagcggctaggcagcgcgctgatgcaggaccctgccatgtccgccatgctggggggcctcaccaacccggcgcacaaggagcagctggaggcccgcgtcgcgcgcatgaaggaggaccccacgctcaagcccatcctcgacgagatcgagtccggcggccccgccgccatgatgaagtactggaacgaccctgaggctctgcagaagttcggccgcgcgatgggcgtcggcgtcggcccgtccggcgaggccggcggcgcagagcacgccgaggcggaggacgacgccggggaggaaggcgagtacgaggacgagtccatcgtccaccacaccgccagcgttggcgacgtcgagggcctcaagaaagcgctggaggacggcgcggacaaggacgaggaggactcggaagggcggcgtggcctccacttcgcgtgcggctacggcgagctccagtgcgcgcaggcgctcctggaggccggcgccgcggtggacgccgtcgacaagaacaagaacaccgcgctgcactacgccgccggatacggccgcaaggactgcgtcgcgctcctgctcgagagcggcgccgccgtgacgctgcagaacctggacgggaagacgcccatcgacgtggccaagctcaacaaccaggatgacgtcctcaagctgctggagaagcacgccttcgtatagacgtcccacgccgccggccggcccgtcttgctcgtctgctcttgtcgccgctgcggccacgtcgcttgcctctgctactgctgctgccgtcgccgccattaatgctttgttgatttctctcctggtcgagacaacgcaggtggaggttttcgtaatgaataaggatgaaatttccatttcaccgtccaatccaatctgtgtttcgagttgcagttcaggaaaaaaattcaaaattttgcgacgttaccaccagcagtccaccaccagaacgaatccaatccaattgggagagggcgtgtatgaagggaatactaatttctaggtgcttatccgtaaaatgcttcacgccattgtgtgcctcacataatcaatcggacggctcagaatcgtccaagattggaccctgtacccggccgcagaactccgcgcccgtcggcgacatcctcctccctcccaatgcttcgccggcgccggcgtgtcatccctctcctcgtccggtgctcgcagctccgccgccaaagcaccgtctccaggtaccgtccgcttccgcggcgacgagcccgtggagacacccgctacaccagcaacgacgacaccctcaccctcggcctcgcgcggcggaggcgcgacgccaccggcaacgctgctctccgctgccacggtaccgtcgcggagccctctaccccgccgtggcagcgcgacgcccaagacgacgtgtgctcgacgaccggccacgaccccaggccgcagcacggcgccgcggccgctcgtgccgtgctcgatgacgacgagacgcctggcgctgacgcctacgccgccatggtcgccagccgactcagggagcgcgacctgacgcgcgcggaggcgctcttcggcgcggcgcccgcggctgcccgggggctgtatctggataccgccatgctcgacgggtacgccaaggccggccgcgtcgatcgcgcgcgcgagctgttcgacgcgatgccggtgaagaacgtcgtcacttggacctctatggtttccgggtacttccgcgccggccgcgttcaggaggcgcgggagctgtttgacgtcatgcctgaacggaatgactattcgtggacgacggtggtgcaggggtacgcgcgcaatgggatgctcagggaggcgagggagatgtttgatcggatgcctcagaggaatgtggtcgcttggacggccatggttaaggcctacgttgactgtgggcagattcagcaggcgtgggaattgtttgatatgatgcctgagaggaactcgtattcctggaatgccatgatttctggttttctcagcattgggaaagtggctgaagcagttcagttgtttgagaggatgccacacagacacaagaatgtggtttcttggactacaatggtcgctggcttggcaaataatggacttgcttgcagggcaagagagttctttgatcggatgccagcgaaggacactgcggcatggaatgccattatcaccgtttatgccaacaatggccagctgaatgaggcgcagagattatttgattcaatgcttgcaaaagacctggtgacctggagtaccatcattgaggcatattcgaagaatgagcgtaagcatgaagccttaaacatgtttctacttatgcgccattcagcagtgtctcctaacattagaacattaattagtatcctggttatatctgagagcacagtcgaagttaagcaaattcacgggttggtcattgcacttggattcctgtcagaaacttccttaggaaatgctctgctcacaatgtattcaagaagtggagatctgatgtctgcctggtttgccttcaaaaggttggaacagaaggatgccataacatggacgtcgatagtgcaagcttttgcagaccatggctgtggttaccatgccttactggggtttgctcagatgctgagacatgggtataaaccaagttcgactaccttcactgctgtgctgtctgcttgtaggcatgtggggttggttgggaaaggtcgcaagatgtttaaatccatctaccatgtttatggattggaaccaaccattgagcactattcttgtcttgtggaccttctaggtcgagcagggtatgtaagggaagccaaggaacttgtcgatggtatgcagcagggtatgcgcgatgaggccattcttgcgacgctcctgggagcctgtgtggtgcataatgaggtagaggtagcaagagaagtgggtgaggatcttgtcagatttgacccctctggtaccggaggctacaggctcctggccaatgtatttgcatcgcatggaatgtgggatgaaacagcaaatgtgtggaaggtcatgaggggcagtaaggcaaagaggactcctggttttagtcagattgaggtgaacatgaggaatcatgtgttctactcaagggatcaagagcatccacaatgtgctgaaatatatgagatgctgattgacacaattgctcctcagatgaagggttcatcatgcgtgggactctgggaactgaccctcttgtccgatccacgcgaatcgactgcctggtgaccttggttgcctcattgcctgggcttgcttgtcaagtgtaaaagagatgcgaccaatgctgcagcatccatttaccaacaatagtgatgataacgatgctggacctgtgggtcatgttcggtgctcattgttgatattgtggaagaaaccagcagaacttctttttggatatcgaagggctcagcaagaaactcaattcttcaattattatttccccttgcagaattgcaataatgttgagcatcttgtttgtagagagcagcgagcagtgtgccttgtcagcacctatagcttgaaaaattatggtaatcctgctaggacataatgattaatgaagctcccgggccttgaaaggaaactgtttatccaaggtttgtcttgtcagatgaagtgagcattgttctctccttggcctaccacaactggatgcagatacagcgagatattgaagggggtgtggtagcaacaattttagcgtcgatgggggtgtcaaatatattagagatgcatatataaatgtgtccctatcatgtccacaaatggtgacaaggccggctcgtgctcctaaactcggttgccgaaggaggatgtgttgtacaacatcgtcgcctccaattgaccacccacacatctcttttctcgatcgtcattctttcccgacaccaaatgtcgagcatgatggaggcattggagcacacgtgcgcgatggtggcgttggagcccaggcgtgtggcggcagcggtggccctgctcctattcagattaagccacacgagattgattgctgctgaagggaggcctccccagttgaatccacatccatatgcagagtacacagccgcatccggaggtagctaggtaccggcatccggcacccactatcgcaggtgccaccacagcctcctgttttcatgaacgtaaatgccatttagggactgaatcagccgccaccaggtcatggggcaagattggaggactgccacatgtgcttgaaggcattgttgcctcacgcccactctgatctgctggtgaatgagtatggcaatgaagtgcacggaggagctgctccttccctatatttatggatctatgcttgttgtttttctagctttgaaccacgacttatgatttcaaaactcctgggatctgctctagtagcatattggccttgttctgtgtttcagggaagcaagagaaggtcacttttttgttctgttggtctactgtaactacaatctgttcagttcagctttctgaaagtatttggtctgtgttatgtaaatgaagttttctagtccatcctatgtacaagttttaaatttgctggttgttattgtcatgaaaaaaatgatctgctgccattggtgcattggtcagtgtccttcctctgccaattgggaaaatagtgccacgcagagtagacaagtatcaggtcattttgttgtggaagtgaaacagatttatg

SEQ ID NO: 5976 - DNA, 5216 bp, Zea Mays
gggcgtctctggtcggtcgctttccctcctcagcttcagccttcagctcctctcctttcctctcctctcctctcctctcctctccacagctgcagccagagccacccaccttatcgtcatcctcgctcgctcctcatcgccagcgcctcctcctcctcctccttcttccccaccgctgccgacatggctgcgcaagaagagaagaccgctgttgttgttgctgctgctgccgatgtcgcgacagaggagcctacgccggcggcggagcagcaacctcagccggctggggcggcgcgcagggcaggaccatcggcgcccggcggggctccgcccaaccccttcgacttctccaccatgatgaaccttctcaatgaccctagcatcaaggagatggcagagcagatcgccaaggacccggcgttcacggagatggcggagcagctgcagaagacggtggtgtccccgcggcagcaacagcagcagcaggcgcggcagcagcagcagcagctggacccgcagaagtacgtggcgacgatgcagcagctgatgcagaacccgcagttcgtggccatggcggagcggctaggcagcgcgctgatgcaggaccctgccatgtccgccatgctggggggcctcaccaacccggcgcacaaggagcagctggaggcccgcgtcgcgcgcatgaaggaggaccccacgctcaagcccatcctcgacgagatcgagtccggcggccccgccgccatgatgaagtactggaacgaccctgaggctctgcagaagttcggccgcgcgatgggcgtcggcgtcggcccgtccggcgaggccggcggcgcagagcacgccgaggcggaggacgacgccggggaggaaggcgagtacgaggacgagtccatcgtccaccacaccgccagcgttggcgacgtcgagggcctcaagaaagcgctggaggacggcgcggacaaggacgaggaggactcggaagggcggcgtggcctccacttcgcgtgcggctacggcgagctccagtgcgcgcaggcgctcctggaggccggcgccgcggtggacgccgtcgacaagaacaagaacaccgcgctgcactacgccgccggatacggccgcaaggactgcgtcgcgctcctgctcgagagcggcgccgccgtgacgctgcagaacctggacgggaagacgcccatcgacgtggccaagctcaacaaccaggatgacgtcctcaagctgctggagaagcacgccttcgtatagacgtcccacgccgccggccggcccgtcttgctcgtctgctcttgtcgccgctgcggccacgtcgcttgcctctgctactgctgctgccgtcgccgccattaatgctttgttgatttctctcctggtcgagacaacgcagttcaggaaaaaaattcaaaattttgcgacgttaccaccagcagtccaccaccagaacgaatccaatccaattgggagagggcgtgtatgaagggaatactaatttctaggtgcttatccgtaaaatgcttcacgccattgtgtgcctcacataatcaatcggacggctcagaatcgtccaagattggaccctgtacccggccgcagaactccgcgcccgtcggcgacatcctcctccctcccaatgcttcgccggcgccggcgtgtcatccctctcctcgtccggtgctcgcagctccgccgccaaagcaccgtctccaggtaccgtccgcttccgcggcgacgagcccgtggagacacccgctacaccagcaacgacgacaccctcaccctcggcctcgcgcggcggaggcgcgacgccaccggcaacgctgctctccgctgccacggtaccgtcgcggagccctctaccccgccgtggcagcgcgacgcccaagacgacgtgtgctcgacgaccggccacgaccccaggccgcagcacggcgccgcggccgctcgtgccgtgctcgatgacgacgagacgcctggcgctgacgcctacgccgccatggtcgccagccgactcagggagcgcgacctgacgcgcgcggaggcgctcttcggcgcggcgcccgcggctgcccgggggctgtatctggataccgccatgctcgacgggtacgccaaggccggccgcgtcgatcgcgcgcgcgagctgttcgacgcgatgccggtgaagaacgtcgtcacttggacctctatggtttccgggtacttccgcgccggccgcgttcaggaggcgcgggagctgtttgacgtcatgcctgaacggaatgactattcgtggacgacggtggtgcaggggtacgcgcgcaatgggatgctcagggaggcgagggagatgtttgatcggatgcctcagaggaatgtggtcgcttggacggccatggttaaggcctacgttgactgtgggcagattcagcaggcgtgggaattgtttgatatgatgcctgagaggaactcgtattcctggaatgccatgatttctggttttctcagcattgggaaagtggctgaagcagttcagttgtttgagaggatgccacacagacacaagaatgtggtttcttggactacaatggtcgctggcttggcaaataatggacttgcttgcagggcaagagagttctttgatcggatgccagcgaaggacactgcggcatggaatgccattatcaccgtttatgccaacaatggccagctgaatgaggcgcagagattatttgattcaatgcttgcaaaagacctggtgacctggagtaccatcattgaggcatattcgaagaatgagcgtaagcatgaagccttaaacatgtttctacttatgcgccattcagcagtgtctcctaacattagaacattaattagtatcctggttatatctgagagcacagtcgaagttaagcaaattcacgggttggtcattgcacttggattcctgtcagaaacttccttaggaaatgctctgctcacaatgtattcaagaagtggagatctgatgtctgcctggtttgccttcaaaaggttggaacagaaggatgccataacatggacgtcgatagtgcaagcttttgcagaccatggctgtggttaccatgccttactggggtttgctcagatgctgagacatgggtataaaccaagttcgactaccttcactgctgtgctgtctgcttgtaggcatgtggggttggttgggaaaggtcgcaagatgtttaaatccatctaccatgtttatggattggaaccaaccattgagcactattcttgtcttgtggaccttctaggtcgagcagggtatgtaagggaagccaaggaacttgtcgatggtatgcagcagggtatgcgcgatgaggccattcttgcgacgctcctgggagcctgtgtggtgcataatgaggtagaggtagcaagagaagtgggtgaggatcttgtcagatttgacccctctggtaccggaggctacaggctcctggccaatgtatttgcatcgcatggaatgtgggatgaaacagcaaatgtgtggaaggtcatgaggggcagtaaggcaaagaggactcctggttttagtcagattgaggtgaacatgaggaatcatgtgttctactcaagggatcaagagcatccacaatgtgctgaaatatatgagatgctgattgacacaattgctcctcagatgaagggttcatcatgcgtgggactctgggaactgaccctcttgtccgatccacgcgaatcgactgcctggtgaccttggttgcctcattgcctgggcttgcttgtcaagtgtaaaagagatgcgaccaatgctgcagcatccatttaccaacaatagtgatgataacgatgctggacctgtgggtcatgttcggtgctcattgttgatattgtggaagaaaccagcagaacttctttttggatatcgaagggctcagcaagaaactcaattcttcaattattatttccccttgcagaattgcaataatgttgagcatcttgtttgtagagagcagcgagcagtgtgccttgtcagcacctatagcttgaaaaattatggtaatcctgctaggacataatgattaatgaagctcccgggccttgaaaggaaactgtttatccaaggtttgtcttgtcagatgaagtgagcattgttctctccttggcctaccacaactggatgcagatacagcgagatattgaagggggtgtggtagcaacaattttagcgtcgatgggggtgtcaaatatattagagatgcatatataaatgtgtccctatcatgtccacaaatggtgacaaggccggctcgtgctcctaaactcggttgccgaaggaggatgtgttgtacaacatcgtcgcctccaattgaccacccacacatctcttttctcgatcgtcattctttcccgacaccaaatgtcgagcatgatggaggcattggagcacacgtgcgcgatggtggcgttggagcccaggcgtgtggcggcagcggtggccctgctcctattcagattaagccacacgagattgattgctgctgaagggaggcctccccagttgaatccacatccatatgcagagtacacagccgcatccggaggtagctaggtaccggcatccggcacccactatcgcaggtgccaccacagcctcctgttttcatgaacgtaaatgccatttagggactgaatcagccgccaccaggtcatggggcaagattggaggactgccacatgtgcttgaaggcattgttgcctcacgcccactctgatctgctggtgaatgagtatggcaatgaagtgcacggaggagctgctccttccctatatttatggatctatgcttgttgtttttctagctttgaaccacgacttatgatttcaaaactcctgggatctgctctagtagcatattggccttgttctgtgtttcagggaagcaagagaaggtcacttttttgttctgttggtctactgtaactacaatctgttcagttcagctttctgaaagtatttggtctgtgttatgtaaatgaagttttctagtccatcctatgtacaagttttaaatttgctggttgttattgtcatgaaaaaaatgatctgctgccattggtgcattggtcagtgtccttcctctgccaattgggaaaatagtgccacgcagagtagacaagtatcaggtcattttgttgtggaagtgaaacagatttatg

SEQ ID NO: 5977 - DNA, 1164 bp, Zea Mays
accagtccccctaaaagaaaacaaaaattggcacaggatgttcgtgatcttgattttgccatacagatagttggttcggaggtagtgcgagaagctgatggtcttgcaatgagctctcgcaatgtaaatctgtcagaggaggatagaaagaaggcgttatcgatcagtagatcactggtggatgctagaaccgccaccctcagtggaagcaaccgtagccaagagataaaagatcaaatagtgcggacaattacagaagctggcggtcaggttgactatgttgagattgtggagcaggaaagcttggtgcctgtggagaggatggaccgcccttgtgtaatttgtgtcgcggcatggtttggaaaggtcaggctaattgacaacatcgagatccatgtagatagctctactgttttgtctatctgatgaacgaagatgtttagacacggcaaaatggcataccactttctacgtagcagtagcagaccaagaataaatagcatgatgggctgaatctggatagaagaccatgagctcagtgctagccattcttgaactgctagaatgcagagaataagtactttcacagtttcagtcaagctaaggcagcacaaatgaatcttaggcatctctaaagtactcaacacattgggggaaaaaagaaaggacattaatgactgaatcttcgaagcttgtgatacattcctttaaaaaaaaacagattttacattagcttctctcgttagtcaccagatgcactctatagttaccggaggctcaagggcgcttaaaatctcaagcatgagcaatcaatctggccggacatcttggttctcaactgcccattgatacttgattcaagcactctgccaataacaaaactactcgaactccagcagctccctgtctcgctcactatcttaaactccatgcggtaaacagtataaaaacagtgttttgtacatccatatacatgatccgccgaagacggtctaaggttgcataaatgtatttctctttttgttgtttttctctaaacaaattataaaagctctatccttcaattaagacagaaaggaagttagatgccttttcaattaaggtggaaacgaagttacatgtataagaaaagggtagctaaataatgtggagaatatataatca

SEQ ID NO: 5978 - DNA, 1101 bp, Zea Mays
catggttacaactcaacagtttgatttgcttgttaataaagtcttgctgcacatggattacctttggaggcgcaacataggatgaatgcagcgttatcgatcagtagatcactggtggatgctagaaccgccaccctcagtggaagcaaccgtagccaagagataaaagatcaaatagtgcggacaattacagaagctggcggtcaggttgactatgttgagattgtggagcaggaaagcttggtgcctgtggagaggatggaccgcccttgtgtaatttgtgtcgcggcatggtttggaaaggtcaggctaattgacaacatcgagatccatgtagatagctctactgttttgtctatctgatgaacgaagatgtttagacacggcaaaatggcataccactttctacgtagcagtagcagaccaagaataaatagcatgatgggctgaatctggatagaagaccatgagctcagtgctagccattcttgaactgctagaatgcagagaataagtactttcacagtttcagtcaagctaaggcagcacaaatgaatcttaggcatctctaaagtactcaacacattgggggaaaaaagaaaggacattaatgactgaatcttcgaagcttgtgatacattcctttaaaaaaaaacagattttacattagcttctctcgttagtcaccagatgcactctatagttaccggaggctcaagggcgcttaaaatctcaagcatgagcaatcaatctggccggacatcttggttctcaactgcccattgatacttgattcaagcactctgccaataacaaaactactcgaactccagcagctccctgtctcgctcactatcttaaactccatgcggtaaacagtataaaaacagtgttttgtacatccatatacatgatccgccgaagacggtctaaggttgcataaatgtatttctctttttgttgtttttctctaaacaaattataaaagctctatccttcaattaagacagaaaggaagttagatgccttttcaattaaggtggaaacgaagttacatgtataagaaaagggtagctaaataatgtggagaatatataatca

SEQ ID NO: 5979 - DNA, 585 bp, Zea Mays
cttcctctggcttgtggagcacgatagatgttggacggctgacagacttgctaagcgtggcctggatcacccggagtcttgccctttatgcgaccagatggaagaaactatcaaccatttgctggttcagtgcagttttgcaaaacagttttggttcagccttctgcggtcaggtggtttccaggagctctgcccttcccatgatgacgtctgttttgaaacctggtggaggaatagtgctgccagggtgggcaaacctttatccaagggattcaattctctagtcattttgggtgcatggtctttgtggaagcatagaaataggtgtgtttttgaaaattgtaaccctagcgctgcggtggtgttggcagctgcaagggaggagttaatgggttggcgtatggctagagccaaagcgctctctttcttccatttagaagaggtgtcttaggtgtcttagttgtttggggtgtgttttggttttggtttgccaaatgtaacacctttgtaccggggttttttctccccattttcttcttcttaatacaaaaatacgcagctctcctgcgtattcaagaaaaaaat

SEQ ID NO: 5980 - DNA, 1471 bp, Zea Mays
ctccatccacccctttcgtgtgtccccccactagaaagtctggaagcgcccgcgcggccccgcgaatattttgaactgagccatccacgcaccgccgccttttgagctcgcggcgagggtttgggcggcgggcgcgacatggccgggaagaagaccaccccagcaaagcccgccccttcttccactcagcgcaacggcagcgccgtccccggttccaagagccggcctaagcaggcttcggaggaggccgcggccgccagcgccaaggcgcagtcgccctccaaaccgcgcaaaataaccaaggagaagccggcggccgcgaagaagaagcgcgagaaaacggagccccaagagggtggcaagcgtaggaagcagcaggtgttagccgacgcggcgacgccatcgaagaagaggaagaagggcggcgaaggcccggaacccaaggaagccacgcccgcgaagaagcacaagccagccgggacgcccccgaagaagcagaaggcgcccagcaaacccgcgacgcctgctaagaagcagcagtcacccggcaaagcggagaagctcacgccgaagaagaagcagcagtcacccggcaaagcggagaagcccacgccgaagaagaagcagcagtcacccggcaaagcggagaagcccacgccgaagaagaagcagcagtcacccggcaaagcggagaaagccgcgccgaagaagcagcagcagcagccagccggcaaagcgcggaagcccgcggcggcggcgacctcgcccacgaagaagaagcaagccaagcgcgagaagcccactcccaccaagaggaagcgcggcgacgacgagcaagcaaaggaggccaagagccccaagagagcgcccgcggatggggcggcgcgcgcatctacgcccgtgaagaagaagctgaaggaccagaaggcggctgcggcaaacatgggtgtgtgcagcttctccatggcgcgggtgcggcagctgatgcgggccgaggaccccaccatccgcccttccagtgaggctgtcttcctcatcaataaggcttcagagttcttcttggggaagtttgcagaggatgcttatcacaatgccgcgaaggatcgtaagaaatccattatttacgataatctttctgtttccagccagaagactttaaagttcctttcagattttgtaccgcagagagttgcagccgaagatgctttgaaggcaatgacgagcaacaactcgtaaccgattatgctagactagattgcagaacagctgatgcaccgtaccctgtggtttctgtccaatttatgatttattaccccgagacctgtattagtccatagataagagtggattcaaatgtttcgtgaaaggatttatttagagctcatgaaggtatatttacctatgatttaagacaactgtatcaaatatttattatttcttagtaataaaaagatagaatcatatttgaaac

SEQ ID NO: 5981 - DNA, 1488 bp, Zea Mays
ttcgtgtgtccccccactagaaagtctggaagcgcccgcgcggccccgcgaatattttgaactgagccatccacgcaccgccgccttttgagctcgcggcgagggtttgggcggcgggcgcgacatggccgggaagaagaccaccccagcaaagcccgccccttcttccactcagcgcaacggcagcgccgtccccggttccaagagccggcctaagcaggcttcggaggaggccgcggccgccagcgccaaggcgcagtcgccctccaaaccgcgcaaaataaccaaggagaagccggcggccgcgaagaagaagcgcgagaaaacggagccccaagagggtggcaagcgtaggaagcagcaggtgttagccgacgcggcgacgccatcgaagaagaggaagaagggcggcgaaggcccggaacccaaggaagccacgcccgcgaagaagcacaagccagccgggacgcccccgaagaagcagaaggcgcccagcaaacccgcgacgcctgctaagaagcagcagtcacccggcaaagcggagaagctcacgccgaagaagaagcagcagtcacccggcaaagcggagaagcccacgccgaagaagaagcagcagtcacccggcaaagcggagaagcccacgccgaagaagaagcagcagtcacccggcaaagcggagaaagccgcgccgaagaagcagcagcagcagccagccggcaaagcgcggaagcccgcggcggcggcgacctcgcccacgaagaagaagcaagccaagcgcgagaagcccactcccaccaagaggaagcgcggcgacgacgagcaagcaaaggaggccaagagccccaagagagcgcccgcggatggggcggcgcgcgcatctacgcccgtgaagaagaagctgaaggaccagaaggcggctgcggcaaacatgggtgtgtgcagcttctccatggcgcgggtgcggcagctgatgcgggccgaggaccccaccatccgcccttccagtgaggctgtcttcctcatcaataaggcttcagagttcttcttggggaagtttgcagaggatgcttatcacaatgccgcgaaggatcgtaagaaatccattatttacgataatctttcaacagctgtttccagccagaagactttaaagttcctttcagattttgtaccgcagagagttgcagccgaagatgctttgaaggcaatgacgagcaacaactcgtaaccgattatgctagactagattgttagtcctctactcctctatttaggcagaacagctgatgcaccgtaccctgtggtttctgtccaatttatgatttattaccccgagacctgtattagtccatagataagagtggattcaaatgtttcgtgaaaggatttatttagagctcatgaaggtatatttacctatgatttaagacaactgtatcaaatatttattatttcttagtaataaaaagatagaatcatatttgaaac

SEQ ID NO: 5982 - DNA, 1892 bp, Zea Mays
gcccgagctcggccggtcgccgccgtaccgtaccagttgcagctcgctaggatccagcgcatgtttccattgtcccacttccatatatatataaataacactactgtggctagtcgtcgtcttccccggacgacccccggccggccggagagcgcgccgccgtgctttcttcctgcggtggtggcgcgcgtatacatcgtcgactcttgacgagctgagggcgtacacacagctagcatacatacacacaaagcccagcagcaggtagtctagccaatcaaacaagcgtcgtttcgtaccgggaggccggccggccgcgcgcggagaagatgctgtcctgcatcgcgtgcgtcaataaggaagaagacggcggccgggaccgcgaggagcatggcggcgacaccccgagctgcagagaccccgtgaagtcactcacctcccagctcaaggacatggtgctgaagctgtcgggcacccaccaccgccagcacggcgcgcagcacaggcgcggcgggtcgccgccgccgccacggggccgggccacctccctgtaccgcagcggctactaccgccccggcgtcgtgcaggacgacatggccgtgcccccggccacgtacctgggaggtggaggcgccggcgcgtcgagcgcgagctccaccccggcgtgggacctgcccgccgccgcccgcgcggacggcgaggcctgcagggagtgggtggcgcaggtggagcccggcgtgcagatcaccttcgtgtcactccccggcggcgccggcaacgacctcaagcgcatccggttcagtgttcgctgacgggacggcggcctctatgcgattcgtgcagccgcgagatgtacgacaagtggcaggcgcagaagtggtggggcgacaacaacgagcgcatcatggagctctacaacgtccgccgcttcagccgccaggtgctccccacgccgccgcgctccgacgacgccgagagggagtcgttctactcgcagtctcaggtagggagcccctcggccaccccgtcgccggcgccgctcacgccggagaggatcagctggggcgcgttcgcgcggcaggtggcagcgccgccagcatcatcaggtgccaccggcgccgcgcggcagcacagcttccggccgatgtcgccgccgccgccgtcgtcctccaacccttcggagcgggcctggcagcagcagcagcagcgacacatcggtggtggtggtggcggtggagcggccggcggcaagagccccgccgcctccgaggccgccgccgccgccacggaagcggcgcggaccaccacgtcgtccagggacgacgtgtccgtcagcaacgccagcgagctggaggtgtcggagtggatcatccaggaccagcccggcgtctacatcaccgtcagggagctcgccgacggcagccgggagctgcgccgcgtcaggttcagccgcgagaggttcgcggagctcaatgccaagctgtggtgggaggagaacaaggagaggatacaggctcagtacctttgaaaactgagctggaatgaggctgaatcttactagttcagttgagcagaagctggtgataattatggtgttgtgcaaggggctgacatataattaatctggtataagtatacggggagagtttatgtttcgagttaatttggagatgggggggggggggaggagataggagggggttcatttggagctgggaaagataggaggggatgagataggggttcatgcatgtttagggcacctgacctggctgcccaggtaacttgtgattggtgtaccgtactaaagtttttaccaatccaccactattgcgtctaatgttcagcttcactttctagcatgagtgtcaacacatgttctgatcttgtat

SEQ ID NO: 5983 - DNA, 2193 bp, Zea Mays
gcccgagctcggccggtcgccgccgtaccgtaccagttgcagctcgctaggatccagcgcatgtttccattgtcccacttccatatatatataaataacactactgtggctagtcgtcgtcttccccggacgacccccggccggccggagagcgcgccgccgtgctttcttcctgcggtggtggcgcgcgtatacatcgtcgactcttgacgagctgagggcgtacacacagctagcatacatacacacaaagcccagcagcaggtagtctagccaatcaaacaagcgtcgtttcgtaccgggaggccggccggccgcgcgcggagaagatgctgtcctgcatcgcgtgcgtcaataaggaagaagacggcggccgggaccgcgaggagcatggcggcgacaccccgagctgcagagaccccgtgaagtcactcacctcccagctcaaggacatggtgctgaagctgtcgggcacccaccaccgccagcacggcgcgcagcacaggcgcggcgggtcgccgccgccgccacggggccgggccacctccctgtaccgcagcggctactaccgccccggcgtcgtgcaggacgacatggccgtgcccccggccacgtacctgggaggtggaggcgccggcgcgtcgagcgcgagctccaccccggcgtgggacctgcccgccgccgcccgcgcggacggcgaggcctgcagggagtgggtggcgcaggtggagcccggcgtgcagatcaccttcgtgtcactccccggcggcgccggcaacgacctcaagcgcatccggttcagccgcgagatgtacgacaagtggcaggcgcagaagtggtggggcgacaacaacgagcgcatcatggagctctacaacgtccgccgcttcagccgccaggtgctccccacgccgccgcgctccgacgacgccgaggtcagtcgctgcctctacccgtgcctgccttctgcatgcatgtctcctctgtctcattcacatgcatgtcccatcccatggtgtgaggcgagcttctgtcatacggtgacgctgacatgtcataccacgccacgtcatcgtcgcccaccggccttcctccgaacaagacaagaactgaccagtcgctctcctctcccccagtccaaaatccaaatcctggagctggacctgtctgtcctctgcatgcatgtatccatgcgtcgaaagacgcaaagatcacagctttattagtagtagtactaacagcaacaaaaaaaaaacatttttgtttgtgttccgtagagggagtcgttctactcgcagtctcaggtagggagcccctcggccaccccgtcgccggcgccgctcacgccggagaggatcagctggggcgcgttcgcgcggcaggtggcagcgccgccagcatcatcaggtgccaccggcgccgcgcggcagcacagcttccggccgatgtcgccgccgccgccgtcgtcctccaacccttcggagcgggcctggcagcagcagcagcagcgacacatcggtggtggtggtggcggtggagcggccggcggcaagagccccgccgcctccgaggccgccgccgccgccacggaagcggcgcggaccaccacgtcgtccagggacgacgtgtccgtcagcaacgccagcgagctggaggtgtcggagtggatcatccaggaccagcccggcgtctacatcaccgtcagggagctcgccgacggcagccgggagctgcgccgcgtcaggttcagccgcgagaggttcgcggagctcaatgccaagctgtggtgggaggagaacaaggagaggatacaggctcagtacctttgaaaactgagctggaatgaggctgaatcttactagttcagttgagcagaagctggtgataattatggtgttgtgcaaggggctgacatataattaatctggtataagtatacggggagagtttatgtttcgagttaatttggagatgggggggggggggaggagataggagggggttcatttggagctgggaaagataggaggggatgagataggggttcatgcatgtttagggcacctgacctggctgcccaggtaacttgtgattggtgtaccgtactaaagtttttaccaatccaccactattgcgtctaatgttcagcttcactttctagcatgagtgtcaacacatgttctgatcttgtat

SEQ ID NO: 5984 - DNA, 2099 bp, Zea Mays
gcccgagctcggccggtcgccgccgtaccgtaccagttgcagctcgctaggatccagcgcatgtttccattgtcccacttccatatatatataaataacactactgtggctagtcgtcgtcttccccggacgacccccggccggccggagagcgcgccgccgtgctttcttcctgcggtggtggcgcgcgtatacatcgtcgactcttgacgagctgagggcgtacacacagctagcatacatacacacaaagcccagcagcaggtagtctagccaatcaaacaagcgtcgtttcgtaccgggaggccggccggccgcgcgcggagaagatgctgtcctgcatcgcgtgcgtcaataaggaagaagacggcggccgggaccgcgaggagcatggcggcgacaccccgagctgcagagaccccgtgaagtcactcacctcccaggtgctggtcaaatggcggtaggccgagaactcgactgaattctgaaacctgatcctgagatggtgtagctcttgtgatcataccattctactctgaaatctgaatgtggctgctgaccatattacttattaattctactatgagatctgaatcgtagctggtgaccacacagcacaagctgcaatcttaatccaccaggcagcggctgatggacgtagtgcatgttgttgttggtgtgcaccgtgcagctcaaggacatggtgctgaagctgtcgggcacccaccaccgccagcacggcgcgcagcacaggcgcggcgggtcgccgccgccgccacggggccgggccacctccctgtaccgcagcggctactaccgccccggcgtcgtgcaggacgacatggccgtgcccccggccacgtacctgggaggtggaggcgccggcgcgtcgagcgcgagctccaccccggcgtgggacctgcccgccgccgcccgcgcggacggcgaggcctgcagggagtgggtggcgcaggtggagcccggcgtgcagatcaccttcgtgtcactccccggcggcgccggcaacgacctcaagcgcatccggttcagccgcgagatgtacgacaagtggcaggcgcagaagtggtggggcgacaacaacgagcgcatcatggagctctacaacgtccgccgcttcagccgccaggtgctccccacgccgccgcgctccgacgacgccgagagggagtcgttctactcgcagtctcaggtagggagcccctcggccaccccgtcgccggcgccgctcacgccggagaggatcagctggggcgcgttcgcgcggcaggtggcagcgccgccagcatcatcaggtgccaccggcgccgcgcggcagcacagcttccggccgatgtcgccgccgccgccgtcgtcctccaacccttcggagcgggcctggcagcagcagcagcagcgacacatcggtggtggtggtggcggtggagcggccggcggcaagagccccgccgcctccgaggccgccgccgccgccacggaagcggcgcggaccaccacgtcgtccagggacgacgtgtccgtcagcaacgccagcgagctggaggtgtcggagtggatcatccaggaccagcccggcgtctacatcaccgtcagggagctcgccgacggcagccgggagctgcgccgcgtcaggttcagccgcgagaggttcgcggagctcaatgccaagctgtggtgggaggagaacaaggagaggatacaggctcagtacctttgaaaactgagctggaatgaggctgaatcttactagttcagttgagcagaagctggtgataattatggtgttgtgcaaggggctgacatataattaatctggtataagtatacggggagagtttatgtttcgagttaatttggagatgggggggggggggaggagataggagggggttcatttggagctgggaaagataggaggggatgagataggggttcatgcatgtttagggcacctgacctggctgcccaggtaacttgtgattggtgtaccgtactaaagtttttaccaatccaccactattgcgtctaatgttcagcttcactttctagcatgagtgtcaacacatgttctgatcttgtat

SEQ ID NO: 5985 - DNA, 1605 bp, Zea Mays
cctcgttcgactaacgtctacttctgtgatttcccccggcggcgttgggcgctggtttaggagacgaaaaggcggcgcgcggcggaaaaccctagcttagctcctctccggcgtcaagtgctctccggtttgagggcgcgatgagggtgaagatatttgctaagccatttatcggagctatggatgggcatattgacgcggtatcgtgcatggccaaaaaccccaatcatttgaaagcaatattttctggttcaatggatggagatgttcgcctttgggatattgctgcgaggaagacagtttgtcagttccccgggcaccagggtgctgtaagaggtttaacaacatccacagatggtgatcttcttgtatcatgtggcgttgactgcactgttcgactctggaaagttccgatgcttaaaatggtggatactagtgagcgtgctggagataattcccagccatcagcagtttacacctggaagcatgcattctggggtgctgatcaccagtgggacggcaatcttttcgcaactgttggtgctcaagttgatatatgggatcctgacaggtcagagccaataaatagcttcgaatggggtaaagatacggttctttctgtgcgatttgatcctggagactctaatattttgattacgtcgggcagtgatcggagtctgacactctatgacttgcgtatgtcatctccagctagaaagctgataatgaagacaaggtgcaattcagtatgctggaaccctagagagcctatgaacttcactgctgcaaatgaagacacaaactgttactcctttgatgctagaaaattagatgaagcaaaaattgttcacaaaggccatgtttcagcagtgatggatattgactactcaccaacagggcgtgaatttgtcactggttcatatgatagaacagtaaggatttttaattatcttggagaccacagcagagagatttaccacaccaagaggatgcaaagggtgttttgtgtgaagtacacctatgatgggacctatttagtctctggcagtgatgatacaaatcttcgtctgtggaagtccaaagcttcagaacaacttggagttcttcttccacgggagcgcaaaaagcaagagtaccaggatgctttgaaggagcggtacaagcatctcccagaagtcaagcggattgtaaggcatagacatctaccgaagccaatctacaaggcagccaacctacggcgtacgatgatcgaagctgaaagccgtaaagaggaaaggaggcgaaagcacagtgctcccgggagcatgcctgtgcagcccttcaggaagcggagaatcatcagagaagttgagtagacatgcggtttgcattgcatggtcgtggtacacgtttgtgtttctgaggcgatggagttgagagaatacatgatgtttcctttgggagttgagctccagttttgcctttcgtactacatatatgtgctccatcaatcagtttgtttgactagttattattgtgtatttgaaataccacacaaaatattcatatcgtgccattgcattgcaagaccgtgagcaatccgaattgaaggtaggacgttttctc

SEQ ID NO: 5986 - DNA, 1744 bp, Zea Mays
cctcgttcgactaacgtctacttctgtgatttcccccggcggcgttgggcgctggtttaggagacgaaaaggcggcgcgcggcggaaaaccctagcttagctcctctccggcgtcaagtgctctccggtttgagggcgcgatgagggtgaaggtgatttcgcgttccaccgacgactacacgcgcgagcgcagccaggacctgcagaaagtattccgcaactatgatccagcgcttcgtagtcaagagaaagctgttgagtatactcgggcactcaatgctgccaagttagagaagatatttgctaagccatttatcggagctatggatgggcatattgacgcggtatcgtgcatggccaaaaaccccaatcatttgaaagcaatattttctggttcaatggatggagatgttcgcctttgggatattgctgcgaggaagacagtttgtcagttccccgggcaccagggtgctgtaagaggtttaacaacatccacagatggtgatcttcttgtatcatgtggcgttgactgcactgttcgactctggaaagttccgatgcttaaaatggtggatactagtgagcgtgctggagataattcccagccatcagcagtttacacctggaagcatgcattctggggtgctgatcaccagtgggacggcaatcttttcgcaactgttggtgctcaagttgatatatgggatcctgacagagccaataaatagcttcgaatggggtaaagatacggttctttctgtgcgatttgatcctggagactctaatattttgattacgtcgggcagtgatcggagtctgacactctatgacttgcgtatgtcatctccagctagaaagctgataatgaagacaaggtgcaattcagtatgctggaaccctagagagcctatgaacttcactgctgcaaatgaagacacaaactgttactcctttgatgctagaaaattagatgaagcaaaaattgttcacaaaggccatgtttcagcagtgatggatattgactactcaccaacagggcgtgaatttgtcactggttcatatgatagaacagtaaggatttttaattatcttggagaccacagcagagagatttaccacaccaagaggatgcaaagggtgttttgtgtgaagtacacctatgatgggacctatttagtctctggcagtgatgatacaaatcttcgtctgtggaagtccaaagcttcagaacaacttggagttcttcttccacgggagcgcaaaaagcaagagtaccaggatgctttgaaggagcggtacaagcatctcccagaagtcaagcggattgtaaggcatagacatctaccgaagccaatctacaaggcagccaacctacggcgtacgatgatcgaagctgaaagccgtaaagaggaaaggaggcgaaagcacagtgctcccgggagcatgcctgtgcagcccttcaggaagcggagaatcatcagagaagttgagtagacatgcggtttgcattgcatggtcgtggtacacgtttgtgtttctgaggcgatggagttgagagaatacatgatgtttcctttgggagttgagctccagttttgcctttcgtactacatatatgtgctccatcaatcagtttgtttgactagttattattgtgtatttgaaataccacacaaaatattcatatcgtgccattgcattgcaagaccgtgagcaatccgaattgaaggtaggacgttttctc

SEQ ID NO: 5987 - DNA, 1639 bp, Zea Mays
cctcgttcgactaacgtctacttctgtgatttcccccggcggcgttgggcgctggtttaggagacgaaaaggcggcgcgcggcggaaaaccctagcttagctcctctccggcgtcaagtgctctccggtttgagggcgcgatgagggtgaaggtgatttcgcgttccaccgacgactacacgcgcgagcgcagccaggacctgcagaaagtattccgcaactatgatccagcgcttcgtagtcaagagaaagctgttgagtatactcgggcactcaatgctgccaagttagagaagatatttgctaagccatttatcggagctatggatgggcatattgacgcggtatcgtgcatggccaaaaaccccaatcatttgaaagcaatattttctggttcaatggatggagatgttcgcctttgggatattgctgcgaggaagacagtttgtcagttccccgggcaccagggtgctgtaagaggtttaacaacatccacagatggtgatcttcttgtatcatgtggcgttgactgcactgttcgactctggaaagttccgatgcttaaaatggtggatactagtgagcgtgctggagataattcccagccatcagcagtttacacctggaagcatgcattctggggtgctgatcaccagtgggacggcaatcttttcgcaactgttggtgctcaagttgatatatgggatcctgacagcttcgaatggggtaaagatacggttctttctgtgcgatttgatcctggagactctaatattttgattacgtcgggcagtgatcggagtctgacactctatgacttgcgtatgtcatctccagctagaaagctgataatgaagacaaggtgcaattcagtatgctggaaccctagagagcctatgaacttcactgctgcaaatgaagacacaaactgttactcctttgatgctagaaaattagatgaagcaaaaattgttcacaaaggccatgtttcagcagtgatggatattgactactcaccaacagggcgtgaatttgtcactggttcatatgatagaacagtaaggatttttaattatcttggagaccacagcagagagatttaccacaccaagaggatgcaaagggtgttttgtgtgaagtacacctatgatgggacctatttagtctctggcagtgatgatacaaatcttcgtctgtggaagtccaaagcttcagaacaacttggagttcttcttccacgggagcgcaaaaagcaagagtaccaggatgctttgaaggagcggtacaagcatctcccagaagtcaagcggattgtaaggcatagacatctaccgaagccaatctacaaggcagccaacctacggcgtacgatgatcgaagctgaaagccgtaaagaggaaaggaggcgaaagcacagtgctcccgggagcatgcctgtgcagcccttcaggaagcggagaatcatcagagaagttgagtagacatgcgttttgcctttcgtactacatatatgtgctccatcaatcagtttgtttgactagttattattgtgtatttgaaataccacacaaaatattcatatcgtgccattgcattgcaagaccgtgagcaatccgaattgaaggtaggacgttttctc

SEQ ID NO: 5988 - DNA, 1657 bp, Zea Mays
cctcgttcgactaacgtctacttctgtgatttcccccggcggcgttgggcgctggtttaggagacgaaaaggcggcgcgcggcggaaaaccctagcttagctcctctccggcgtcaagtgctctccggtttgagggcgcgatgagggtgaaggtgatttcgcgttccaccgacgactacacgcgcgagcgcagccaggacctgcagaaagtattccgcaactatgatccagcgcttcgtagtcaagagaaagctgttgagtatactcgggcactcaatgctgccaagttagagaagatatttgctaagccatttatcggagctatggatgggcatattgacgcggtatcgtgcatggccaaaaaccccaatcatttgaaagcaatattttctggttcaatggatggagatgttcgcctttgggatattgctgcgaggaagacagtttgtcagttccccgggcaccagggtgctgtaagaggtttaacaacatccacagatggtgatcttcttgtatcatgtggcgttgactgcactgttcgactctggaaagttccgatgcttaaaatggtggatactagtgagcgtgctggagataattcccagccatcagcagtttacacctggaagcatgcattctggggtgctgatcaccagtgggacggcaatcttttcgcaactgttggtgctcaagttgatatatgggatcctgacaggtcagagccaataaatagcttcgaatggggtaaagatacggttctttctgtgcgatttgatcctggagactctaatattttgattacgtcgggcagtgatcggagtctgacactctatgacttgcgtatgtcatctccagctagaaagctgataatgaagacaaggtgcaattcagtatgctggaaccctagagagcctatgaacttcactgctgcaaatgaagacacaaactgttactcctttgatgctagaaaattagatgaagcaaaaattgttcacaaaggccatgtttcagcagtgatggatattgactactcaccaacagggcgtgaatttgtcactggttcatatgatagaacagtaaggatttttaattatcttggagaccacagcagagagatttaccacaccaagaggatgcaaagggtgttttgtgtgaagtacacctatgatgggacctatttagtctctggcagtgatgatacaaatcttcgtctgtggaagtccaaagcttcagaacaacttggagttcttcttccacgggagcgcaaaaagcaagagtaccaggatgctttgaaggagcggtacaagcatctcccagaagtcaagcggattgtaaggcatagacatctaccgaagccaatctacaaggcagccaacctacggcgtacgatgatcgaagctgaaagccgtaaagaggaaaggaggcgaaagcacagtgctcccgggagcatgcctgtgcagcccttcaggaagcggagaatcatcagagaagttgagtagacatgcgttttgcctttcgtactacatatatgtgctccatcaatcagtttgtttgactagttattattgtgtatttgaaataccacacaaaatattcatatcgtgccattgcattgcaagaccgtgagcaatccgaattgaaggtaggacgttttctc

SEQ ID NO: 5989 - DNA, 1585 bp, Zea Mays
aaactgttgcttggatgatgatttgtgtatgactatgtgtatgtccatcggcatcgacggcttgcttgcttgctccaacgccaactacaggggggcgggggtgttgggtagctagctagccagatagtgatagagcgagctgctagtggaaagtagaaagagcgagcgcaccacaatggacagcatggaggacgccgtctccggcactgcagcccagggcgacctcgccgaggttgtggcccgcgcaggtgcaatggccgccgcggcgagtcaccaccaccaccggcggccaccctctcccgcagcagcagatcacggccacatcgtgtctgctgcaagggccaccgccagatcacagatcatgctcgtccctgctgctgcttgctacgacgacgagacacggcctgctgctgcttgcggcgacgcggtgatgttcgacgcgccgtcgtcgtcgatggccgccgccgtcggtccataccaccacctgtcgtcttcgtctgcggcgctggcaccggcgcacggcgggtactggctgccgccgcaacagatctcccaggagcacgcccgcgacggcggcctcgacgagccgcccgtggtgacgaggatctcgccagtgacgactccaccgccgccttctcatcatcatcaaatcatgaacagaagaatgaggtgaagaaggtggtgtgcatcccggcgctaccacctccggcgagcagccgcccaggaggaggagaggtgattccgtctgatctttgggcgtggaggaaatacggccagaagcctatcaagggttcgccttacccaagaggttactacagatgcagcagctcaaagggatgtatggcaaggaagcaagtagagcgcagtcgcagcgaccccaacatgctcgtgatcacctacacggcagaacacaaccacccttggccaatgcaacgcaatgtgctcgctggctactcccggcctcacactgctactcacatgtcgtccaactgcaagaagaagaagaacagctgcagcgttgaaccgacgagttcatggccaacaacaacaacatcatcaccatcatcaaagaacggcaactacgagtgtcagcaaatgacaaacatgacgatggaagaaaatgcagcagcagggtatgttgcctacgccatcgatgacgaggagtgtgccgcgatgcatcagccgatcaattgcggtagcgtgcaaccttcagcagatgaggttttcgcagagctagaggaattggagcctacgactagtcctgtgaatgcaaacatcttctctaggggggtgacttatgagtggcacaagttctaatctatcaagcccaaggtcgtataaggaaaggctagctaccccatatatatacatggttctgatgaaaaataggttacaattaataacgcacagattttacttaattaattgctgtgacgacagatctttatataccttttgtgtgcttatgattaattcaaagataagatatacttaaaaataagaaaaataaaatatatgtgtataatatttcgtcgtacataaaaatttccacaaatctgcatggatcgtatttgttactagcata

SEQ ID NO: 5990 - DNA, 2819 bp, Zea Mays
tttacttttcgtttttacatttttttaatctctttccttcctccgcactccgccgcgccggccagtcgtcttgtccccctcgccgcctccgtgctcgtcttgctccttctcggctccccaccccgccacctcgtcccaccccgccccttgggttgagttgagctactcaaccgtcagtcaattcctgcacctggcgttgggcgggttttcatgggggcagcataaaagcctcttcggttcttcccctagctctgcctcgcggcaagtccccctccgctacgttcgccatggctcgcaacagggaacatgcaatgagcttgcaaaggacattgggggctataagcatgtgacggtcatacatgatattaaagttgtagatgaaggaacggcacaggctctgcaaaaccttccattaggatctgcccctggtgattttctggattctattgttgttggcttggatatggtgattaggaaatttggtattaccaaagggaagcggcggctctgtctaatcactggtgcacaagaactgttaagagatccgcctgaggggaccaaagaagatcaggtggacaccattgcaaacatgttgaaaaaacacaatatcaagatggagtgcattattttcagagaaccgggagtgcatcataatgatgtaatggaagaaaatgaccgactattgcatcagttcagaaatagatcagtagcaaaggtagttcaggttgacaacccaacatcactgttgggtgctctcaagacaagaaatgtgctcccagttaccgttttcaggggagatctggaagtgaactccaattttaaaataaaggtgtgggtttataagaaaacagctgaggaaaaattccccactttgaagaagtattcggacaaagctcctccaaatgataaatttgcttctcatgaagtcaaagttgattatgagtacaagagtgttgttgagccagacaaagttgttccaccagaccaaaggattaaggggtatctctatggtcctcaagttattcctgtatcaaatgctgaatgggaggcagtcaagttcaagccagagaaaggtgtgaagcttctaggatttacagatagatccagcgtaccacggcaccaatttatgaaagatgtatgcctgtttatacctgagccaggtaacatgaaagcaagtcttgcagtttctgcgatagcaagagcaatgcatcaaatgaacaaggttgctatagtgcgatgtgtgtggaggcaaggtcaagggaatgttgctattggtgtattgacgccaaacatttcatcagtgaacaatatccaagattcattttacttcaatgtgctcccatttgctgaggacatcagagagtttcagtttcggtccttcagcagcctgccatcatcatctcagcccactgaagaacaacaagaagctgcagataacctagtgaagatgttagacctagcaccacctggaagagaggtcctcaagcctgagtttacgccaaatcccatcttggagagattttacagttaccttgatctcaagtcaaagcagccagatgcaaatgtcccaccgcttgaaagatctctaaggaggataaccgaacctgatcctgatgtggttggccaacaaacacaattaatccagaatttaagcaaagcttttgtgctgaaggataaccccaagaaaaagaaagcacgaacacaggacatgttggcatatactggtgcaggtgatcaagctaaatctgtagaggacagagttctggaaaatacacatccttcaacagagaatgttgtggcaatcagagattcaaatccagttcaagattttgaggccatgctggctaagagatctagctcaacatggactcagaaggctattggagatatgcagaattacatagcagctttgttacagaactccagtgatgggggcaactatcaaaaagcacttgaatgttttgcttctctgcggaaggcctgtattattgaacaggaaccacaggaattcaaccagttcctaacgaagatttacgagagattgaaggaaggtgatgctgccaagttctttcaacttctctcctcaaaaaacatttcacttatcaacaaagaggaagcgcctgacagtgatgtgactgaagagatggcaagaagtttctacctgaaacgagaaaaggcgtctcagtaggagctggaagaagccggtaactcgaagcgccttgggtttggagggtatctgcatgttttgaaactgggtatctgggtggaactggaactaatactcaaactctctgggttgagtcactgttttgctgcacaatctgctgcctactacgtttcgactagattcagctttgggtactactgtatgttgtttgactggagtagcatgtccatagatcacatacttctgcagtgttcattggagtgaatgcatgcatgcggtgaaatgcagcatggataggtctaggaagaaacattaccatcatttcctaatgttggagcgctgcctagaaaaggatctttttctgtaagtggtctggtgcgtcaaaccctccaaagtccaaaataatcctttctacataacaagtccgatgtgtcattggactgtacgatgagccaggttcggtacaccatggtacaacagactaattctaaacttgggcttcttttctttgtctttacttgactctactcttgggcacttttatgacttagacaaatatttcttgagtgttccaatcattctaagttatcccattggtctcaaataatccttcaacttattttccatcttttcttcaaccttttgccttaat

SEQ ID NO: 5991 - DNA, 2694 bp, Zea Mays
cagtcgtcttgtccccctcgccgcctccgtgctcgtcttgctccttctcggctccccaccccgccacctcgtcccaccccgccccttgggttgagttgagctactcaaccgtcagtcaattcctgcacctggcgttgggcgggttttcatgggggcagcataaaagcctcttcggttcttcccctagctctgcctcgcggcaagtccccctccgctacgttcgccatggctcgcaacagggaagtggtgattttgctgttggatgttgggccttcgatgcatggagtgctgctagagctagtttataacaggagcgatgaagttggtattgtcctctttggtactaaaggaaatttggtattaccaaagggaagcggcggctctgtctaatcactggtgcacaagaactgttaagagatccgcctgaggggaccaaagaagatcaggtggacaccattgcaaacatgttgaaaaaacacaatatcaagatggagtgcattattttcagagaaccgggagtgcatcataatgatgtaatggaagaaaatgaccgactattgcatcagttcagaaatagatcagtagcaaaggtagttcaggttgacaacccaacatcactgttgggtgctctcaagacaagaaatgtgctcccagttaccgttttcaggggagatctggaagtgaactccaattttaaaataaaggtgtgggtttataagaaaacagctgaggaaaaattccccactttgaagaagtattcggacaaagctcctccaaatgataaatttgcttctcatgaagtcaaagttgattatgagtacaagagtgttgttgagccagacaaagttgttccaccagaccaaaggattaaggggtatctctatggtcctcaagttattcctgtatcaaatgctgaatgggaggcagtcaagttcaagccagagaaaggtgtgaagcttctaggatttacagatagatccagcgtaccacggcaccaatttatgaaagatgtatgcctgtttatacctgagccaggtaacatgaaagcaagtcttgcagtttctgcgatagcaagagcaatgcatcaaatgaacaaggttgctatagtgcgatgtgtgtggaggcaaggtcaagggaatgttgctattggtgtattgacgccaaacatttcatcagtgaacaatatccaagattcattttacttcaatgtgctcccatttgctgaggacatcagagagtttcagtttcggtccttcagcagcctgccatcatcatctcagcccactgaagaacaacaagaagctgcagataacctagtgaagatgttagacctagcaccacctggaagagaggtcctcaagcctgagtttacgccaaatcccatcttggagagattttacagttaccttgatctcaagtcaaagcagccagatgcaaatgtcccaccgcttgaaagatctctaaggaggataaccgaacctgatcctgatgtggttggccaacaaacacaattaatccagaatttaagcaaagcttttgtgctgaaggataaccccaagaaaaagaaagcacgaacacaggacatgttggcatatactggtgcaggtgatcaagctaaatctgtagaggacagagttctggaaaatacacatccttcaacagagaatgttgtggcaatcagagattcaaatccagttcaagattttgaggccatgctggctaagagatctagctcaacatggactcagaaggctattggagatatgcagaattacatagcagctttgttacagaactccagtgatgggggcaactatcaaaaagcacttgaatgttttgcttctctgcggaaggcctgtattattgaacaggaaccacaggaattcaaccagttcctaacgaagatttacgagagattgaaggaaggtgatgctgccaagttctttcaacttctctcctcaaaaaacatttcacttatcaacaaagaggaagcgcctgacagtgatgtgactgaagagatggcaagaagtttctacctgaaacgagaaaaggcgtctcagtaggagctggaagaagccggtaactcgaagcgccttgggtttggagggtatctgcatgttttgaaactgggtatctgggtggaactggaactaatactcaaactctctgggttgagtcactgttttgctgcacaatctgctgcctactacgtttcgactagattcagctttgggtactactgtatgttgtttgactggagtagcatgtccatagatcacatacttctgcagtgttcattggagtgaatgcatgcatgcggtgaaatgcagcatggataggtctaggaagaaacattaccatcatttcctaatgttggagcgctgcctagaaaaggatctttttctgtaagtggtctggtgcgtcaaaccctccaaagtccaaaataatcctttctacataacaagtccgatgtgtcattggactgtacgatgagccaggttcggtacaccatggtacaacagactaattctaaacttgggcttcttttctttgtctttacttgactctactcttgggcacttttatgacttagacaaatatttcttgagtgttccaatcattctaagttatcccattggtctcaaataatccttcaacttattttccatcttttcttcaaccttttgccttaat

SEQ ID NO: 5992 - DNA, 2730 bp, Zea Mays
cagtcgtcttgtccccctcgccgcctccgtgctcgtcttgctccttctcggctccccaccccgccacctcgtcccaccccgccccttgggttgagttgagctactcaaccgtcagtcaattcctgcacctggcgttgggcgggttttcatgggggcagcataaaagcctcttcggttcttcccctagctctgcctcgcggcaagtccccctccgctacgttcgccatggctcgcaacagggaagtggtgattttgctgttggatgttgggccttcgatgcatggagtgctgctagaggtgaagaacgtatgcttgactcttgtgcataagaagctagtttataacaggagcgatgaagttggtattgtcctctttggtactaaaggaaatttggtattaccaaagggaagcggcggctctgtctaatcactggtgcacaagaactgttaagagatccgcctgaggggaccaaagaagatcaggtggacaccattgcaaacatgttgaaaaaacacaatatcaagatggagtgcattattttcagagaaccgggagtgcatcataatgatgtaatggaagaaaatgaccgactattgcatcagttcagaaatagatcagtagcaaaggtagttcaggttgacaacccaacatcactgttgggtgctctcaagacaagaaatgtgctcccagttaccgttttcaggggagatctggaagtgaactccaattttaaaataaaggtgtgggtttataagaaaacagctgaggaaaaattccccactttgaagaagtattcggacaaagctcctccaaatgataaatttgcttctcatgaagtcaaagttgattatgagtacaagagtgttgttgagccagacaaagttgttccaccagaccaaaggattaaggggtatctctatggtcctcaagttattcctgtatcaaatgctgaatgggaggcagtcaagttcaagccagagaaaggtgtgaagcttctaggatttacagatagatccagcgtaccacggcaccaatttatgaaagatgtatgcctgtttatacctgagccaggtaacatgaaagcaagtcttgcagtttctgcgatagcaagagcaatgcatcaaatgaacaaggttgctatagtgcgatgtgtgtggaggcaaggtcaagggaatgttgctattggtgtattgacgccaaacatttcatcagtgaacaatatccaagattcattttacttcaatgtgctcccatttgctgaggacatcagagagtttcagtttcggtccttcagcagcctgccatcatcatctcagcccactgaagaacaacaagaagctgcagataacctagtgaagatgttagacctagcaccacctggaagagaggtcctcaagcctgagtttacgccaaatcccatcttggagagattttacagttaccttgatctcaagtcaaagcagccagatgcaaatgtcccaccgcttgaaagatctctaaggaggataaccgaacctgatcctgatgtggttggccaacaaacacaattaatccagaatttaagcaaagcttttgtgctgaaggataaccccaagaaaaagaaagcacgaacacaggacatgttggcatatactggtgcaggtgatcaagctaaatctgtagaggacagagttctggaaaatacacatccttcaacagagaatgttgtggcaatcagagattcaaatccagttcaagattttgaggccatgctggctaagagatctagctcaacatggactcagaaggctattggagatatgcagaattacatagcagctttgttacagaactccagtgatgggggcaactatcaaaaagcacttgaatgttttgcttctctgcggaaggcctgtattattgaacaggaaccacaggaattcaaccagttcctaacgaagatttacgagagattgaaggaaggtgatgctgccaagttctttcaacttctctcctcaaaaaacatttcacttatcaacaaagaggaagcgcctgacagtgatgtgactgaagagatggcaagaagtttctacctgaaacgagaaaaggcgtctcagtaggagctggaagaagccggtaactcgaagcgccttgggtttggagggtatctgcatgttttgaaactgggtatctgggtggaactggaactaatactcaaactctctgggttgagtcactgttttgctgcacaatctgctgcctactacgtttcgactagattcagctttgggtactactgtatgttgtttgactggagtagcatgtccatagatcacatacttctgcagtgttcattggagtgaatgcatgcatgcggtgaaatgcagcatggataggtctaggaagaaacattaccatcatttcctaatgttggagcgctgcctagaaaaggatctttttctgtaagtggtctggtgcgtcaaaccctccaaagtccaaaataatcctttctacataacaagtccgatgtgtcattggactgtacgatgagccaggttcggtacaccatggtacaacagactaattctaaacttgggcttcttttctttgtctttacttgactctactcttgggcacttttatgacttagacaaatatttcttgagtgttccaatcattctaagttatcccattggtctcaaataatccttcaacttattttccatcttttcttcaaccttttgccttaat

SEQ ID NO: 5993 - DNA, 2769 bp, Zea Mays
gaaaaacatacctatgcttctgaatccattcgagtttggtcccgcaagttaagttctctggctggtgatgtttgtttgcctggactgtacactttagttgctccaaggaagtggtgattttgctgttggatgttgggccttcgatgcatggagtgctgctagaggtgaagaacgtatgcttgactcttgtgcataagaagctagtttataacaggagcgatgaagttggtattgtcctctttggtactaaaggaacatgcaatgagcttgcaaaggacattgggggctataagcatgtgacggtcatacatgatattaaagttgtagatgaaggaacggcacaggctctgcaaaaccttccattaggatctgcccctggtgattttctggattctattgttgttggcttggatatggtgattaggaaatttggtattaccaaagggaagcggcggctctgtctaatcactggtgcacaagaactgttaagagatccgcctgaggggaccaaagaagatcaggtggacaccattgcaaacatgttgaaaaaacacaatatcaagatggagtgcattattttcagagaaccgggagtgcatcataatgatgtaatggaagaaaatgaccgactattgcatcagttcagaaatagatcagtagcaaaggtagttcaggttgacaacccaacatcactgttgggtgctctcaagacaagaaatgtgctcccagttaccgttttcaggggagatctggaagtgaactccaattttaaaataaaggtgtgggtttataagaaaacagctgaggaaaaattccccactttgaagaagtattcggacaaagctcctccaaatgataaatttgcttctcatgaagtcaaagttgattatgagtacaagagtgttgttgagccagacaaagttgttccaccagaccaaaggattaaggggtatctctatggtcctcaagttattcctgtatcaaatgctgaatgggaggcagtcaagttcaagccagagaaaggtgtgaagcttctaggatttacagatagatccagcgtaccacggcaccaatttatgaaagatgtatgcctgtttatacctgagccaggtaacatgaaagcaagtcttgcagtttctgcgatagcaagagcaatgcatcaaatgaacaaggttgctatagtgcgatgtgtgtggaggcaaggtcaagggaatgttgctattggtgtattgacgccaaacatttcatcagtgaacaatatccaagattcattttacttcaatgtgctcccatttgctgaggacatcagagagtttcagtttcggtccttcagcagcctgccatcatcatctcagcccactgaagaacaacaagaagctgcagataacctagtgaagatgttagacctagcaccacctggaagagaggtcctcaagcctgagtttacgccaaatcccatcttggagagattttacagttaccttgatctcaagtcaaagcagccagatgcaaatgtcccaccgcttgaaagatctctaaggaggataaccgaacctgatcctgatgtggttggccaacaaacacaattaatccagaatttaagcaaagcttttgtgctgaaggataaccccaagaaaaagaaagcacgaacacaggacatgttggcatatactggtgcaggtgatcaagctaaatctgtagaggacagagttctggaaaatacacatccttcaacagagaatgttgtggcaatcagagattcaaatccagttcaagattttgaggccatgctggctaagagatctagctcaacatggactcagaaggctattggagatatgcagaattacatagcagctttgttacagaactccagtgatgggggcaactatcaaaaagcacttgaatgttttgcttctctgcggaaggcctgtattattgaacaggaaccacaggaattcaaccagttcctaacgaagatttacgagagattgaaggaaggtgatgctgccaagttctttcaacttctctcctcaaaaaacatttcacttatcaacaaagaggaagcgcctgacagtgatgtgactgaagagatggcaagaagtttctacctgaaacgagaaaaggcgtctcagtaggagctggaagaagccggtaactcgaagcgccttgggtttggagggtatctgcatgttttgaaactgggtatctgggtggaactggaactaatactcaaactctctgggttgagtcactgttttgctgcacaatctgctgcctactacgtttcgactagattcagctttgggtactactgtatgttgtttgactggagtagcatgtccatagatcacatacttctgcagtgttcattggagtgaatgcatgcatgcggtgaaatgcagcatggataggtctaggaagaaacattaccatcatttcctaatgttggagcgctgcctagaaaaggatctttttctgtaagtggtctggtgcgtcaaaccctccaaagtccaaaataatcctttctacataacaagtccgatgtgtcattggactgtacgatgagccaggttcggtacaccatggtacaacagactaattctaaacttgggcttcttttctttgtctttacttgactctactcttgggcacttttatgacttagacaaatatttcttgagtgttccaatcattctaagttatcccattggtctcaaataatccttcaacttattttccatcttttcttcaaccttttgccttaat

SEQ ID NO: 5994 - DNA, 3581 bp, Zea Mays
aaagctgcgtgacgcggagaggacggcgttggcgtagaagatcccgcagctgtcgttttcaacccttggaagaggagggaggccggaggcgggccgagagacggccccgtttccttctcttctacctccctccctcacctagtggtcggaacatttgccgatgtctcctgtcgaaggctgccccactgtatttcaggctatttgcagcctgtctccagggattcatgagtacaagttctatgtggacggggagtggcgtcatgatgagcgccaacctactatatctggggagttcggcatagttaacacactatacttgacaagggaatttaatcaaataaacgccttattaaatccaagcacacctggaagcaggatgaacatggatgtggataatgaaaattttcaacatacggttacattgtcggatggtaccattccagaaggtactgtgagagtttcagaggctgcaatacaaatctcaaggtgccgcgtttctgagtatctcaatttgcatacatgctatgatttactcccggattcgggcaaggttattgctctggacattaatttacctgtgaagcaatcttttcatattctgcatgaacaggggattcctgtagctcctctctgggactcattcagaggtcaatttgtcggccttctgagcccattggatttcatacttatattgcgggagctagaaactcatggctcgaacttgacagaagatcagcttgaaacacacactatatctgcatggaaagaggctaagcggcaaacttgtggaagaaatgatggtcagtggcgagcacatcagcatctagtgcatgccaccccttatgagtccttgagggacattgcagtaaagcttttgcaaaatgacatttctacagtgccagttatttattcatcatcatcagatggatcattccctcagttattgcaccttgcatccctttctggaattttgaaatgtatttttaggtattttaaaaactcaactggtaatttgcctattctgaaccaaccggtgtgctccattccgctgggttcctgggttccgaaaatcggtgatccaaacagtcgtccattggctatgttgcgacctaatgcatcacttagctctgcccttaacatgttggttcaagctggagtgagctcaataccaattgtggatgaaaacgactccctgcttgacacttactctagaagtgacatcacagccctagctaaagacaaggtctacacacatgttcgcctggatgagatgaccattcatcaggctttacagcttggacaagatgccaatacgccttttggtttttttaacggtcagagatgccagatgtgcctccggtctgatcctttgctgaaggtgatggagcgactggctaatccgggggtgcggcgggtgttcatagtagaagctgggagcaaacgtgtggagggtattatatcactgagtgatattttcaagttcttgctgagcttgtgataagagaagaggagcatgacggacatttgtttgtgatcaatagtaagaaaacagcagggtatgtgaagcaagctgccatggatctcgcattccccctccccctccggcctttggtcaagtaaggcaggattgaaggtggcgggctttgtctttgctgataatggctgttggaattcatagtctgtaaagttcttttttttcctttgtttttcgttttaaccattttgtgcctcccgttgttaccaaaaatatctggtgatttttattattatttttggattgtttccgccctacatacactagatgtttgcatcccatttttcaattttttaccccccatgtgtagtgcagctgtcctgtgtagcagtattatgttagccgaacgtgtgtgtttggtttcgctggacaatcatatagatagatagatagatagatagatagatagatagatagatagatagatagatagatagctgatgcctggctagaagttttgtaccattttcatcgctggtacggtagcaagcattcttctagtcttggtggtaaggaaacaaacgaagaaatgaatctagtggtgctgttgaatgtggacgcggtcccaactgcccatcttgttcgtcctgtccggtagtaaagaaaaatctagagggttggggatgggagtggataggacctatccacatgtcagtcctttcccgaatacccatcattttcctctcttgccttgccttccccattgccattgtgtaatcctcatcctccgtcgagatcaaggaagaaagaaagaaagaaagcaaccatggcggcaaccgcaatgtgcccctccccctcggccgcaataactcgccacatccatgctcgtcgctcctgtgctgctgcttccttgtccctccgccgctcgggcttcctggggcgcgtcgtgctggccgcggtgccggtggccgtggacgccacccggcgccgccgcgtctccgtgtcggtgcggatggcctgggacggtccgctctcgtcggtgcgcctcatcatgcagagcaggaacgcgaagctgagcgagaagctcaaggagcacatcgaggacaaggtgggtcgggcggtgtccaagcactgccacctggtccgggaggtagacgtgcgcctctccgcgcgcggcggcgagctcggccggggccccaagacgtcgcgctgcgagatcaccctcttcaccaagcgccatggcgtcctgcgcgccgaggaggacgccgagtccacctacgccagcatcgacctcgccgccgccatcgtcaagcgcaagctccgcaagatcaaggagaaggagacggaggtgcgccgcggcggagacgctgacggcgtctgggacgagatcccgccggccgacctgctgccccccgccgaggccgacgacctggaggcggccgtgggcgctgaggacgagcagacggtgctcgccaaggtggtgcgcaccaaggtgttcgagatgccgccgctcacggtggaggaggcgctggagcagctggagaacgtggaccacgacttctactgcttcagggacgaggccacggggcaggtgaacatcctctaccgcaggaaggaaggcggatacggcctcatcatccccaagaacgacggcaaagtggataccgttggcgttgtgccaccacccgccgtcgctgcggagccggagccgtcctacgcagtgcacgccgctgacaacaacaactcctgaactgagcactcgtcgacgtctcatccaaccaaaaccaaaacgagagagaatgcttgcttggtactgtaaaaataaaacaaacgcactcgtcgtcgacgtctcatctgcatcagttgcatgcattgctgtgatgaatgtgtctgtgtttgtgtcacccacacaaactgctcatattagctctccatttcatactctccctcctgctattagcaccaattgacacactgccttttggtataatctgtacgagctgtcagtcattagggtatccattaatcggctctgtaccgagattgagttttgtatagcacacaacagctcgcatccttttgatattccagtccaaatgtccaatcc

SEQ ID NO: 5995 - DNA, 3034 bp, Zea Mays
cttgttcttgcctcatatattgcttttgattagacatatagcggtgcagtacatttagtaatttgtggggattcctgtagctcctctctgggactcattcagaggtcaatttgtcggccttctgagcccattggatttcatacttatattgcgggagaaactcatggctcgaacttgacagaagatcagcttgaaacacacactatatctgcatggaaagaggctaagcggcaaacttgtggaagaaatgatggtcagtggcgagcacatcagcatctagtgcatgccaccccttatgagtccttgagggacattgcagtaaagcttttgcaaaatgacatttctacagtgccagttatttattcatcatcatcagatggatcattccctcagttattgcaccttgcatccctttctggaattttgaaatgtatttttaggtattttaaaaactcaactggtaatttgcctattctgaaccaaccggtgtgctccattccgctgggttcctgggttccgaaaatcggtgatccaaacagtcgtccattggctatgttgcgacctaatgcatcacttagctctgcccttaacatgttggttcaagctggagtgagctcaataccaattgtggatgaaaacgactccctgcttgacacttactctagaagtgacatcacagccctagctaaagacaaggtctacacacatgttcgcctggatgagatgaccattcatcaggctttacagcttggacaagatgccaatacgccttttggtttttttaacggtcagagatgccagatgtgcctccggtctgatcctttgctgaaggtgatggagcgactggctaatccgggggtgcggcgggtgttcatagtagaagctgggagcaaacgtgtggagggtattatatcactgagtgatattttcaagttcttgctgagcttgtgataagagaagaggagcatgacggacatttgtttgtgatcaatagtaagaaaacagcagggtatgtgaagcaagctgccatggatctcgcattccccctccccctccggcctttggtcaagtaaggcaggattgaaggtggcgggctttgtctttgctgataatggctgttggaattcatagtctgtaaagttcttttttttcctttgtttttcgttttaaccattttgtgcctcccgttgttaccaaaaatatctggtgatttttattattatttttggattgtttccgccctacatacactagatgtttgcatcccatttttcaattttttaccccccatgtgtagtgcagctgtcctgtgtagcagtattatgttagccgaacgtgtgtgtttggtttcgctggacaatcatatagatagatagatagatagatagatagatagatagatagatagatagatagatagatagctgatgcctggctagaagttttgtaccattttcatcgctggtacggtagcaagcattcttctagtcttggtggtaaggaaacaaacgaagaaatgaatctagtggtgctgttgaatgtggacgcggtcccaactgcccatcttgttcgtcctgtccggtagtaaagaaaaatctagagggttggggatgggagtggataggacctatccacatgtcagtcctttcccgaatacccatcattttcctctcttgccttgccttccccattgccattgtgtaatcctcatcctccgtcgagatcaaggaagaaagaaagaaagaaagcaaccatggcggcaaccgcaatgtgcccctccccctcggccgcaataactcgccacatccatgctcgtcgctcctgtgctgctgcttccttgtccctccgccgctcgggcttcctggggcgcgtcgtgctggccgcggtgccggtggccgtggacgccacccggcgccgccgcgtctccgtgtcggtgcggatggcctgggacggtccgctctcgtcggtgcgcctcatcatgcagagcaggaacgcgaagctgagcgagaagctcaaggagcacatcgaggacaaggtgggtcgggcggtgtccaagcactgccacctggtccgggaggtagacgtgcgcctctccgcgcgcggcggcgagctcggccggggccccaagacgtcgcgctgcgagatcaccctcttcaccaagcgccatggcgtcctgcgcgccgaggaggacgccgagtccacctacgccagcatcgacctcgccgccgccatcgtcaagcgcaagctccgcaagatcaaggagaaggagacggaggtgcgccgcggcggagacgctgacggcgtctgggacgagatcccgccggccgacctgctgccccccgccgaggccgacgacctggaggcggccgtgggcgctgaggacgagcagacggtgctcgccaaggtggtgcgcaccaaggtgttcgagatgccgccgctcacggtggaggaggcgctggagcagctggagaacgtggaccacgacttctactgcttcagggacgaggccacggggcaggtgaacatcctctaccgcaggaaggaaggcggatacggcctcatcatccccaagaacgacggcaaagtggataccgttggcgttgtgccaccacccgccgtcgctgcggagccggagccgtcctacgcagtgcacgccgctgacaacaacaactcctgaactgagcactcgtcgacgtctcatccaaccaaaaccaaaacgagagagaatgcttgcttggtactgtaaaaataaaacaaacgcactcgtcgtcgacgtctcatctgcatcagttgcatgcattgctgtgatgaatgtgtctgtgtttgtgtcacccacacaaactgctcatattagctctccatttcatactctccctcctgctattagcaccaattgacacactgccttttggtataatctgtacgagctgtcagtcattagggtatccattaatcggctctgtaccgagattgagttttgtatagcacacaacagctcgcatccttttgatattccagtccaaatgtccaatcc

SEQ ID NO: 5996 - DNA, 2904 bp, Zea Mays
gtatactggaagcatccaagtttgagtgtaaagcagctggtgatgagtaggcattaatgtgtgtgaaaggagcagtggtgcaagagatcaggagtcgatggttcaggaaggctgagagcactagggataataccagttgcagctggtctgatcaggccaccccttatgagtccttgagggacattgcagtaaagcttttgcaaaatgacatttctacagtgccagttatttattcatcatcatcagatggatcattccctcagttattgcaccttgcatccctttctggaattttgaaatgtatttttaggtattttaaaaactcaactggtaatttgcctattctgaaccaaccggtgtgctccattccgctgggttcctgggttccgaaaatcggtgatccaaacagtcgtccattggctatgttgcgacctaatgcatcacttagctctgcccttaacatgttggttcaagctggagtgagctcaataccaattgtggatgaaaacgactccctgcttgacacttactctagaagtgacatcacagccctagctaaagacaaggtctacacacatgttcgcctggatgagatgaccattcatcaggctttacagcttggacaagatgccaatacgccttttggtttttttaacggtcagagatgccagatgtgcctccggtctgatcctttgctgaaggtgatggagcgactggctaatccgggggtgcggcgggtgttcatagtagaagctgggagcaaacgtgtggagggtattatatcactgagtgatattttcaagttcttgctgagcttgtgataagagaagaggagcatgacggacatttgtttgtgatcaatagtaagaaaacagcagggtatgtgaagcaagctgccatggatctcgcattccccctccccctccggcctttggtcaagtaaggcaggattgaaggtggcgggctttgtctttgctgataatggctgttggaattcatagtctgtaaagttcttttttttcctttgtttttcgttttaaccattttgtgcctcccgttgttaccaaaaatatctggtgatttttattattatttttggattgtttccgccctacatacactagatgtttgcatcccatttttcaattttttaccccccatgtgtagtgcagctgtcctgtgtagcagtattatgttagccgaacgtgtgtgtttggtttcgctggacaatcatatagatagatagatagatagatagatagatagatagatagatagatagatagatagatagctgatgcctggctagaagttttgtaccattttcatcgctggtacggtagcaagcattcttctagtcttggtggtaaggaaacaaacgaagaaatgaatctagtggtgctgttgaatgtggacgcggtcccaactgcccatcttgttcgtcctgtccggtagtaaagaaaaatctagagggttggggatgggagtggataggacctatccacatgtcagtcctttcccgaatacccatcattttcctctcttgccttgccttccccattgccattgtgtaatcctcatcctccgtcgagatcaaggaagaaagaaagaaagaaagcaaccatggcggcaaccgcaatgtgcccctccccctcggccgcaataactcgccacatccatgctcgtcgctcctgtgctgctgcttccttgtccctccgccgctcgggcttcctggggcgcgtcgtgctggccgcggtgccggtggccgtggacgccacccggcgccgccgcgtctccgtgtcggtgcggatggcctgggacggtccgctctcgtcggtgcgcctcatcatgcagagcaggaacgcgaagctgagcgagaagctcaaggagcacatcgaggacaaggtgggtcgggcggtgtccaagcactgccacctggtccgggaggtagacgtgcgcctctccgcgcgcggcggcgagctcggccggggccccaagacgtcgcgctgcgagatcaccctcttcaccaagcgccatggcgtcctgcgcgccgaggaggacgccgagtccacctacgccagcatcgacctcgccgccgccatcgtcaagcgcaagctccgcaagatcaaggagaaggagacggaggtgcgccgcggcggagacgctgacggcgtctgggacgagatcccgccggccgacctgctgccccccgccgaggccgacgacctggaggcggccgtgggcgctgaggacgagcagacggtgctcgccaaggtggtgcgcaccaaggtgttcgagatgccgccgctcacggtggaggaggcgctggagcagctggagaacgtggaccacgacttctactgcttcagggacgaggccacggggcaggtgaacatcctctaccgcaggaaggaaggcggatacggcctcatcatccccaagaacgacggcaaagtggataccgttggcgttgtgccaccacccgccgtcgctgcggagccggagccgtcctacgcagtgcacgccgctgacaacaacaactcctgaactgagcactcgtcgacgtctcatccaaccaaaaccaaaacgagagagaatgcttgcttggtactgtaaaaataaaacaaacgcactcgtcgtcgacgtctcatctgcatcagttgcatgcattgctgtgatgaatgtgtctgtgtttgtgtcacccacacaaactgctcatattagctctccatttcatactctccctcctgctattagcaccaattgacacactgccttttggtataatctgtacgagctgtcagtcattagggtatccattaatcggctctgtaccgagattgagttttgtatagcacacaacagctcgcatccttttgatattccagtccaaatgtccaatcc

SEQ ID NO: 5997 - DNA, 2846 bp, Zea Mays
ctggaagcatccaagtttgagtgtaaagcagctggtgatgagtaggcattaatgtgtgtgaaaggagcagtggtgcaagagatcaggagtcgatggttcaggaaggctgagagcactagggataataccagttgcagctggtctgatcaggccaccccttatgagtccttgagggacattgcagtaaagcttttgcaaaatgacatttctacagtgccagttatttattcatcatcatcagatggatcattccctcagttattgcaccttgcatccctttctggaattttgaaatgtatttttaggtattttaaaaactcaactggtaatttgcctattctgaaccaaccggtgtgctccattccgctgggttcctgggttccgaaaatcggtgatccaaacagtcgtccattggctatgttgcgacctaatgcatcacttagctctgcccttaacatgttggttcaagctggagtgagctcaataccaattgtggatgaaaacgactccctgcttgacacttactctagaagtgacatcacagccctagctaaagacaaggtctacacacatgttcgcctggatgagatgaccattcatcaggagatgccagatgtgcctccggtctgatcctttgctgaaggtgatggagcgactggctaatccgggggtgcggcgggtgttcatagtagaagctgggagcaaacgtgtggagggtattatatcactgagtgatattttcaagttcttgctgagcttgtgataagagaagaggagcatgacggacatttgtttgtgatcaatagtaagaaaacagcagggtatgtgaagcaagctgccatggatctcgcattccccctccccctccggcctttggtcaagtaaggcaggattgaaggtggcgggctttgtctttgctgataatggctgttggaattcatagtctgtaaagttcttttttttcctttgtttttcgttttaaccattttgtgcctcccgttgttaccaaaaatatctggtgatttttattattatttttggattgtttccgccctacatacactagatgtttgcatcccatttttcaattttttaccccccatgtgtagtgcagctgtcctgtgtagcagtattatgttagccgaacgtgtgtgtttggtttcgctggacaatcatatagatagatagatagatagatagatagatagatagatagatagatagatagatagatagctgatgcctggctagaagttttgtaccattttcatcgctggtacggtagcaagcattcttctagtcttggtggtaaggaaacaaacgaagaaatgaatctagtggtgctgttgaatgtggacgcggtcccaactgcccatcttgttcgtcctgtccggtagtaaagaaaaatctagagggttggggatgggagtggataggacctatccacatgtcagtcctttcccgaatacccatcattttcctctcttgccttgccttccccattgccattgtgtaatcctcatcctccgtcgagatcaaggaagaaagaaagaaagaaagcaaccatggcggcaaccgcaatgtgcccctccccctcggccgcaataactcgccacatccatgctcgtcgctcctgtgctgctgcttccttgtccctccgccgctcgggcttcctggggcgcgtcgtgctggccgcggtgccggtggccgtggacgccacccggcgccgccgcgtctccgtgtcggtgcggatggcctgggacggtccgctctcgtcggtgcgcctcatcatgcagagcaggaacgcgaagctgagcgagaagctcaaggagcacatcgaggacaaggtgggtcgggcggtgtccaagcactgccacctggtccgggaggtagacgtgcgcctctccgcgcgcggcggcgagctcggccggggccccaagacgtcgcgctgcgagatcaccctcttcaccaagcgccatggcgtcctgcgcgccgaggaggacgccgagtccacctacgccagcatcgacctcgccgccgccatcgtcaagcgcaagctccgcaagatcaaggagaaggagacggaggtgcgccgcggcggagacgctgacggcgtctgggacgagatcccgccggccgacctgctgccccccgccgaggccgacgacctggaggcggccgtgggcgctgaggacgagcagacggtgctcgccaaggtggtgcgcaccaaggtgttcgagatgccgccgctcacggtggaggaggcgctggagcagctggagaacgtggaccacgacttctactgcttcagggacgaggccacggggcaggtgaacatcctctaccgcaggaaggaaggcggatacggcctcatcatccccaagaacgacggcaaagtggataccgttggcgttgtgccaccacccgccgtcgctgcggagccggagccgtcctacgcagtgcacgccgctgacaacaacaactcctgaactgagcactcgtcgacgtctcatccaaccaaaaccaaaacgagagagaatgcttgcttggtactgtaaaaataaaacaaacgcactcgtcgtcgacgtctcatctgcatcagttgcatgcattgctgtgatgaatgtgtctgtgtttgtgtcacccacacaaactgctcatattagctctccatttcatactctccctcctgctattagcaccaattgacacactgccttttggtataatctgtacgagctgtcagtcattagggtatccattaatcggctctgtaccgagattgagttttgtatagcacacaacagctcgcatccttttgatattccagtccaaatgtccaatcc

SEQ ID NO: 5998 - DNA, 1564 bp, Zea Mays
atgtggagttaagctcaagccgaaaaagattttgaattacagaaactagcttttaatcggaagagaacagcctcgttttcaaacttgagcgtggccgacaaagattttgaagtttccgtcgttcacactgacgtgacgtggtccttccgccaattgaggctttaacggacatgagatcctccatgtgcttggtttcttttatttttggcggtgagtggggccagccgccagcagtatgagtatcaccgtgacccatgcgaattccattggccgttggcagctttgatgagcatgtttgcttcatctgctgtctttaattaagatctcacttccactccacacccttctactagagcagctgagctgagctgagagtgacagcagcggagcggcaatggcgcagatgctcctcctcctcctcctgccgccgcctttcctcctccttgccgcacccacagtgccagcggaggcagcagccaccgcctccactccgacgctcgtgttcctcctggccgggcagtccaacatgggcggccgcggcggcgccaccaacggcacctgggacggcgtggtgccgcccgcgtgcgcgccttccccgcgcatcctccgcctctccccgtccctgcgctgggaggaggcccgggagccgctgcacgccggcattgacctgcacaacgtgctcggcgtgggccccgggatgcccttcgcgcacgcgctcctccgctcctggcgccgctccggccgccgccccgccgtcgtggggctgatcccctgcgcgcagggcgccacgcccatcgccagctggtcccgcggcacgccgctgtacgaccgcatgctcgcgcgcgcaagggccgccgtcgcccgcgggcccgccaccaggctggccgcgctgctctggtaccagggcgaggccgacaccatcaggcgccaggacgccgacgcctacacgccccgcatggaggccttggtccgcgacgtccgccgggacctgggcatgccggacctgctggtcatccaggtggggctggccacggggcagggcaggtttgtggacatcgtcagggaggcgcagaggagggtcagcctccgcaacgtcagacgtcggcgcactggtcggagacggtggcggtgaagaacgtcgagcggcggtgaagaacgtcgagacactggtcggagacggcggcggtggacaacgtcgaggccgagcgcaatggtgaaccggcagcggaggcgaagacgtcggcgcggtcgatcggggacgacggtagtgaagagattgcggtggagcactagataaaaaacggaggcgaggcagttaccaacaaattaaatttatagttgaggagactttagtaccggttgtagtaaacaaccggttctaaaacatcttcagtaccgatttatactaacaaccgatactaaatcttactagccgcgaactcgaaaaggtaactttagtatcggctcctcttatcaaccggtactaaagacatcattagaaccggttctaaacacaatcggttctaaatcttaataggtgcgaacaaaggaaagtttggtaccg

SEQ ID NO: 5999 - DNA, 2016 bp, Zea Mays
ccattggccgttggcagctttgatgagcatgtttgcttcatctgctgtctttaattaagatctcacttccactccacacccttctactagagcagctgagctgagctgagagtgacagcagcggagcggcaatggcgcagatgctcctcctcctcctcctgccgccgcctttcctcctccttgccgcacccacagtgccagcggaggcagcagccaccgcctccactccgacgctcgtgttcctcctggccgggcagtccaacatgggcggccgcggcggcgccaccaacggcacctgggacggcgtggtgccgcccgcgtgcgcgccttccccgcgcatcctccgcctctccccgtccctgcgctgggaggaggcccgggagccgctgcacgccggcattgacctgcacaacgtgctcggcgtgggccccgggatgcccttcgcgcacgcgctcctccgctcctggcgccgctccggccgccgccccgccgtcgtggggctgatcccctgcgcgcagggcgccacgcccatcgccagctggtcccgcggcacgccgctgtacgaccgcatgctcgcgcgcgcaagggccgccgtcgcccgcgggcccgccaccaggctggccgcgctgctctggtaccagggcgaggccgacaccatcaggcgccaggacgccgacgcctacacgccccgcatggaggccttggtccgcgacgtccgccgggacctgggcatgccggacctgctggtcatccaggtggggctggccacggggcagggcaggtttgtggacatcgtcagggaggcgcagaggagggtcagcctccgcaacgtcaggtacgtggacgccaagggcctgcccgtcgccaacgactacacgcatctgaccacgccggcgcaggtcaagctcggcaacatgctcgccgccgcctacatggcagcgacacacacgcactgactgagccatctactacctcgattcttaatcaattctacttgactactcagtaattgagccagcaagcagcaagcaacgctacgccgttctactttaattttgttctgcacatgtccttactatgcataacatcctttgctttgacgatgatgatttagcatcctttgatgatggtactcaaatagaatattcttctttttacagaagacagtaacaatagccaccaaacttgttttccaaccaacaaatagcacaaccaccaaatataacacatgagagactactgcagtccaatgtgaaaataaatgtgctaattaacataacccaaaccacgtgccccttaaagactcaccttatgcttagaatcatattccaataaactccaccttgagatgaattctatttcgtagcaaatcaagtatcatcaatcatctcccttcaataataacaaataatcgtcaaagttaaaagtcactacgacttcaactgtaatgccaactaagtctaagcgtagctcaaactgagctccagaaacaacctttgttaacataccgataggattatcatgactatatatattgcatactttaacagacgtcggcgcactggtcggagacggtggcggtgaagaacgtcgagcggcggtgaagaacgtcgagacactggtcggagacggcggcggtggacaacgtcgaggccgagcgcaatggtgaaccggcagcggaggcgaagacgtcggcgcggtcgatcggggacgacggtagtgaagagattgcggtggagcactagataaaaaacggaggcgaggcagttaccaacaaattaaatttatagttgaggagactttagtaccggttgtagtaaacaaccggttctaaaacatcttcagtaccgatttatactaacaaccgatactaaatcttactagccgcgaactcgaaaaggtaactttagtatcggctcctcttatcaaccggtactaaagacatcattagaaccggttctaaacacaatcggttctaaatcttaataggtgcgaacaaaggaaagtttggtaccg

SEQ ID NO: 6000 - DNA, 2073 bp, Zea Mays
atgaggttgccaagaaatgccactcctgcgttgttgattttagccctttcaatcgcaggccagggaaggattgctctgacggctgaggataatgctccacttgtccgagtttgtgatagatgcatggctgaggtcactcaaaggcttagcattgctaaggatgttgccaacagatctgcaactgttcaaagtcatgaagatcttgcaagaaaactgaagggaatcgggttggtggatggctcagttgctatgccatgtgttcatagtagttcttatgccgtacaggctgaggtcactcaaaggcttagcattgctaaggatgttgccaacagatctgcaactgttcaaagtcatgaagatcttgcaagaaaactgaaggtaatatactgtttttttcctgtcatatattcatttaagtggctgtgcacttgaattaattgtgcatgcttggtttgaaaccgagttatgaaagtttggtcgcattcattatatttagcatgcactctatttcaaaaatgttaggtgtattgaaattaaaaaaaaacaaacatagtaaagtttgacttgaccatcattcaaaatatatgtatggttagtgcaaaaaaatatgcatcactagatttgtacttccacacataattgataatatattataaaaggaactaatggccaaatacgccttcaaatattttctgaaatgctaatacgccttataaaaaaagatgtgaggagtatttggttcggtgcctggaatgtggcaggatttcatttcttattgatgtgtgctatataatcttttggcaaagcatgaacaaattgtggatgaccaatttcagaacagaattaagttttctacattttgtgagttcttatacagggtaaaagtaggctctaaagcaccaaagaggtcggtacaagcagttactgcggggatgtctgtactgcaccacgatggccggaccggcgctaggtcgccggagtttcgcgtggcagcgtcggtgccgagaaattgtaaaagggagatagacgtggggtgtctgcgcgattgtcagtggcacaaacaaatagtggcaggagctcgggttggtggatggctcaggtaacacaccaaagagggaatcaggttggtggatggctcaggtaacacaccaaagaggtcggtacaagcagttactgtggggatgtctatactgcaccacgatggccggaccggcgctaggtcgccggagtttcgcgtggcagcgtcggtgccgagaaattgtaaaagggagatagacgtggggtgtctgcgcgattgtcagtggcacaaacaaatagtggcaggagctcgggttggttaagttggagcacgagggctttagcgcaaaatggccagtgcggacgcgggctccccagtcgtgggccgactgtgcctggaaatgggccgactaggtcagtttcagccgagattaaggatttttctttattcttttgtctgagagattataagagttaccaaaaatcatagaaacaaccaaaaatcgtgggacaaattttattggatgtataaaatcaagatctctcggataaagttggttctaggatttttagaacagtttacaaattttaagtgatttaagtgtgctctaaaaaggattaattcaattttagtgagcagagtagagcaccaaaaatcatggaaaattttggagaagcttgttatctggatatgagtacttggtaaaagtttggtgctctttggaagccatttgctcaggaaatctagtaaggtccaaatagaaaaaaagataaactcttaataaaaattaaaaagtgaatttagtactttaaagaggagacaagtctattaagtggaatttggtttttggatgaagaaacaagattacctagtagaatctaggttttggtataatttaaggttgttctaatcccttgatagttcaagcttgtatggttcattacatgagaagattaatctctaggtaaatatttgattaagtaatggataagggaacaaaattacttggtgagctatgaacctttggaataggttaagcgtgttctagttccttg

SEQ ID NO: 6001 - DNA, 723 bp, Zea Mays
tgaagatctggccaaaatccgtacttccaccctggatcagtagacttctgtggcttccgagtaggatcgctcttcgggtcgtactcagcagccacagaagatggagctacatttggagaagacattgtgttgtcgctacttgctgcagtcttgacagaaacctgaaaccaggaaacctgaaaccaggggaagcaggggaggaggaacaccattcttgagtcttgacagaaacctgagagaaagcaggggaggaggacctaccagggaagacctgccgccgtgcagggaggggcgcgcccagggaacagcagccacgcgcagggagcagcagccgtgcgcagggagcagggaggagccgcgcgcacaaggagcagcagccgcgcgcacagggaggagcagccggcgcacagtgaggggctgctgcgcgcgcacagggaggggctgccgcgcgtgcacaggaggccgcgtccaggaaggtggcgccgccgccgcaagtgccgtccagggaaggtgtgccctaatcaatttctctatttccttatctattcccctctgcttcctactttccttacctattcccgcgccaaaacgtgcgccaatttgggctctgcgcacgcgcggcgactacggccaacaaccccaaggtcaggcgtcacccaggggaagaaggcgtcgcccagtcgcctacctcgctaaggcggacgccatgctcgttcttacctg

SEQ ID NO: 6002 - DNA, 756 bp, Zea Mays
gtactcactgcacagtcttgagttcttgacacttgacagaaacctgaaaccaggggaagcaggggaggaggaacaccattcttgagtcttgacagaaacctgagagaaagcaggggaggaggacctaccagggaagacctgccgccgtgcagggaggggcgcgcccagggaacagcagccacgcgcagggagcagcagccgtgcgcagggagcagggaggagccgcgcgcacaaggagcagcagccgcgcgcacagggaggagcagccggcgcacagtgaggggctgctgcgcgcgcacagggaggggctgccgcgcgtgcacaggaggccgcgtccaggaaggtggcgccgccgccgcaagtgccgtccagggaagttttttcagagacaaatcctccggatccagaaagcattttggacaggcgtttggtgagaaaaggttcagctgctgttactcaaatcctgatcaagtgggcaggtcttcctacggagatggctacctgggaggattacaatgtgctacgaaccaagtttcccgcttctaccatctggggaccagctggttcttcaggaggggcactgtcatggcgtcgccggcacaggagaactaacaggaagggagccgccaggcgggattgttctgagactgatcttgtttgattgttgggccggatttgggccttgtaattggcgtataggccatatacataaatactgtagcaacctggtcaagaaataacagaacaacaaatccc

SEQ ID NO: 6003 - DNA, 1494 bp, Zea Mays
gattcatttccgaacaagacgcggccaagaagcaccaccatcttgatgtcaacaccttgagggggcatactgactccgtcactgcacttgccttctccaatgacgcctgcaacctagttaccgtatgtgctgatggagccatcagggtattcaggatcgatgatacctctagcaagagcttcaagattcttaggataaacttgccagctggagcgcaccctacggctgttactttctcagaggggtcatcatctgttgttgtggcggcgcaggcgcttctgggatcatctctttatatgtatgcggatgttagcgctcctccaaccgcggaaaacaaactgcagggaaagctttctccacctgaaatcaagtggagtcaccccaagatacatggcaaggagtctgtgctcaaccttgcagcggcccgtgcaactcatgggtctggtgatgggagcactattatcatttcatgctcagaagcaactgatatcaaagtttggcatgggaagagtgggaaggagtttggtacagttgacaccaatcagttaaaaaataatatggctgacatatccccaaatggtcgcttcatagctgctgcggcttttactgctgatgtcaaggtgtgggagatagtttactcgaaggatggttcagtgaaggaggttaataaagttatgcaactcaagggtcataagagtgctgttacttgcttgtgctttgctcccaattctgagcaaattattactgcatccaaagatggttccattcgagtatggaacattaatgtaagataccaccttgatgaggatccaaaaaccttgagagttatgccaattccacttcatgactctaaaggttctgtttgccagtatgatcacatgacagtctctcctgatggtaaaattctggctgtaacaagtggatcaacgttgcaatggttacttgtggaaactggtgcagttttggatacagctgacaaagcacatgaaggtgatataactggcattgcttgggctccacggacaattcccaatggtggcgtgcatgtttttattttggcgactgctggtgtggacaaaaaggtgaaactttggacagctccagatgttggttcaacatgagtggtcgaggattgaatctgcataagacagctttgccaagggcacagaattgaagttttgttgcgtagagtttgagaggaggaagggaagggaggcctggctgttactgatgagaccccaatgcatcacgcaggcggcagccttggggctgtagtttcgctaccttttatacaataaactgaatgttgtctgcatttgtatttttttttctttccttcctttttactgttggaatgatctggctgtgtgatcaacataatttaagctgctgctgcttggaatagacgtcattttatttgtcaagcaaatgtgctgctttgcgcattgtttgacattatattgtttgataaagtgtgctaagtatgaaaatgcc

SEQ ID NO: 6004 - DNA, 760 bp, Zea Mays
gaaaatctgctgcgagcaagatgaaggcggcgcctgctatctgccttcgctgtaagataccaccttgatgaggatccaaaaaccttgagagttatgccaattccacttcatgactctaaaggttctgtttgccagtatgatcacatgacagtctctcctgatggtaaaattctggctgtaacaagtggatcaacgttgcaatggttacttgtggaaactggtgcagttttggatacagctgacaaagcacatgaaggtgatataactggcattgcttgggctccacggacaattcccaatggtggcgtgcatgtttttattttggcgactgctggtgtggacaaaaaggtgaaactttggacagctccagatgttggttcaacatgagtggtcgaggattgaatctgcataagacagctttgccaagggcacagaattgaagttttgttgcgtagagtttgagaggaggaagggaagggaggcctggctgttactgatgagaccccaatgcatcacgcaggcggcagccttggggctgtagtttcgctaccttttatacaataaactgaatgttgtctgcatttgtatttttttttctttccttcctttttactgttggaatgatctggctgtgtgatcaacataatttaagctgctgctgcttggaatagacgtcattttatttgtcaagcaaatgtgctgctttgcgcattgtttgacattatattgtttgataaagtgtgctaagtatgaaaatgcc

SEQ ID NO: 6005 - DNA, 307 bp, Zea Mays
atgacaaaaatagttttttctcctcgtcactctaacgtgcctgttccatgcctagtaaaattgtttttcactagaaagtattattacatggtgaaagaaccctatggtgccgctgcagcagctgctgctggagccttcttgggcttctccacaacgattgcttgggtagtcagcaccattccagccacggaggcagcgttctgcagggcgcacctagtcactttggcagggtcgatcacaccagcctccaccaggttctcgtgcttgtccgccatggcgttgtaaccgaactcccactcgctttccc

SEQ ID NO: 6006 - DNA, 2630 bp, Zea Mays
  misc_feature (1)..(1): n is a, c, g, or t
ntgccgccatccatcctttttcccttcctcccctcaccccctcgtcggaatcggaacggctgtcgtctgccccttcgcccccctcttcgatccctcaccccacccagtgctagctagctagctagcttctagtggctagtagctcccctcccctgtgggctgcaacctggtttgggttcgcggatcgatcgcgagatcaatcaatccatggcgcggaccaactgggtggccgataagatgctcgacgtctacatctatgactacctggtgaagcgcaacctgcaggccaccgccaaggccttcatcgccgagggcaaggtcgccaccgaccccgtcgccatcgacgcccccggcggcttcctcttcgagtggtggtccatcttctgggacatcttccattcgtccaccgccaaagcctcatccacatccactgccgccgccttcatcgaccacaccgccaagcaacagcagccaatcggcgccgggaccggggcgcctcctcctcatccccttcacgattccagagagcaccagatgaggctccagcagctgctgcaccaacacaacccccacctccacactacaagagatgcttctcctcccgcctctatcaatgccctcaactccgatgtctccgctgtcctcgcgtccaaaatgatgcaagaccgagtcaggaaccccaaccctattgactccgacgcctcacagcatctcctagacgcaaacaggatcgcgcttctaaagtcaccaccacctagccacactgggcctatgcctatgcagcagcagcttcatccaaggaaccagcaacttgacatcaagcccgatgttggtatgccacagagaacgatgcctgcagacccttcttccatgtatgcatcagggatgatgcacccaaaacctgcattacttgccactggactaaatcaaggtggtgttgggagtgtgccacttaaaggttggcctttaacggtcccaggtattgaccaactccggtccaatttaggtgtgcagaagcaattggtgccatcttcaaaccagttccaacttttatcgccacaacaacagttgcttgctcaggcacaaacacagaatgaccttaccagaatgggttctccagcaccatctgcttcgccgaatgttcgaccagatgacccggattatttgatgaagttgaagatggcccagatgcagcagtcctcaggccacaggcctatggaattgcaacagccgcatcagcagaacactagaaagcggaagccaacttcttccggagcagctaatagttctggcacaggaaatactgtcgggccttctcctccgtcaactccatccactcatacccctggtggtggagtaccagtggctagcaatgttaatattttacagaagagttcaatgatttgtggtgtggatgcaactggtggacttgcctcatcctcaaaccagatggatgctttggatagttttgttgattttgatgaaaacgtcgactcttttttgtcgaatgatgatgtagacggaagaggcatgtttgcagcacttgaaaaagggtcttcagagcacaatacagagtccttaaagggtctctctttgagtgaagttggtaacaaccgtacaagtaacaacaaagttgtttgctgtcacttctcttcagatgggaagttactcgctagtgccggccatgagaagaaggtcttcctctggaatatggacaattttaagatggataccaaaatagaagaccatacaaactttatcacagacataagattcagaactaattcaactcagttggctacatcatcttctgacggaactgttcgactttggaatgctgctgatgaaagtggcgctttacaaacttttcatgggcataggtctcatgtaacatcagtagattttcacccaagattgacagaggttctttgctcttgcgacgacaatggagaaattctcttctggacagttggtcagactacatctactcatgttttgcgggtgaagcagggtggaactggaagagtcaggtttgaacctcgaagtgggcagctcctcgctgtggcagctggaagcatggtgaacatttttgatgttgaaaagcaatccagcttaccctgccctccaaagggtcacaatagtgaggtaaactttgtgtcctgggatgaaaatggtgaatatctggcatctgtaagtcaggacactgtgaaagtgtggtcggtatcgtctggtgtgtgcattcatgagttacgatccaatggaaaccaatatcagtcatgcacattccatcctagatacccgaaagtgttgattgttggtggttatcagactctggagctgtggagcttatcagataaccagagaatcccaatccaggcgcacgaagggttgatagctgcactggcgcactccccgttcactggaatgattgcctctgccagtcatgacagatgtgtaaagctctggaagtagctatatatagaggcggagacgtgagatggatatacttttcaagggtgattggaccctgtgaggtggatggatgtagggtcggttgtacatgatatattgttgagctgatgattgggctgtatctgcgcctataccattatataacccaccggtttaaa

SEQ ID NO: 6007 - DNA, 1178 bp, Zea Mays
tgccgccatccatcctttttcccttcctcccctcaccccctcgtcggaatcggaacggctgtcgtctgccccttcgcccccctcttcgatccctcaccccacccagtgctagctagctagctagcttctagtggctagtagctcccctcccctgtgggctgcaacctggtttgggttcgcggatcgatcgcgagatcaatcaatccatggcgcggaccaactgggtggccgataagatgctcgacgtctacatctatgactacctggtgaagcgcaacctgcaggccaccgccaaggccttcatcgccgagggcaaggtcgccaccgaccccgtcgccatcgacgcccccggcggcttcctcttcgagtggtggtccatcttctgggacatcttccattcgtccaccgccaaagcctcatccacatccactgccgccgccttcatcgaccacaccgccaagcaacagcagccaatcggcgccgggaccggggcgcctcctcctcatccccttcacgatagagcaccagatgaggctccagcagctgctgcaccaacacaacccccacctccacactacaagagatgcttctcctcccgcctctatcaatgccctcaactccgatgtctccgctgtcctcgcgtccaaaatgatgcaagaccgagtcaggaaccccaaccctattgactccgacgcctcacagcatctcctagacgcaaacaggatcgcgcttctaaagtcaccaccacctagccacactgggcctatgcctatgcagcagcagcttcatccaaggaaccagcaacttgacatcaagcccgatgttggtatgccacagagaacgatgcctgcagacccttcttccatgtatgcatcagggatgatgcacccaaaacctgcattacttgccactggactaaatcaaggtggtgttgggagtgtgccacttaaaggttggcctttaacggtcccaggtattgaccaactccggtccaatttaggtgtgcagaagcaattggtgccatcttcaaaccagttccaacttttatcgccacaacaacagttgcttgctcaggcacaaacacagaatgaccttaccagaatgggttctccagcaccatctgcttcgccgaatgttcgaccagatgacccggattatttgatgaagtactgtattag

SEQ ID NO: 6008 - DNA, 2667 bp, Zea Mays
tgccgccatccatcctttttcccttcctcccctcaccccctcgtcggaatcggaacggctgtcgtctgccccttcgcccccctcttcgatccctcaccccacccagtgctagctagctagctagcttctagtggctagtagctcccctcccctgtgggctgcaacctggtttgggttcgcggatcgatcgcgagatcaatcaatccatggcgcggaccaactgggtggccgataagatgctcgacgtctacatctatgactacctggtgaagcgcaacctgcaggccaccgccaaggccttcatcgccgagggcaaggtcgccaccgaccccgtcgccatcgacgcccccggcggcttcctcttcgagtggtggtccatcttctgggacatcttccattcgtccaccgccaaagcctcatccacatccactgccgccgccttcatcgaccacaccgccaagcaacagcagccaatcggcgccgggaccggggcgcctcctcctcatccccttcacgattccagagagcaccagatgaggctccagcagctgctgcaccaacacaacccccacctccacactacaagagatgcttctcctcccgcctctatcaatgccctcaactccgatgtctccgctgtcctcgcgtccaaaatgatgcaagaccgagtcaggaaccccaaccctattgactccgacgcctcacagcatctcctagacgcaaacaggatcgcgcttctaaagtcaccaccacctagccacactgggcctatgcctatgcagcagcagcttcatccaaggaaccagcaacttgacatcaagcccgatgttggtatgccacagagaacgatgcctgcagacccttcttccatgtatgcatcagggatgatgcacccaaaacctgcattacttgccactggactaaatcaaggtggtgttgggagtgtgccacttaaaggttggcctttaacggtcccaggtattgaccaactccggtccaatttaggtgtgcagaagcaattggtgccatcttcaaaccagttccaacttttatcgccacaacaacagttgcttgctcaggcacaaacacagaatgaccttaccagaatgggttctccagcaccatctgcttcgccgaatgttcgaccagatgacccggattatttgatgaagttgaagatggcccagatgcagcagtcctcaggccacaggcctatggaattgcaacagccgcatcagcagaacactagaaagcggaagccaacttcttccggagcagctaatagttctggcacaggaaatactgtcgggccttctcctccgtcaactccatccactcatacccctggtggtggagtaccagtggctagcaatgttaatattttacagaagagttcaatgatttgtggtgtggatgcaactggtggacttgcctcatcctcaaaccagatgacggaagaggcatgtttgcagcacttgaaaaagggtcttcagagcacaatacagagtccttaaagggtctctctttgagtgaagttggtaacaaccgtacaagtaacaacaaagttgtttgctgtcacttctcttcagatgggaagttactcgctagtgccggccatgagaagaaggtcttcctctggaatatggacaattttaagatggataccaaaatagaagaccatacaaactttatcacagacataagattcagaactaattcaactcagttggctacatcatcttctgacggaactgttcgactttggaatgctgctgatgaaagtggcgctttacaaacttttcatgggcataggtctcatgtaacatcagtagattttcacccaagattgacagaggttctttgctcttgcgacgacaatggagaaattctcttctggacagttggtcagactacatctactcatgttttgcgggtgaagcagggtggaactggaagagtcaggtttgaacctcgaagtgggcagctcctcgctgtggcagctggaagcatggtgaacatttttgatgttgaaaagcaatccagcttaccctgccctccaaagggtcacaatagtgaggtaaactttgtgtcctgggatgaaaatggtgaatatctggcatctgtaagtcaggacactgtgaaagtgtggtcggtatcgtctggtgtgtgcattcatgagttacgatccaatggaaaccaatatcagtcatgcacattccatcctagatacccgaaagtgttgattgttggtggttatcagactctggagctgtggagcttatcagataaccagagaatcccaatccaggcgcacgaagggttgatagctgcactggcgcactccccgttcactggaatgattgcctctgccagtcatgacagatgtgtaaagctctggaagtagctatatatagaggtgatggaatagtcctaatcctaattatatatgccattattaacttatatgtagcgtttgtttcattccttggttaataacttatataatataatatatacataggcggagacgtgagatggatatacttttcaagggtgattggaccctgtgaggtggatggatgtagggtcggttgtacatgatatattgttgagctgatgattgggctgtatctgcgcctataccattatataacccaccggtttaaa

SEQ ID NO: 6009 - DNA, 2622 bp, Zea Mays
tgccgccatccatcctttttcccttcctcccctcaccccctcgtcggaatcggaacggctgtcgtctgccccttcgcccccctcttcgatccctcaccccacccagtgctagctagctagctagcttctagtggctagtagctcccctcccctgtgggctgcaacctggtttgggttcgcggatcgatcgcgagatcaatcaatccatggcgcggaccaactgggtggccgataagatgctcgacgtctacatctatgactacctggtgaagcgcaacctgcaggccaccgccaaggccttcatcgccgagggcaaggtcgccaccgaccccgtcgccatcgacgcccccggcggcttcctcttcgagtggtggtccatcttctgggacatcttccattcgtccaccgccaaagcctcatccacatccactgccgccgccttcatcgaccacaccgccaagcaacagcagccaatcggcgccgggaccggggcgcctcctcctcatccccttcacgattccagagagcaccagatgaggctccagcagctgctgcaccaacacaacccccacctccacactacaagagatgcttctcctcccgcctctatcaatgccctcaactccgatgtctccgctgtcctcgcgtccaaaatgatgcaagaccgagtcaggaaccccaaccctattgactccgacgcctcacagcatctcctagacgcaaacaggatcgcgcttctaaagtcaccaccacctagccacactgggcctatgcctatgcagcagcagcttcatccaaggaaccagcaacttgacatcaagcccgatgttggtatgccacagagaacgatgcctgcagacccttcttccatgtatgcatcagggatgatgcacccaaaacctgcattacttgccactggactaaatcaaggtggtgttgggagtgtgccacttaaaggttggcctttaacggtattgaccaactccggtccaatttaggtgtgcagaagcaattggtgccatcttcaaaccagttccaacttttatcgccacaacaacagttgcttgctcaggcacaaacacagaatgaccttaccagaatgggttctccagcaccatctgcttcgccgaatgttcgaccagatgacccggattatttgatgaagttgaagatggcccagatgcagcagtcctcaggccacaggcctatggaattgcaacagccgcatcagcagaacactagaaagcggaagccaacttcttccggagcagctaatagttctggcacaggaaatactgtcgggccttctcctccgtcaactccatccactcatacccctggtggtggagtaccagtggctagcaatgttaatattttacagaagagttcaatgatttgtggtgtggatgcaactggtggacttgcctcatcctcaaaccagatggatgctttggatagttttgttgattttgatgaaaacgtcgactcttttttgtcgaatgatgatgtagacggaagaggcatgtttgcagcacttgaaaaagggtcttcagagcacaatacagagtccttaaagggtctctctttgagtgaagttggtaacaaccgtacaagtaacaacaaagttgtttgctgtcacttctcttcagatgggaagttactcgctagtgccggccatgagaagaaggtcttcctctggaatatggacaattttaagatggataccaaaatagaagaccatacaaactttatcacagacataagattcagaactaattcaactcagttggctacatcatcttctgacggaactgttcgactttggaatgctgctgatgaaagtggcgctttacaaacttttcatgggcataggtctcatgtaacatcagtagattttcacccaagattgacagaggttctttgctcttgcgacgacaatggagaaattctcttctggacagttggtcagactacatctactcatgttttgcgggtgaagcagggtggaactggaagagtcaggtttgaacctcgaagtgggcagctcctcgctgtggcagctggaagcatggtgaacatttttgatgttgaaaagcaatccagcttaccctgccctccaaagggtcacaatagtgaggtaaactttgtgtcctgggatgaaaatggtgaatatctggcatctgtaagtcaggacactgtgaaagtgtggtcggtatcgtctggtgtgtgcattcatgagttacgatccaatggaaaccaatatcagtcatgcacattccatcctagatacccgaaagtgttgattgttggtggttatcagactctggagctgtggagcttatcagataaccagagaatcccaatccaggcgcacgaagggttgatagctgcactggcgcactccccgttcactggaatgattgcctctgccagtcatgacagatgtgtaaagctctggaagtagctatatatagaggcggagacgtgagatggatatacttttcaagggtgattggaccctgtgaggtggatggatgtagggtcggttgtacatgatatattgttgagctgatgattgggctgtatctgcgcctataccattatataacccaccggtttaaa

SEQ ID NO: 6010 - DNA, 2536 bp, Zea Mays
tgccgccatccatcctttttcccttcctcccctcaccccctcgtcggaatcggaacggctgtcgtctgccccttcgcccccctcttcgatccctcaccccacccagtgctagctagctagctagcttctagtggctagtagctcccctcccctgtgggctgcaacctggtttgggttcgcggatcgatcgcgagatcaatcaatccatggcgcggaccaactgggtggccgataagatgctcgacgtctacatctatgactacctggtgaagcgcaacctgcaggccaccgccaaggccttcatcgccgagggcaaggtcgccaccgaccccgtcgccatcgacgcccccggcggcttcctcttcgagtggtggtccatcttctgggacatcttccattcgtccaccgccaaagcctcatccacatccactgccgccgccttcatcgaccacaccgccaagcaacagcagccaatcggcgccgggaccggggcgcctcctcctcatccccttcacgattccagagagcaccagatgaggctccagcagctgctgcaccaacacaacccccacctccacactacaagagatgcttctcctcccgcctctatcaatgccctcaactccgatgtctccgctgtcctcgcgtccaaaatgatgcaagaccgagtcaggaaccccaaccctattgactccgacgcctcacagcatctcctagacgcaaacaggatcgcgcttctaaagtcaccaccacctagccacactgggcctatgcctatgcagcagcagcttcatccaaggaaccagcaacttgacatcaagcccgatgttggtatgccacagagaacgatgcctgcagacccttcttccatgtatgcatcagggatgatgcacccaaaacctgcattacttgccactggactaaatcaaggtggtgttgggagtgtgccacttaaaggttggcctttaacggtcccaggtattgaccaactccggtccaatttaggtgtgcagaagcaattggtgccatcttcaaaccagttccaacttttatcgccacaacaacagttgcttgctcaggcacaaacacagaatgaccttaccagaatgggttctccagcaccatctgcttcgccgaatgttcgaccagatgacccggattatttgatgaagttgaagatggcccagatgcagcagtcctcaggccacaggcctatggaattgcaacagccgcatcagcagaacactagaaagcggaagccaacttcttccggagcagctaatagttctggcacaggaaatactgtcgggccttctcctccgtcaactccatccactcatacccctggtggtggagtaccagtggctagcaatgttaatattttacagaagagttcaatgatttgtggtgtggatgcaactggtggacttgcctcatcctcaaaccagatggatgctttggatagttttgttgattttgatgaaaacgtcgactcttttttgtcgaatgatgatgtagacggaagaggcatgtttgcagcacttgaaaaagggtcttcagagcacaatacagagtccttaaagggtctctctttgagtgaagttggtaacaaccgtacaagtaacaacaaagttgtttgctgtcacttctcttcagatgggaagttactcgctagtgccggccatgagaagaaggtcttcctctggaatatggacaattttaagatggataccaaaatagaagaccatacaaactttatcacagacataagattcagaactaattcaactcagttggctacatcatcttctgacggaactgttcgactttggaatgctgctgatgaaagtggcgctttacaaacttttcatgggcataggtctcatgtaacatcagtagattttcacccaagattgacagaggttctttgctcttgcgacgacaatggagaaattctcttctggacagttggtcagactacatctactcatgttttgcgggtgaagcagggtggaactggaagagtcaggtttgaacctcgaagtgggcagctcctcgctgtggcagctggaagcatggtgaacatttttgatgttgaaaagcaatccagcttaccctgccctccaaagactctggagctgtggagcttatcagataaccagagaatcccaatccaggcgcacgaagggttgatagctgcactggcgcactccccgttcactggaatgattgcctctgccagtcatgacagatgtgtaaagctctggaagtagctatatatagaggtgatggaatagtcctaatcctaattatatatgccattattaacttatatgtagcgtttgtttcattccttggttaataacttatataatataatatatacataggcggagacgtgagatggatatacttttcaagggtgattggaccctgtgaggtggatggatgtagggtcggttgtacatgatatattgttgagctgatgattgggctgtatctgcgcctataccattatataacccaccggtttaaa

SEQ ID NO: 6011 - DNA, 2334 bp, Zea Mays
tgccgccatccatcctttttcccttcctcccctcaccccctcgtcggaatcggaacggctgtcgtctgccccttcgcccccctcttcgatccctcaccccacccagtgctagctagctagctagcttctagtggctagtagctcccctcccctgtgggctgcaacctggtttgggttcgcggatcgatcgcgagatcaatcaatccatggcgcggaccaactgggtggccgataagatgctcgacgtctacatctatgactacctggtgaagcgcaacctgcaggccaccgccaaggccttcatcgccgagggcaaggtcgccaccgaccccgtcgccatcgacgcccccggcggcttcctcttcgagtggtggtccatcttctgggacatcttccattcgtccaccgccaaagcctcatccacatccactgccgccgccttcatcgaccacaccgccaagcaacagcagccaatcggcgccgggaccggggcgcctcctcctcatccccttcacgatgactaaatcaaggtggtgttgggagtgtgccacttaaaggttggcctttaacggtcccaggtattgaccaactccggtccaatttaggtgtgcagaagcaattggtgccatcttcaaaccagttccaacttttatcgccacaacaacagttgcttgctcaggcacaaacacagaatgaccttaccagaatgggttctccagcaccatctgcttcgccgaatgttcgaccagatgacccggattatttgatgaagttgaagatggcccagatgcagcagtcctcaggccacaggcctatggaattgcaacagccgcatcagcagaacactagaaagcggaagccaacttcttccggagcagctaatagttctggcacaggaaatactgtcgggccttctcctccgtcaactccatccactcatacccctggtggtggagtaccagtggctagcaatgttaatattttacagaagagttcaatgatttgtggtgtggatgcaactggtggacttgcctcatcctcaaaccagatggatgctttggatagttttgttgattttgatgaaaacgtcgactcttttttgtcgaatgatgatgtagacggaagaggcatgtttgcagcacttgaaaaagggtcttcagagcacaatacagagtccttaaagggtctctctttgagtgaagttggtaacaaccgtacaagtaacaacaaagttgtttgctgtcacttctcttcagatgggaagttactcgctagtgccggccatgagaagaaggtcttcctctggaatatggacaattttaagatggataccaaaatagaagaccatacaaactttatcacagacataagattcagaactaattcaactcagttggctacatcatcttctgacggaactgttcgactttggaatgctgctgatgaaagtggcgctttacaaacttttcatgggcataggtctcatgtaacatcagtagattttcacccaagattgacagaggttctttgctcttgcgacgacaatggagaaattctcttctggacagttggtcagactacatctactcatgttttgcgggtgaagcagggtggaactggaagagtcaggtttgaacctcgaagtgggcagctcctcgctgtggcagctggaagcatggtgaacatttttgatgttgaaaagcaatccagcttaccctgccctccaaagggtcacaatagtgaggtaaactttgtgtcctgggatgaaaatggtgaatatctggcatctgtaagtcaggacactgtgaaagtgtggtcggtatcgtctggtgtgtgcattcatgagttacgatccaatggaaaccaatatcagtcatgcacattccatcctagatacccgaaagtgttgattgttggtggttatcagactctggagctgtggagcttatcagataaccagagaatcccaatccaggcgcacgaagggttgatagctgcactggcgcactccccgttcactggaatgattgcctctgccagtcatgacagatgtgtaaagctctggaagtagctatatatagaggtgatggaatagtcctaatcctaattatatatgccattattaacttatatgtagcgtttgtttcattccttggttaataacttatataatataatatatacataggcggagacgtgagatggatatacttttcaagggtgattggaccctgtgaggtggatggatgtagggtcggttgtacatgatatattgttgagctgatgattgggctgtatctgcgcctataccattatataacccaccggtttaaa

SEQ ID NO: 6012 - DNA, 2723 bp, Zea Mays
tgccgccatccatcctttttcccttcctcccctcaccccctcgtcggaatcggaacggctgtcgtctgccccttcgcccccctcttcgatccctcaccccacccagtgctagctagctagctagcttctagtggctagtagctcccctcccctgtgggctgcaacctggtttgggttcgcggatcgatcgcgagatcaatcaatccatggcgcggaccaactgggtggccgataagatgctcgacgtctacatctatgactacctggtgaagcgcaacctgcaggccaccgccaaggccttcatcgccgagggcaaggtcgccaccgaccccgtcgccatcgacgcccccggcggcttcctcttcgagtggtggtccatcttctgggacatcttccattcgtccaccgccaaagcctcatccacatccactgccgccgccttcatcgaccacaccgccaagcaacagcagccaatcggcgccgggaccggggcgcctcctcctcatccccttcacgattccagagagcaccagatgaggctccagcagctgctgcaccaacacaacccccacctccacactacaagagatgcttctcctcccgcctctatcaatgccctcaactccgatgtctccgctgtcctcgcgtccaaaatgatgcaagaccgagtcaggaaccccaaccctattgactccgacgcctcacagcatctcctagacgcaaacaggatcgcgcttctaaagtcaccaccacctagccacactgggcctatgcctatgcagcagcagcttcatccaaggaaccagcaacttgacatcaagcccgatgttggtatgccacagagaacgatgcctgcagacccttcttccatgtatgcatcagggatgatgcacccaaaacctgcattacttgccactggactaaatcaaggtggtgttgggagtgtgccacttaaaggttggcctttaacggtcccaggtattgaccaactccggtccaatttaggtgtgcagaagcaattggtgccatcttcaaaccagttccaacttttatcgccacaacaacagttgcttgctcaggcacaaacacagaatgaccttaccagaatgggttctccagcaccatctgcttcgccgaatgttcgaccagatgacccggattatttgatgaagttgaagatggcccagatgcagcagtcctcaggccacaggcctatggaattgcaacagccgcatcagcagaacactagaaagcggaagccaacttcttccggagcagctaatagttctggcacaggaaatactgtcgggccttctcctccgtcaactccatccactcatacccctggtggtggagtaccagtggctagcaatgttaatattttacagaagagttcaatgatttgtggtgtggatgcaactggtggacttgcctcatcctcaaaccagatggatgctttggatagttttgttgattttgatgaaaacgtcgactcttttttgtcgaatgatgatgtagacggaagaggcatgtttgcagcacttgaaaaagggtcttcagagcacaatacagagtccttaaagggtctctctttgagtgaagttggtaacaaccgtacaagtaacaacaaagttgtttgctgtcacttctcttcagatgggaagttactcgctagtgccggccatgagaagaaggtcttcctctggaatatggacaattttaagatggataccaaaatagaagaccatacaaactttatcacagacataagattcagaactaattcaactcagttggctacatcatcttctgacggaactgttcgactttggaatgctgctgatgaaagtggcgctttacaaacttttcatgggcataggtctcatgtaacatcagtagattttcacccaagattgacagaggttctttgctcttgcgacgacaatggagaaattctcttctggacagttggtcagactacatctactcatgttttgcgggtgaagcagggtggaactggaagagtcaggtttgaacctcgaagtgggcagctcctcgctgtggcagctggaagcatggtgaacatttttgatgttgaaaagcaatccagcttaccctgccctccaaagtgaggtaaactttgtgtcctgggatgaaaatggtgaatatctggcatctgtaagtcaggacactgtgaaagtgtggtcggtatcgtctggtgtgtgcattcatgagttacgatccaatggaaaccaatatcagtcatgcacattccatcctagatacccgaaagtgttgattgttggtggttatcagactctggagctgtggagcttatcagataaccagagaatcccaatccaggcgcacgaagggttgatagctgcactggcgcactccccgttcactggaatgattgcctctgccagtcatgacagatgtgtaaagctctggaagtagctatatatagaggtgatggaatagtcctaatcctaattatatatgccattattaacttatatgtagcgtttgtttcattccttggttaataacttatataatataatatatacataggcggagacgtgagatggatatacttttcaagggtgattggaccctgtgaggtggatggatgtagggtcggttgtacatgatatattgttgagctgatgattgggctgtatctgcgcctataccattatataacccaccggtttaaa

SEQ ID NO: 6013 - DNA, 2729 bp, Zea Mays
tgccgccatccatcctttttcccttcctcccctcaccccctcgtcggaatcggaacggctgtcgtctgccccttcgcccccctcttcgatccctcaccccacccagtgctagctagctagctagcttctagtggctagtagctcccctcccctgtgggctgcaacctggtttgggttcgcggatcgatcgcgagatcaatcaatccatggcgcggaccaactgggtggccgataagatgctcgacgtctacatctatgactacctggtgaagcgcaacctgcaggccaccgccaaggccttcatcgccgagggcaaggtcgccaccgaccccgtcgccatcgacgcccccggcggcttcctcttcgagtggtggtccatcttctgggacatcttccattcgtccaccgccaaagcctcatccacatccactgccgccgccttcatcgaccacaccgccaagcaacagcagccaatcggcgccgggaccggggcgcctcctcctcatccccttcacgatagagcaccagatgaggctccagcagctgctgcaccaacacaacccccacctccacactacaagagatgcttctcctcccgcctctatcaatgccctcaactccgatgtctccgctgtcctcgcgtccaaaatgatgcaagaccgagtcaggaaccccaaccctattgactccgacgcctcacagcatctcctagacgcaaacaggatcgcgcttctaaagtcaccaccacctagccacactgggcctatgcctatgcagcagcagcttcatccaaggaaccagcaacttgacatcaagcccgatgttggtatgccacagagaacgatgcctgcagacccttcttccatgtatgcatcagggatgatgcacccaaaacctgcattacttgccactggactaaatcaaggtggtgttgggagtgtgccacttaaaggttggcctttaacggtcccaggtattgaccaactccggtccaatttaggtgtgcagaagcaattggtgccatcttcaaaccagttccaacttttatcgccacaacaacagttgcttgctcaggcacaaacacagaatgaccttaccagaatgggttctccagcaccatctgcttcgccgaatgttcgaccagatgacccggattatttgatgaagttgaagatggcccagatgcagcagtcctcaggccacaggcctatggaattgcaacagccgcatcagcagaacactagaaagcggaagccaacttcttccggagcagctaatagttctggcacaggaaatactgtcgggccttctcctccgtcaactccatccactcatacccctggtggtggagtaccagtggctagcaatgttaatattttacagaagagttcaatgatttgtggtgtggatgcaactggtggacttgcctcatcctcaaaccagatggatgctttggatagttttgttgattttgatgaaaacgtcgactcttttttgtcgaatgatgatgtagacggaagaggcatgtttgcagcacttgaaaaagggtcttcagagcacaatacagagtccttaaagggtctctctttgagtgaagttggtaacaaccgtacaagtaacaacaaagttgtttgctgtcacttctcttcagatgggaagttactcgctagtgccggccatgagaagaaggtcttcctctggaatatggacaattttaagatggataccaaaatagaagaccatacaaactttatcacagacataagattcagaactaattcaactcagttggctacatcatcttctgacggaactgttcgactttggaatgctgctgatgaaagtggcgctttacaaacttttcatgggcataggtctcatgtaacatcagtagattttcacccaagattgacagaggttctttgctcttgcgacgacaatggagaaattctcttctggacagttggtcagactacatctactcatgttttgcgggtgaagcagggtggaactggaagagtcaggtttgaacctcgaagtgggcagctcctcgctgtggcagctggaagcatggtgaacatttttgatgttgaaaagcaatccagcttaccctgccctccaaagggtcacaatagtgaggtaaactttgtgtcctgggatgaaaatggtgaatatctggcatctgtaagtcaggacactgtgaaagtgtggtcggtatcgtctggtgtgtgcattcatgagttacgatccaatggaaaccaatatcagtcatgcacattccatcctagatacccgaaagtgttgattgttggtggttatcagactctggagctgtggagcttatcagataaccagagaatcccaatccaggcgcacgaagggttgatagctgcactggcgcactccccgttcactggaatgattgcctctgccagtcatgacagatgtgtaaagctctggaagtagctatatatagaggtgatggaatagtcctaatcctaattatatatgccattattaacttatatgtagcgtttgtttcattccttggttaataacttatataatataatatatacataggcggagacgtgagatggatatacttttcaagggtgattggaccctgtgaggtggatggatgtagggtcggttgtacatgatatattgttgagctgatgattgggctgtatctgcgcctataccattatataacccaccggtttaaa

SEQ ID NO: 6014 - DNA, 1702 bp, Zea Mays
ctgagtagaagatgcaaaatgcaggggactaaatcaaggtggtgttgggagtgtgccacttaaaggttggcctttaacggtcccaggtattgaccaactccggtccaatttaggtgtgcagaagcaattggtgccatcttcaaaccagttccaacttttatcgccacaacaacagttgcttgctcaggcacaaacacagaatgaccttaccagaatgggttctccagcaccatctgcttcgccgaatgttcgaccagatgacccggattatttgatgaagttgaagatggcccagatgcagcagtcctcaggccacaggcctatggaattgcaacagccgcatcagcagaacactagaaagcggaagccaacttcttccggagcagctaatagttctggcacaggaaatactgtcgggccttctcctccgtcaactccatccactcatacccctggtggtggagtaccagtggctagcaatgttaatattttacagaagagttcaatgatttgtggtgtggatgcaactggtggacttgcctcatcctcaaaccagatggatgctttggatagttttgttgattttgatgaaaacgtcgactcttttttgtcgaatgatgatgtagacggaagaggcatgtttgcagcacttgaaaaagggtcttcagagcacaatacagagtccttaaagggtctctctttgagtgaagttggtaacaaccgtacaagtaacaacaaagttgtttgctgtcacttctcttcagatgggaagttactcgctagtgccggccatgagaagaaggtcttcctctggaatatggacaattttaagatggataccaaaatagaagaccatacaaactttatcacagacataagattcagaactaattcaactcagttggctacatcatcttctgacggaactgttcgactttggaatgctgctgatgaaagtggcgctttacaaacttttcatgggcataggtctcatgtaacatcagtagattttcacccaagattgacagaggttctttgctcttgcgacgacaatggagaaattctcttctggacagttggtcagactacatctactcatgttttgcgggtgaagcagggtggaactggaagagtcaggtttgaacctcgaagtgggcagctcctcgctgtggcagctggaagcatggtgaacatttttgatgttgaaaagcaatccagcttaccctgccctccaaagggtcacaatagtgaggtaaactttgtgtcctgggatgaaaatggtgaatatctggcatctgtaagtcaggacactgtgaaagtgtggtcggtatcgtctggtgtgtgcattcatgagttacgatccaatggaaaccaatatcagtcatgcacattccatcctagatacccgaaagtgttgattgttggtggttatcaggtaaatgaaatgcagtaaccacatgtaagggatattgcagacaaatgattgattgattaattgtttgtatgcagactctggagctgtggagcttatcagataaccagagaatcccaatccaggcgcacgaagggttgatagctgcactggcgcactccccgttcactggaatgattgcctctgccagtcatgacagatgtgtaaagctctggaagtagctatatatagagggacaatagtgtaagctccatcgagtagacattcatg

SEQ ID NO: 6015 - DNA, 5606 bp, Zea Mays
cccacctcccctcccctcccccctacagattttcactttccaattcctatttatctcttcttttgttctttaatttggttcgtacgtacaagacttctcggatcactcgtcttctttgattgcatcatcgagacctgcattttcccttccaaattcgtcactcactctggttggccgccttctgtcttctgatccaatccggttgaaatcctccgtctccttccagcaagatctggcacataaggagaatcggcaagaaccattctgcaaatgaggccggatacgcggcttgaatcggcggtgttccagctcaccccgacccgcaccaggtgtgatttagttgtggtggcgaatggacggaaggagaagatagcctctggtctgctgaacccattcgtcgcccatctcaaggttgcacaagaacaaattgccaagggaggctattctatcacacttgagcctgacccagagattgatgcaccctggtttaccaggggcacgttggataggtttgttcgatttgtcagtacaccagaggtcctggagcgggtcacaaccatagagtctgagatattgcagatcgaggatggcattgccgtccagggcagtgacagtcttgggttgagatctgtggaatactataatgggaaattggtggactgcatggaaggtagtaaggcaagttacaatcctgatgcagatagggcacttgttccatacaaggctggtacacaaccaattccaccattgcagaatcatgatgctacacaggaggagaattcaaaggatcaattgctcagagtgctagagactcgcaaaacagtcttacgtaaagaacaggctatggcctttgcacgtgctgtagcagcaggatttgacatcgacaacttggtgtatctgatcacttttgcagagtgttttggtgcttctcgcttgatgaaggcatgtacacaattcattgagttgtggaagcaaaagcatgaaactggacagtggattgaagttgaacctgaagcaatgtctgcacgctccgaatttcctccgtttaatccttctggcattatgtttatgggggacaacatgaagcagactatggaatctatgtctgtttccaacggagatgcaaatggcgaagatgcttctaaagcagatcaaaggacatctcagcactctggtgctccccatgagttcttccatggtccatatcagtcagcatatccaccatgggcaatgcatccaccttactctatgcaaggcatgccttactatcctggaatgaacccatattacccttccccctaccccccaatggatgagaccaggtaccacccctcagaaaggagagtatcaaagaaacactcagatagcaaggactcagaaacttcagatgataaaagtgaccagagtggttcagagagggaaacttcttatggtcacaggtcccataaaaaagataaaagggcaggtaagaagaagcctagtgtggttgtcatccgaaatatcaatgtaacatcgaaaaggcacggatcatcagacagtgactcacaaacaggttcagatgtagtatcagaggatagcgacgattcacacgccaagtccagaaagaaaaagaataatagctcaagttcaaagaaaaaagatgctaggaagatggttttcgagtctgcagatgaatatagcaagaatggaatgtcatatgggcaagatggagaccaagggagctggaatgttttccagagtttcctgctaagagctgatgagaaaagagataatgacgcggacctattcgccagtgagaaaaaagcacccccagcaaggatgaaggagagcacaagcgttgatgttgattcaattctcttggtggagcaaaattctgctggggccaatgaacataatacaacaggtttcagtatggaaaatgagaggattagaccccagcagatgctgtctggtgatgaacttatgatgtatggggaaggtgaaggcatgagctttggatgtgatgacataaaggagattgaagctggaggtgtgagatacagaagaggaacaagtgatgacttcatgatatatggacaggaaaagtcaatggacagagggagttctttggatcctcttgcagaagcacagtacaagagccccaccctggttgacaaaaatgtgcacagcttggcagatgaatcgtttatgatacctcttaggtctacctcagaggataaccatgaaccagaatgtcgtactgccattgacattgatgttgagcttccctcaactgttcagaagatatcagatgctaaagctggtagtcagcttttctatgagccagctgaattgatgccggagcgtggatgtgaagacgtttcgtttggatatgatccagcaatggattataatagtcagatacagagtcaatctgccaccatggttgaagatgcacatatggaagatgcattgttgagcactgtggatgaaataaagaagccagagaaagacaagaagctaagaagttcacaggagagtttggataaacgtagaaaagatgcttcagcgaggaggttgtcatcatcaaaaggcccgctgactgatgcacagaaacgcgcacaaaacttgcgaatatataaagcggaccttcagaaggcaaagaaagagcaggaagaggaacagatcaaacggctagaaaggcttaagctagagaggcaaaagaggattgctgcaagaagcagcacttccaatgcaccaacaccacagcagcccagagtaaagccttctcccaaggtttcccccagcacctacaagagctcaaagctcagcgataccgaacttgcatcctcttcacctctcagaaaatttcctatcaaaactaccccagggactgatcctgaaaaaacagcaaaatcaagcaaactaaatgacaatactaatgcagttagtaagccaaccttgacagacatgaaggagagaagtgggaggaccgaatcatccaacgagagattgagaaaacttgctgaacctaaaaccaacagttcgactggccatactttgaattccaagtcagcaagcgtggaccgcccgcggagaaaaagcatgccacaagatagccagacaaagaaaatttcagctataatgcagcttgaccagagtaaatcagcaacactaccagaactgaaggtcaaatactcgcaagctcctgctgttgtgaaaaatgcagtagctagtagagagagaaaagaggtttcagctggagctaaatctcttcgtacaacagaaactgctagtgtaaaggaaaccaacggtaacatctcaaggatgaacagcagcgacgataatgtggtggttgagaagaccgttgtgatgctcgaagatgaggcggtcattctacattctggaagaaatgcagcaaaggaaacttgtagtgatgacaggacagagaagcccagcccagaatcggagtacatagctatcagggctccgctgtctccagttattcttccggaggctgagagatctgatgacctggggagctcatatgaggtggtgactgagtgtctaaaggatgaacctgaggagccaaccttgggcgccgtggagaaaccttaccaggccccctttgctagggtgacatcgctggagaatgcatcagacaacagtccattacctgaatcacttgcgcatgcaaatagcattaaggctcgagtgcctgagcctgtgtacacagtttcagttgagggccatgtggtaagtgaaaagcctcgaagcaaagagccaaaaggcttgaggaaacttttgaaatttggcaggaaaagccatgctgagggcgcaatggattcatcagttgacgaagcctcagcaggagatggttcgatgctgaagaatctcatttctcaagatgactctggtgcgtcttcttcaaaagcttctcggtccttctccctactgtcaccgttccgcagcaagcacaaggtgattgttctgtgagcacaaggtaatcaatttgggaggagaggaatataatggcgcagcacagtacatacttttggtttttcccttctagtatatatttacacacacgtatacataaatacatacatactatatgatggacttgtcattagacagcctatgtgaaggctgtgtgtggcgatggatggttgtttgcccttgtggttttgtaccctaactatttgtgttgatatatatggtgatactttttgttccagatttactattcaaatgtttgcactcatcataagtagattcagagagaggtactgtttggatgttatgtattaaacaaaaaggcaacatatctccaaatcttgttcaattcatcatctatggctgaatgcgatctcaccgggagatggtgtcctattttatgaaaaggagatccctggaacagtgaaggctttcttttctgtggctgttataacggaaattggaaatggttcttcaacccttttctggaaggatcgctggctgcaaggaaaaaggatttggctcctagactatttgctgctgtgcccaagagaaatttgaacactagatcagtccaggaggctttgacagatagaagatggttgacagatattagaggtgcagtttcagttggagtgctagttgatttcctggacctttgggacattttaagctccattaacctgctgcagaatcaggaagataaacatatattcagatttgcaacagatggaaagtattctgccaaagctgcatacgaaagtcttttcattggttctactaattttgggcactgggagagaatttggcattcttgggcccctcccaaatgcaatttttttttcaatggttggctgcttttaagagatgttggacagcggatcgactccaaaagagaggtcttatccatccagaaagttgtccgcaagagcctgaggacaggttggatgtgtctttgctaggcatttctggtttcgtttgctcggtcaggttaatttgcagggattcagcccccaaccaggtgaatctagcagtatgcagtggtgggagagattaagtgaccagctgcaaggtgtagccaaagagggtctcaattctctaattattttagggttttggatcctatggaatcatcggaaccgctatgtgtttgataaaatccctccaaatttctggtttctacttgtcggtttagacctttttctcttcttaatacaatgatgcgcagttctcttttgttttcgagaaaaataccatatggtttagaaacaagaggtctaaagtggaatggaatttgtaagaaacccaacaaaaccataaagtttgttgcatctgaacgcttcatgtgactctaaacatagccggctcaactctgaactctcactcactcatctgtccaagtataaaagtaggtaggcacacgacaagacaaagtattccctcctgggatgttggattttcagtcgtgaactatctcaacctcacaggccactgctgtcatcgtcaacaaaaccataaagtttgttttcatcgtccgtccgtccgtcgcggtagacatgccatttcaagtatctctggtggcctggcagcagcggccgcagccgaggggcgaccttgcagtcggagcagca

SEQ ID NO: 6016 - DNA, 5202 bp, Zea Mays
cccacctcccctcccctcccccctacagattttcactttccaattcctatttatctcttcttttgttctttaatttggttcgtacgtacaagacttctcggatcactcgtcttctttgattgcatcatcgagacctgcattttcccttccaaattcgtcactcactctggttggccgccttctgtcttctgatccaatccggttgaaatcctccgtctccttccagcaagatctggcacataaggagaatcggcaagaaccattctgcaaatgaggccggatacgcggcttgaatcggcggtgttccagctcaccccgacccgcaccaggtgtgatttagttgtggtggcgaatggacggaaggagaagatagcctctggtctgctgaacccattcgtcgcccatctcaaggttgcacaagaacaaattgccaagggaggctattctatcacacttgagcctgacccagagattgatgcaccctggtttaccaggggcacgttggataggtttgttcgatttgtcagtacaccagaggtcctggagcgggtcacaaccatagagtctgagatattgcagatcgaggatggcattgccgtccagggcagtgacagtcttgggttgagatctgtggaatactataatgggaaattggtggactgcatggaaggtagtaaggcaagttacaatcctgatgcagatagggcacttgttccatacaaggctggtacacaaccaattccaccattgcagaatcatgatgctacacaggaggagaattcaaaggatcaattgctcagagtgctagagactcgcaaaacagtcttacgtaaagaacaggctatggcctttgcacgtgctgtagcagcaggatttgacatcgacaacttggtgtatctgatcacttttgcagagtgttttggtgcttctcgcttgatgaaggcatgtacacaattcattgagttgtggaagcaaaagcatgaaactggacagtggattgaagttgaacctgaagcaatgtctgcacgctccgaatttcctccgtttaatccttctggcattatgtttatgggggacaacatgaagcagactatggaatctatgtctgtttccaacggagatgcaaatggcgaagatgcttctaaagcagatcaaaggacatctcagcactctggtgctccccatgagttcttccatggtccatatcagtcagcatatccaccatgggcaatgcatccaccttactctatgcaaggcatgccttactatcctggaatgaacccatattacccttccccctaccccccaatggatgagaccaggtaccacccctcagaaaggagagtatcaaagaaacactcagatagcaaggactcagaaacttcagatgataaaagtgaccagagtggttcagagagggaaacttcttatggtcacaggtcccataaaaaagataaaagggcaggtaagaagaagcctagtgtggttgtcatccgaaatatcaatgtaacatcgaaaaggcacggatcatcagacagtgactcacaaacaggttcagatgtagtatcagaggatagcgacgattcacacgccaagtccagaaagaaaaagaataatagctcaagttcaaagaaaaaagatgctaggaagatggttttcgagtctgcagatgaatatagcaagaatggaatgtcatatgggcaagatggagaccaagggagctggaatgttttccagagtttcctgctaagagctgatgagaaaagagataatgacgcggacctattcgccagtgagaaaaaagcacccccagcaaggatgaaggagagcacaagcgttgatgttgattcaattctcttggtggagcaaaattctgctggggccaatgaacataatacaacaggtttcagtatggaaaatgagaggattagaccccagcagatgctgtctggtgatgaacttatgatgtatggggaaggtgaaggcatgagctttggatgtgatgacataaaggagattgaagctggaggtgtgagatacagaagaggaacaagtgatgacttcatgatatatggacaggaaaagtcaatggacagagggagttctttggatcctcttgcagaagcacagtacaagagccccaccctggttgacaaaaatgtgcacagcttggcagatgaatcgtttatgatacctcttaggtctacctcagaggataaccatgaaccagaatgtcgtactgccattgacattgatgttgagcttccctcaactgttcagaagatatcagatgctaaagctggtagtcagcttttctatgagccagctgaattgatgccggagcgtggatgtgaagacgtttcgtttggatatgatccagcaatggattataatagtcagatacagagtcaatctgccaccatggttgaagatgcacatatggaagatgcattgttgagcactgtggatgaaataaagaagccagagaaagacaagaagctaagaagttcacaggagagtttggataaacgtagaaaagatgcttcagcgaggaggttgtcatcatcaaaaggcccgctgactgatgcacagaaacgcgcacaaaacttgcgaatatataaagcggaccttcagaaggcaaagaaagagcaggaagaggaacagatcaaacggctagaaaggcttaagctagagaggcaaaagaggattgctgcaagaagcagcacttccaatgcaccaacaccacagcagcccagagtaaagccttctcccaaggtttcccccagcacctacaagagctcaaagctcagcgataccgaacttgcatcctcttcacctctcagaaaatttcctatcaaaactaccccagggactgatcctgaaaaaacagcaaaatcaagcaaactaaatgacaatactaatgcagttagtaagccaaccttgacagacatgaaggagagaagtgggaggaccgaatcatccaacgagagattgagaaaacttgctgaacctaaaaccaacagttcgactggccatactttgaattccaagtcagcaagcgtggaccgcccgcggagaaaaagcatgccacaagatagccagacaaagaaaatttcagctataatgcagcttgaccagagtaaatcagcaacactaccagaactgaaggtcaaatactcgcaagctcctgctgttgtgaaaaatgcagtagctagtagagagagaaaagaggtttcagctggagctaaatctcttcgtacaacagaaactgctagtgtaaaggaaaccaacggtaacatctcaaggatgaacagcagcgacgataatgtggtggttgagaagaccgttgtgatgctcgaagatgaggcggtcattctacattctggaagaaatgcagcaaaggaaacttgtagtgatgacaggacagagaagcccagcccagaatcggagtacatagctatcagggctccgctgtctccagttattcttccggaggctgagagatctgatgacctggggagctcatatgaggtggtgactgagtgtctaaaggatgaacctgaggagccaaccttgggcgccgtggagaaaccttaccaggccccctttgctagggtgacatcgctggagaatgcatcagacaacagtccattacctgaatcacttgcgcatgcaaatagcattaaggctcgagtgcctgagcctgtgtacacagtttcagttgagggccatgtggtaagtgaaaagcctcgaagcaaagagccaaaaggcttgaggaaacttttgaaatttggcaggaaaagccatgctgagggcgcaatggattcatcagttgacgaagcctcagcaggagatggttcgatgctgaagaatctcatttctcaagatgactctggtgcgtcttcttcaaaagcttctcggtccttctccctactgtcaccgttccgcagcaagcacaaggtgattgttctgtgagcacaagatccctggaacagtgaaggctttcttttctgtggctgttataacggaaattggaaatggttcttcaacccttttctggaaggatcgctggctgcaaggaaaaaggatttggctcctagactatttgctgctgtgcccaagagaaatttgaacactagatcagtccaggaggctttgacagatagaagatggttgacagatattagaggtgcagtttcagttggagtgctagttgatttcctggacctttgggacattttaagctccattaacctgctgcagaatcaggaagataaacatatattcagatttgcaacagatggaaagtattctgccaaagctgcatacgaaagtcttttcattggttctactaattttgggcactgggagagaatttggcattcttgggcccctcccaaatgcaatttttttttcaatggttggctgcttttaagagatgttggacagcggatcgactccaaaagagaggtcttatccatccagaaagttgtccgcaagagcctgaggacaggttggatgtgtctttgctaggcatttctggtttcgtttgctcggtcaggttaatttgcagggattcagcccccaaccaggtgaatctagcagtatgcagtggtgggagagattaagtgaccagctgcaaggtgtagccaaagagggtctcaattctctaattattttagggttttggatcctatggaatcatcggaaccgctatgtgtttgataaaatccctccaaatttctggtttctacttgtcggtttagacctttttctcttcttaatacaatgatgcgcagttctcttttgttttcgagaaaaataccatatggtttagaaacaagaggtctaaagtggaatggaatttgtaagaaacccaacaaaaccataaagtttgttgcatctgaacgcttcatgtgactctaaacatagccggctcaactctgaactctcactcactcatctgtccaagtataaaagtaggtaggcacacgacaagacaaagtattccctcctgggatgttggattttcagtcgtgaactatctcaacctcacaggccactgctgtcatcgtcaacaaaaccataaagtttgttttcatcgtccgtccgtccgtcgcggtagacatgccatttcaagtatctctggtggcctggcagcagcggccgcagccgaggggcgaccttgcagtcggagcagca

SEQ ID NO: 6017 - DNA, 4580 bp, Zea Mays
cacctcccctcccctcccccctacagattttcactttccaattcctatttatctcttcttttgttctttaatttggttcgtacgtacaagacttctcggatcactcgtcttctttgattgcatcatcgagacctgcattttcccttccaaattcgtcactcactctggttggccgccttctgtcttctgatccaatccggttgaaatcctccgtctccttccagcaagatctggcacataaggagaatcggcaagaaccattctgcaaatgaggccggatacgcggcttgaatcggcggtgttccagctcaccccgacccgcaccaggtgtgatttagttgtggtggcgaatggacggaaggagaagatagcctctggtctgctgaacccattcgtcgcccatctcaaggttgcacaagaacaaattgccaagggaggctattctatcacacttgagcctgacccagagattgatgcaccctggtttaccaggggcacgttggataggtttgttcgatttgtcagtacaccagaggtcctggagcgggtcacaaccatagagtctgagatattgcagatcgaggatggcattgccgtccagggcagtgacagtcttgggttgagatctgtggaatactataatgggaaattggtggactgcatggaaggtagtaaggcaagttacaatcctgatgcagatagggcacttgttccatacaaggctggtacacaaccaattccaccattgcagaatcatgatgctacacaggaggagaattcaaaggatcaattgctcagagtgctagagactcgcaaaacagtcttacgtaaagaacaggctatggcctttgcacgtgctgtagcagcaggatttgacatcgacaacttggtgtatctgatcacttttgcagagtgttttggtgcttctcgcttgatgaaggcatgtacacaattcattgagttgtggaagcaaaagcatgaaactggacagtggattgaagttgaacctgaagcaatgtctgcacgctccgaatttcctccgtttaatccttctggcattatgtttatgggggacaacatgaagcagactatggaatctatgtctgtttccaacggagatgcaaatggcgaagatgcttctaaagcaggaacctttctgttgatggagcttgattttctattcattcattatgtgcaactgttgactctcccttgaagctaattgtctcatgcttgatttaaaaattcccccataagttgattgaaatgtaccctcaatttactaagtgtccttggctatcatcaataacttttgttgcttgacagatcaaaggacatctcagcactctggtgctccccatgagttcttccatggtccatatcagtcagcatatccaccatgggcaatgcatccaccttactctatgcaaggcatgccttactatcctggaatgaacccatattacccttccccctaccccccaatggatgagaccaggtaccacccctcagaaaggagagtatcaaagaaacactcagatagcaaggactcagaaacttcagatgataaaagtgaccagagtggttcagagagggaaacttcttatggtcacaggtcccataaaaaagataaaagggcaggtaagaagaagcctagtgtggttgtcatccgaaatatcaatgtaacatcgaaaaggcacggatcatcagacagtgactcacaaacaggttcagatgtagtatcagaggatagcgacgattcacacgccaagtccagaaagaaaaagaataatagctcaagttcaaagaaaaaagatgctaggaagatggttttcgagtctgcagatgaatatagcaagaatggaatgtcatatgggcaagatggagaccaagggagctggaatgttttccagagtttcctgctaagagctgatgagaaaagagataatgacgcggacctattcgccagtgagaaaaaagcacccccagcaaggatgaaggagagcacaagcgttgatgttgattcaattctcttggtggagcaaaattctgctggggccaatgaacataatacaacaggtttcagtatggaaaatgagaggattagaccccagcagatgctgtctggtgatgaacttatgatgtatggggaaggtgaaggcatgagctttggatgtgatgacataaaggagattgaagctggaggtgtgagatacagaagaggaacaagtgatgacttcatgatatatggacaggaaaagtcaatggacagagggagttctttggatcctcttgcagaagcacagtacaagagccccaccctggttgacaaaaatgtgcacagcttggcagatgaatcgtttatgatacctcttaggtctacctcagaggataaccatgaaccagaatgtcgtactgccattgacattgatgttgagcttccctcaactgttcagaagatatcagatgctaaagctggtagtcagcttttctatgagccagctgaattgatgccggagcgtggatgtgaagacgtttcgtttggatatgatccagcaatggattataatagtcagatacagagtcaatctgccaccatggttgaagatgcacatatggaagatgcattgttgagcactgtggatgaaataaagaagccagagaaagacaagaagctaagaagttcacaggagagtttggataaacgtagaaaagatgcttcagcgaggaggttgtcatcatcaaaaggcccgctgactgatgcacagaaacgcgcacaaaacttgcgaatatataaagcggaccttcagaaggcaaagaaagagcaggaagaggaacagatcaaacggctagaaaggcttaagctagagaggcaaaagaggattgctgcaagaagcagcacttccaatgcaccaacaccacagcagcccagagtaaagccttctcccaaggtttcccccagcacctacaagagctcaaagctcagcgataccgaacttgcatcctcttcacctctcagaaaatttcctatcaaaactaccccagggactgatcctgaaaaaacagcaaaatcaagcaaactaaatgacaatactaatgcagttagtaagccaaccttgacagacatgaaggagagaagtgggaggaccgaatcatccaacgagagattgagaaaacttgctgaacctaaaaccaacagttcgactggccatactttgaattccaagtcagcaagcgtggaccgcccgcggagaaaaagcatgccacaagatagccagacaaagaaaatttcagctataatgcagcttgaccagagtaaatcagcaacactaccagaactgaaggtcaaatactcgcaagctcctgctgttgtgaaaaatgcagtagctagtagagagagaaaagaggtttcagctggagctaaatctcttcgtacaacagaaactgctagtgtaaaggaaaccaacggtaacatctcaaggatgaacagcagcgacgataatgtggtggttgagaagaccgttgtgatgctcgaagatgaggcggtcattctacattctggaagaaatgcagcaaaggaaacttgtagtgatgacaggacagagaagcccagcccagaatcggagtacatagctatcagggctccgctgtctccagttattcttccggaggctgagagatctgatgacctggggagctcatatgaggtggtgactgagtgtctaaaggatgaacctgaggagccaaccttgggcgccgtggagaaaccttaccaggccccctttgctagggtgacatcgctggagaatgcatcagacaacagtccattacctgaatcacttgcgcatgcaaatagcattaaggctcgagtgcctgagcctgtgtacacagtttcagttgagggccatgtggtaagtgaaaagcctcgaagcaaagagccaaaaggcttgaggaaacttttgaaatttggcaggaaaagccatgctgagggcgcaatggattcatcagttgacgaagcctcagcaggagatggttcgatgctgaagaatctcatttctcaagatgactctggtgcgtcttcttcaaaagcttctcggtccttctccctactgtcaccgttccgcagcaagcacaaggtgattgttctgtgagcacaagattataggagtgggttatctcagggtgagggttggacgagcggggcgaggaggagccgtgctgctgctcggctggagaactcggcaaaaggcattgaaatttttcatgggagatgattagtgcaaggtatggcttgttcgattggacttatacagatttgtgcagcagcaaaggcaggagcctcattagtgtgcctaccaatgcccactttcctggcttcagtggtgactcattgaagatgtggattttcctgcagtgtatgtgaaatcattgctatctcagaggggttgatctcagctacctgataagaagcactgctccatttactgagcatatgtagaagctgcagcccctgctaaaggggatgatgtatccattccattctgtagcaagaaatatgacgacataattgtcctgtcaaa

SEQ ID NO: 6018 - DNA, 3249 bp, Zea Mays
ggacgattggcgccttccgacacgcagctctcccctccctagacccgtcgacggttaccagtgccactttcacgcccactctggcgccaccgacaactgtttgtgcttcgtccgcgcagccccttgcgcccaacccctctacccacgcgaacaacgcctccccctctgccagtatggcaccaacaatcattagcccatggtgtcggcctccctccctccctggcgcgcccaactccctcccgtggccgccctctgctccgacagtcacgcaacctcctacctcgtccgcgtggcgggacatctccctcacccaacctttctcccaccgctcctcgcagcgctcctcttccactccgctttcctagcctgcacgctccgcctcgcctccgtggcatcctaggaaagaaacctcactctcaactctaggttagggtttctattttaacgataacaataggctaggctatatggtaattctaacacccatccatagagcggaaggatcacaaacacatagattggtccaaaaataaaaataaaaaactacacgggaagacccttggtcttgataccagcgaactggtgggccgaggagaacgaagaacacaaacttgtcccaaagcaactatctcatggacgaaatgaatgtcaatctcgatatacttgttacgggttggcggtcatatagacaacattaactttgtcgtagcagataggcaggggtagcagataggcagggacaacgataacattattaagacgaaaagtggtgttgttgccgacaaggtggatgtgcaacagtcggaggagtagtgatgtcgaagaactacgccgacacaggtggtgtgtgcatgtgagtaggcaccaaggatgtcggatgggggcaccggcagcacgccaggcatgctagggcacaggggactgcactacgcctactggtcgcaccaggggttgaagtagatccaggggccaaccagtgggatggcattgtggatccgtcttggaacagtctaccactgccaccgtcgcgacctttgtgcttgttgggcctgtttggttcagcttttttctaacgagcttttatgagaatctaattgtggggagaatctggttgtggggagaatttgagtatcgtagggattacatcagaggaagatgaaggggaaaatagggtttagaatctaggaagtgatggattcctcctatcacgatgacacagtcacttctgtgttcacgttgatttggacaatttttaccaaagcaattctcacaaatgcgggctaaaaagaaaggcgtttggcagcccgcaatagtttctggtggccacaatcagcaaaaaagtaaaacaaacatgtccattgttggggtcgccaacactgctgactgggcagttgccttgactgctgcagtattggtgtaggcgcgaccgccactgcataggacgtgggtgcctagactagaggtggtcacgtgtcaggctgagtcgcagcaaggggaacccgcatagagggccatctacaacgtcaccttcccttcattagcgagattgagttccttgagcaccaacctctcatgtgtcgttgtgaagtcagttagcagattggaattgacgatgttggtggtggtggtggagaagcgagggttgacacctcatagaaggttgaggatgggctgcgagtcgacgatggtatgaccaacgtcaagaagggtgttggtggtggctttcatctcctgacagtactcgtcgacgaagaggtcatatgagtcatggagtggaactcatgattgagaaagatggcgtagggggccttgttcgcctggaagaggtccacaatcaccgtccaaagttggtgggcggtttgatctggttcgtgggcgagcctaaggccaaggacatcatctgcgacggtggtgaggagccagttgtggacatagggatccgccgctgcccacactagattgtcatgacgtggctctgtcgtgccaccgatgtccgagtgaagactgaatttgccgaacagggagagttaggacacttaaacttgagggtgatcggcacatggcacttgatggagatggtgccttatgatgagatgttgaacaccgggacagactttgatctagaggagttggtgagggtgccggtggcgggggctggacgccgccgccgtcatcatggtgagtttggaagatgatggcgacgaggaggattgccagcgccgccggttgggaagggttagggggcagggggtggagaaggcacggtctagggaggtggacgacacgacaagcgacgagctaggcacacatgacctagaggggcggcattagggtttgtggtgggtggacaagtctttggtaccaggtagattggtattgagggaatcaccatacacctattgtgggggctgcctttcatatatatagtcatgtacaagaggagtacatcgtgtagtacaagtcaagtacatgttgtataataggctaggatgtacaataatcctaatattgaagaggaacacacaatgctaccaattgcgtttctttgtgttaagtagaaaaaaagggttctcgcaacactaaccgccgaagcgtccaccaggtcgtgtttgccatattattaatattacactgcactttcaactccagaactagaaaagagcaggagtcatcacctaataactgatagcatgtaaatttgtatagtataagcaccaaatttcatgtctgaactaacattcaatgaataaaccatacaatactggtcaagtttaaactaatgagtaattctgtcacaaaattgtttcatgtttctagactgaaggccttcaaccagttccatcagaaagcaagttaggaatacactacaagagggaatcctactagttttgacagaaagcagtaaggtaattcatcatcaataaaaatgtaggaacatgagagggacctggggactgggggcagaactgtggaaggtcatcaccatgtataagcttttgaatttgcaaagaagtgactaagacatacaagcttcgggattgaatcttgaagcagagggctaaaaatttctcctatttaagcacatacattttctcaagctttattatcaatggacccttgactacaaaaactattcgctatttttgctcagtagagccaatcagacgctactgaaccttgtatttcatgtgcaacaaaaaaacagggataacatacctgaacaagtgatggtttgtaccgtagtttcag

SEQ ID NO: 6019 - DNA, 3399 bp, Zea Mays
ctgcctccgaccagttcgcctatgccgccctgctccggtgccgcgaccgccgcctcgcgtaccagatacatgcccaggcgtgccgtcgtggcctgaccgcctccaaccccgtcctcgcttgctccctcctcatcttctatgccgactgcgaggagtggaacggcgccaccagggtgttcagcgaaatgccgtgcccagacaccgtgtcctacaccgccatgatatccgccctcctccgcgccggggactgccacggggcgctcgcgctctacccgtgcatgctcccactttgcgcacccacccagcacaccttctccaagctgctcgcgccctgcgcctccatgcgcttgcaccgccacggcagccagctccacgcgcagctcctccgctggggctgctggggcccccacctcggcctggtcctcaagaccgcgctcgtccacatgtacgccgcttgcggcgccatggtctccgcacgcgccgtgctccacgccactcccgaaaccgacgtcgtgctctggacggcaattatcaccgcctacacgcgtcgcggccagctccatcgtgctctgctggcgttccgtgacatggaacgctctgctgtgcttcccaatgccttcacctacgcagcgctcatcgccgcctgctccgcggaccactcgctgcacatcggacagcagctccatggccgcctcttcaagtctggtctggagcacgacacctctgcttgcaatgcgctcctcgacttgtacagcaagtcctccgcacgttccctcgacttgctgcttgctttccacgcggctgacatgcccaacgtggtgacctggacttccttcattgctggactgatgcgccatggcagggaacaagaggcgcttgcggcatttgctcgtatgcgggctaccggagtgaagcccaactccttcaccctgtccactcttctgaaaggctgcacctccgcacatgcatgtctgcacgctgcaaagatccatgcctatgtgctcaagaccagttcggagtcattggacgcggctgccggaaactcgtttgttgatgtgtacgcaaggtctgcaagaatggatgacgcgtggaaggtggctaccacaatgtccttcgtgagggacagattcacatacacaagcctggccaaagggctgaatcagatggggcttcaccacagggcactcggcatgatacttcacatgttccacgaggaggttagtatcgacggtttcagcctagcttgcttcctttctgctgctgcgacattggcatccatagagtccgggaagcagctgcactgctgtgcagtgaaattgggattgagcggtcaggtatctctctccaacagcctcataaacatgtacagcaggtgcaagagtctggaggatgctaagagtgttttccagtcaatcagggaacccagtgtcgtgtcgtggaatgctataatctttgggatggcattcaacggctcttacactgaagcgttgtcagtttttgaagacatgattctggctggagctcagcctgatggggtcactttcacagttgtgctttctgcctgcagccatggtggcttagttgacattggcatcaaacacttcaactctatggcgaatatgtttgatgtccccccacaaaagagccactatacattgttcctggatatgctaggacgatcaggccgctttacagaggtggcacacaccatcgaggccatgcccgtccagccagacttatcaatttacaggaccctgctggtatattgcaagttccacaatgaaccggtggttggtgaatatattgccaagaaggcactagagttggatccatcagattcagtgtcacggaatacactttcaggcatccgccgtgctcctcggatacaagatcatgacgaacagatatatttgtgggatgaagagggatgcaggcatccaagttctgtgctgccgatcaattgctgaaaaccgagcttgggttcttgttaagtattcccatggaaatgtaagtatttttttttctgtgcgattcttcaatcagagtatacgaaaaggagctccacattaaactttttgggatgaaaagaaggtcaattctgggtctgcttatttgttcttgcggagacacttccctcacaagaatttatggatatttcagtgcacagaaaccacacatgtatggaggcatgagtcatctgaccagttttcttctaaatcttgttaaaaagttttattcactggttctatcatctttgagccatggaagcgtttttattcactggttctatcacctttgagccatggaagcgtttatagaaatcatgggcctccaaaaatgcaaaaccttactatagctggccataagaaataggtgttggacaactgatagattgcaaaagtgtggcatgccccacccggtagtctgcctcctttatgatcaagagcaggagacagttcaacatcttctaactacatgtgtttttgcacgtcagttctggcatggcattctatcatcttttaatctaggatatcttattcctagtcctgtggaggcctcctttgcagagtggtggggaggagtgatcaatcagatccataaagacaagaagaagggcttcaacattgctatcatccttggggcattgtgcctttgatttcataggaaccgggtgatcttccatgaggagtcccctttcattgtgaaggtgttaagatccttccttgatgagctcgcttgctgggttctagccgaggccaagcagttagggagcattaatttggttgaccatgtttgtgctttgtaagcgttggggtctgcgtggcaggtctccctgtcttggtgtgtgctttagaagagtgtgtgtggttgagtgtgtgtttgtgttctgtacttttgcccttcgtgggtgtttttcttttctctaatatataaagatgcacagtcctcctgcgcgttcgagaaaaaaaccacacatgatacattctatgaaattgattatacacctttgacgtcacaaccttctatgccaacggcagaatatggcacttgccattttcacctactcagttagccaatagcaaataatcattaatctcatataacaaagtttatttgggtttctaatttctatgctaagatacttagatgtcagatgctctgattgttgcttcttcccacaaaaaaaccattctgttcactgcagtcgattttcaatctcaaatcacgatatagtaagatatagaaagctagcactataatttttgccagaaagtggtctaaaacataacacttttctacctttcatgtgaactgtactgctcaatgtagtacattatctcctattctcctttaaaggacacatagtcacattcattacacaacgctagcacatacttc

SEQ ID NO: 6020 - DNA, 3132 bp, Zea Mays
tgggtgctcagctcagctcaccctatctttctcttatcttacgccgtcgtcgtcctgctccggcgacggccaggcagccgagcagataaaaagagccgaagcagcaccaccaccacgtgcctctcttctcagcttgcctgcctcactgcacccggccacaagggcaagatgcccgcctctgtcgctgtctacccggccaagatggcatgctgtctccagctccaccatcttcgccggccgtcccctgctccgctccctgctcgggtcctcttcctcctctcgaccccgcgcctgcgccccgtcagagcgtctcccggctcgtccccgcccaactccttcgctggctggtcctccgactccgacagcgcggatgacggcgccgacaaatctactctagggttcggccgagcaggagggcttcttggacctggacttgctgcctttttcttcctcgccggcattacctttgctgccgtctctatcagaagcagtggcacccacgcagctggaaaattgcaaaacttgcctacagagactgctgccacggaatcttaccctgattatcactcccacaaagaggatggtgctaccagggaagcttccttaccaacggattgggacgaagaagactatgacaacctcgataaaaaagaagatacagatgaattcctgacgcctctacagtcaaacgaggttcctggggtgccagctgaaggtgaagtggggcacctgttgcagaacactgagcctgttactgatggtgaccatgttgtcggtgaagaagcgaatcagtttgacaatctcattgcatccgatggtaatcaagatccaccaccacctttgcccatactcgatgctgcaggcccctcggaggaaattcctgatgtagaagaaacatcagatcccaaaatggatttgccagaaaaccagcatttcgatgaaacattaacttcagatgcaatggtgctagattcagatgttgtgcccatccaggacatctctgaaggtgccattgctgctgcatttcacccagaagacaaaggtgtcgagcagaacccacaaactcttgacaaagatgaactttctccatccggattgcctgattatatggaacatgtaagcgccgatgggatgcatccacttggatcaaacgagttatccatggctacaaggaccagtgagacaggagatggggaggaaactatagtagaggatctgtataaaggagaaagtgaattagaaaaccaaaacaaacaattggagtccacaccacctgaccaatatttttcttctcctggaattcctgctccctctgtagtatccactgctttacaggtgcccgcagggccgattgtggttccagcttctgttgacccaacccaggaaaatgctatagctgcattgcagattctaaaggtgatcgaatccagtgctcaagctggtgaattgtgtacccggcgtgagtatgctcgatggttggtagctgcgagcaattgcctttcaaggaacactttctcaaaagtgtatccagcaatgtatattgataatgtcactgaacttgcatttgacgatgtcacacctgaagatcctgattttccattcatacaagcagaagctggattgatttctagcaagctttcaagatctgatatgaatatcccagaagatgttcatgacaatcatatcttgttttcccctgagagtcctttgtcacgtcaagaccttgtgagttggaaaatggccctggataagagacaactgcctgaagttgacagaaattgtttgttcaaactatctggctacatagacatcgataagataaacacagctgcctggccagctttggctgcagacttggatgctggagaccagagcattacagctcttgccttcggtttcacaagacttttccaaccgaacaaacctgtgacaaagggacaagctgccctagcattttcagctggtgattctggcgaagtggttctggaggaggttgcccgtatcgaggcagagaaaatagctgaagcagctgtaaatgcacatgctgcattggttgctcaggtcgagaaagatcttaatgcaagttttgaaagggagcttaaggaggaaagagaaagggtagagacccttgaaaaagtagctgaagaagctagggtggagctagataggttgagggcagaaagagaggaagagaagaatattctggtcaggggcagagctgctgttgagtctgaaatggaagttctgttgaagttgaggagtgaggtagaggaacagctgcagaacgtactgagcaagaaggtggaggtgtcgttcgagaagagtaggattgagaaactccaaaaggaaattgagagcgataactcggctgttgtgcaacttcagtatgagcttgaagtggagaggaaggcgttatctatggcaagggcttgggcagaggaggaagccaaaaaggcccgggagcatgcacgcgcccttgaggaggcccggaaccaatgggagcgtcaaggaatcagagttgttgtcgaaggagaactgaaggatgacgcctcagctggggtgacatgggctaacgctggcaaagaaaacgcagtcgacgagtctatcaaccaggcagaagctctgctggagaagctcaagacaatgtctggtgagatggaggtgaggtctcggggtgcggtggagagagtgatgcagcatgtgaggtccttcatcgcaatcctaaagcagcaagctgcagatgcaaggcagtggtgtaccgagtttggggcttgtgctgcttccagggcaaacgaggtatcagcacaagtgaagggaagcgtatctgcgtttggtgcaacccttggagacaagtcgaagagggcaatggaagagtgcaaggacggcctggagaggatttcacacagattcaagacagactagataccaattttgttgtttgcttgttttttggggatgatgttgttgcagagttgtttactatagcatgctggaacgaacagtaagtagttcccgaccgtggccttgtggaataagtaagtgcaacgaagcacttgtggccttctggaataagtgtaattaataccaacagtaattaataatagttcccgtttattatattatatcacaaga

SEQ ID NO: 6021 - DNA, 4381 bp, Zea Mays
acgagaccgcaaaaacgttgccgtctaaccggcgtacggtagaatcgaacatgaaattcttccgcctccgcccgccggtcgccagagcccggagggagagcgctgagaagcagcggtagctggggaccgggggctcagcttcatcatttcccaaagcccccgagctagcagagggagtggtgcgaggtacatcgaatgggggggaattaggtcatggatgcgagggtctcattggacgatttggttcttcaaacaagaagaacatcaccatacttaagaatgtcaatggtatcctcaagccatccaggatgacacttcttcttgggcctccatcctcggggaagagcacactcatgcgggcactcgccggcaagcttgacaaaaatctcaaggtctctggcagcattacgtattgtggccatccaatttcagagttctatcctgagaggactagcgcgtatgttggtcaatatgatctccacaatgccgagatgaccgtaagagagacactggatttctccaggcggtgcctaggcattggtgccagatatgagatgatcgccgaacttgctagaagggagcgggatgcaggcatcaagccagatcccgagattgatgctttcatgaaagctactgcagtacaaggacaggagactaatattataactgatctcactctcaaggtgcttgggctggacatttgtgctgacgttattattggcgatgagatgatcagaggaatttctggcgggcaaaagaaacgtgtgacaactggggagatgctaacggggccagcaagggctttatttatggacgaaatatccactggtctggatagctcgagcacatttgagattgtaaagtttatgaggcagttggtccatgtaatgagtgaaaccgtcatgatctctctgctccagccaccgccagagacatacaatctttttgatgacataatcctgctatcagaaggatacatagtgtaccatgggccgcgcgagaatatcctagaattctttgagtctgccggtttccggtgccctgacaggaaaggtgtcgcagactttcttcaagaggttacttccaagaaagaccaacaacaatactggtatcttgatcaggagcagtatcattatgtatctgtacccgactttgcagaacgtttcaaatcattccatgcatgccagcagatgcagaaggagttgcaaataccttttgaaaagtccaaaactcatcctgctgcgttgaccaccagaaaatatgggctttccagctgggaatcactcaaggcagtgatgtcaagagagcagctattgatgaagcgcaactctttcatctatattttcaaggtcacccagttgatcatccttgcactcatgtccatgactgtgtttctcagaataaagatgccccatgggcagattgctgatggcaccaaattctttggggctctgacttttggtttaataacaatcatgttcaatgggttcgctgagctacaattaaccataaagaagcttccagttttctacaaacatagggatttcttattcttccccgcttggaccttaggagtggcaaacataatcttaaaagttcctgtctcgttcgtggaatcagcagtatgggttgttctcacgtactatgtgatgggctttgcacctgctgcaggaaggttctttcgtcagtttatagctttctttgccacacaccaaatggcaatggctttattccggtttcttggtgctgttttgaaaacaatggttgtggccaatacttttgggatgtttgtgctgctcattattttcatctttggaggatttgtcatccgtagaaatgacatcagaccatggtggatctggggttactgggcatcacctatgatgtatagccaaaatgcaatatcggtcaacgaattccttgccagtaggtgggctattccaaacaatgacacgactatcgacgcgccaacagtaggcaaagcaattcttaaatccaaaggcttgtttactggagaatggggattttggctttccattggagccctcataggattcattattttgttcaacatgctctacctttgggcccttacatatttaagtcctagtagtggctccaatgccctggtttcagaaggtgaggatgatgtaaatgaaatggcattggaaggaagaaggaaagatgcaagaagaagcaaagatgaaatatcccaagttgtatccagtgatccaggcactaatggaggaacaaacacgctagctcaatcacgagtcactttgcctttccagcctcttgcactttgctttaaccatgtaaactattacgtcgacatgcctgcagaaatgaaggaacaaggattcacagaaagccgtttacaactactctctgatatcagtggcacttttaggccaggggttctaacagcactggttggtgtgagtggagctggaaagaccactttaatggatgtcctggcaggaaggaaaactagtggagctattgaaggagatattaccctgtcgggataccccaaaaaacaagaaacttttgcccggattagtggttattgtgaacaaactgatatccattctccaaatgttactgtatttgaatccatcacctactctgcttggttgcgtctttcctcagatattgatgatggtacaaaaaagatgtttgtggaggaagtgatggcccttgtagagcttgatgtgttgcgcgacgctctagtgggtctccctggagttagtgggttatcaactgagcaaagaaaaaggctgacaattgctgtggagctggtagcaaacccttcaatcatcttcatggatgaaccaacttctggtcttgatgctcgagctgcggcaattgtcatgcgtacagtaagaaatacggttaacactgggcgtactgtggtctgcacaatccatcagcccagcatcgacatatttgagtcttttgatgagcttctgcttttgaaacgtggaggtcaggttatttatgctggtgaacttggtcgccactctcacaaactagttgaatattttgaggcgattccaggtgttccaaagatcacagaaggatataatcctgcaacatgggtgctggaagttagttctcctctatctgaggctcgattgaacatgaattttgctgaaatttatgcaagctctgtgctttataggaaaaatcaagaggttatcaaggagttgagtattccccgatcagacaaccaggacctgtcatttcctacaaaatattcacagaatttctacggtcaatgtgccgcaaacttttggaagcaataccgttcgtactggaagaatccaccctacaatgctatgcgctatctgatgacatgtctctttggccttgtatttggtacagtattttggcaaaaaggaaagaacatagattcacaacaagatttatataatctgcttggagccacttacgctgctacattctttcttggggcttcaaattgcatcacggttcagcctgttgtatcgattgagcgagcagttttctaccgtgagaaggcagcggggatgtactctccgttatcctatgcatttgctcagacatgtgtggaggtcatctacaccatcttacaggggatactgtacacagtcatcatatatgcgatgatcggatatgactggaaagcggataaattcttctatttcctgtttttcatcactgcaagcttcaactacttcacattgttcggcatgatgttggtagcatgcactccctccgcattgctcgcgaacattctcatcacgtttgctctacctctgtggaacctctttgctggattcctcatcgttagaccggcaataccaatttggtggaggtggtactactgggcgaaccctgtgtcgtggaccatctatggcgttgttgcgtctcagtttggcgagaacgaaggtgagctttcagttcccggtgggacgcccgtggtggtgaagcagttcttgaaggataatctcggcatccagcatgacttactcggctatgttgtgctcgtccatttcgcctacgtcattgtgttcttcttcgtattcggttattccatcaagttcttcaacttccagaaacgttagcgggatcatttgtatgtaattaatcggtcgccgtaagttctagttctagttctagttctagtcaaagcaagtgcttgttttgggaggaagcctgtatgcaagtagcagtgtattcctcttgtttcttcaatgcaaaaatattaaaaggaagatgacgaatgcaaaagtgacatgtcttgttccttttcttcttgagtaatctgtgaggctaagagcagccgcagtgtgacggggttcgtttcaccatcaccttctgctctcggagatttctg

SEQ ID NO: 6022 - DNA, 4322 bp, Zea Mays
aaaaacgttgccgtctaaccggcgtacggtagaatcgaacatgaaattcttccgcctccgcccgccggtcgccagagcccggagggagagcgctgagaagcagcggtagctggggaccgggggctcagcttcatcatttcccaaagcccccgagctagcagagggagtggtgcgaggtacatcgaatgggggggaattaggtcatggatgcgagggtctcattggacgatttggttcttcaaacaagaagaacatcaccatacttaagaatgtcaatggtatcctcaagccatccagagttctatcctgagaggactagcgcgtatgttggtcaatatgatctccacaatgccgagatgaccgtaagagagacactggatttctccaggcggtgcctaggcattggtgccagatatgagatgatcgccgaacttgctagaagggagcgggatgcaggcatcaagccagatcccgagattgatgctttcatgaaagctactgcagtacaaggacaggagactaatattataactgatctcactctcaaggtgcttgggctggacatttgtgctgacgttattattggcgatgagatgatcagaggaatttctggcgggcaaaagaaacgtgtgacaactggggagatgctaacggggccagcaagggctttatttatggacgaaatatccactggtctggatagctcgagcacatttgagattgtaaagtttatgaggcagttggtccatgtaatgagtgaaaccgtcatgatctctctgctccagccaccgccagagacatacaatctttttgatgacataatcctgctatcagaaggatacatagtgtaccatgggccgcgcgagaatatcctagaattctttgagtctgccggtttccggtgccctgacaggaaaggtgtcgcagactttcttcaagaggttacttccaagaaagaccaacaacaatactggtatcttgatcaggagcagtatcattatgtatctgtacccgactttgcagaacgtttcaaatcattccatgcatgccagcagatgcagaaggagttgcaaataccttttgaaaagtccaaaactcatcctgctgcgttgaccaccagaaaatatgggctttccagctgggaatcactcaaggcagtgatgtcaagagagcagctattgatgaagcgcaactctttcatctatattttcaaggtcacccagttgatcatccttgcactcatgtccatgactgtgtttctcagaataaagatgccccatgggcagattgctgatggcaccaaattctttggggctctgacttttggtttaataacaatcatgttcaatgggttcgctgagctacaattaaccataaagaagcttccagttttctacaaacatagggatttcttattcttccccgcttggaccttaggagtggcaaacataatcttaaaagttcctgtctcgttcgtggaatcagcagtatgggttgttctcacgtactatgtgatgggctttgcacctgctgcaggaaggttctttcgtcagtttatagctttctttgccacacaccaaatggcaatggctttattccggtttcttggtgctgttttgaaaacaatggttgtggccaatacttttgggatgtttgtgctgctcattattttcatctttggaggatttgtcatccgtagaaatgacatcagaccatggtggatctggggttactgggcatcacctatgatgtatagccaaaatgcaatatcggtcaacgaattccttgccagtaggtgggctattccaaacaatgacacgactatcgacgcgccaacagtaggcaaagcaattcttaaatccaaaggcttgtttactggagaatggggattttggctttccattggagccctcataggattcattattttgttcaacatgctctacctttgggcccttacatatttaagtcctagtagtggctccaatgccctggtttcagaaggtgaggatgatgtaaatgaaatggcattggaaggaagaaggaaagatgcaagaagaagcaaagatgaaatatcccaagttgtatccagtgatccaggcactaatggaggaacaaacacgctagctcaatcacgagtcactttgcctttccagcctcttgcactttgctttaaccatgtaaactattacgtcgacatgcctgcagaaatgaaggaacaaggattcacagaaagccgtttacaactactctctgatatcagtggcacttttaggccaggggttctaacagcactggttggtgtgagtggagctggaaagaccactttaatggatgtcctggcaggaaggaaaactagtggagctattgaaggagatattaccctgtcgggataccccaaaaaacaagaaacttttgcccggattagtggttattgtgaacaaactgatatccattctccaaatgttactgtatttgaatccatcacctactctgcttggttgcgtctttcctcagatattgatgatggtacaaaaaagatgtttgtggaggaagtgatggcccttgtagagcttgatgtgttgcgcgacgctctagtgggtctccctggagttagtgggttatcaactgagcaaagaaaaaggctgacaattgctgtggagctggtagcaaacccttcaatcatcttcatggatgaaccaacttctggtcttgatgctcgagctgcggcaattgtcatgcgtacagtaagaaatacggttaacactgggcgtactgtggtctgcacaatccatcagcccagcatcgacatatttgagtcttttgatgagcttctgcttttgaaacgtggaggtcaggttatttatgctggtgaacttggtcgccactctcacaaactagttgaatattttgaggcgattccaggtgttccaaagatcacagaaggatataatcctgcaacatgggtgctggaagttagttctcctctatctgaggctcgattgaacatgaattttgctgaaatttatgcaagctctgtgctttataggaaaaatcaagaggttatcaaggagttgagtattccccgatcagacaaccaggacctgtcatttcctacaaaatattcacagaatttctacggtcaatgtgccgcaaacttttggaagcaataccgttcgtactggaagaatccaccctacaatgctatgcgctatctgatgacatgtctctttggccttgtatttggtacagtattttggcaaaaaggaaagaacatagattcacaacaagatttatataatctgcttggagccacttacgctgctacattctttcttggggcttcaaattgcatcacggttcagcctgttgtatcgattgagcgagcagttttctaccgtgagaaggcagcggggatgtactctccgttatcctatgcatttgctcagacatgtgtggaggtcatctacaccatcttacaggggatactgtacacagtcatcatatatgcgatgatcggatatgactggaaagcggataaattcttctatttcctgtttttcatcactgcaagcttcaactacttcacattgttcggcatgatgttggtagcatgcactccctccgcattgctcgcgaacattctcatcacgtttgctctacctctgtggaacctctttgctggattcctcatcgttagaccggtgagcatgcaagctactcttctgggttccaaaatttgagtgagactctgatctgatctgatctgatgattcgcaggcaataccaatttggtggaggtggtactactgggcgaaccctgtgtcgtggaccatctatggcgttgttgcgtctcagtttggcgagaacgaaggtgagctttcagttcccggtgggacgcccgtggtggtgaagcagttcttgaaggataatctcggcatccagcatgacttactcggctatgttgtgctcgtccatttcgcctacgtcattgtgttcttcttcgtattcggttattccatcaagttcttcaacttccagaaacgttagcgggatcatttgtatgtaattaatcggtcgccgtaagttctagttctagttctagttctagtcaaagcaagtgcttgttttgggaggaagcctgtatgcaagtagcagtgtattcctcttgtttcttcaatgcaaaaatattaaaaggaagatgacgaatgcaaaagtgacatgtcttgttccttttcttcttgagtaatctgtgaggctaagagcagccgcagtgtgacggggttcgtttcaccatcaccttctgctctcggagatttctg

SEQ ID NO: 6023 - DNA, 2402 bp, Zea Mays
agacctaccaaatagcgcagctgtagcctctactctctagagggtggcgaaggcggagctgacctgaccggctgacccgcccaacccaacaacctctccgctggccatcttcctcccgggatccctctccctccttcgatccagctcagctctcttcctcccgccccgtactcttcttgatccgttcactcatacttctcgagagaaaaggaagaggattcgatctgttgctaccgctagctgcggtactaacagcagcagcagcaacaggaggtaccgtagaagaagggaagggaatccatgaagagatggggcagcagcggacaggccgccgattccttctaccaggtccgccccgattgcagccaaaacgtccccaacaccaagttcaagatcaaggcggggaagacactgagcgttaggaaatggcatgctgcgttcacgcgtgatggatgcctggatatcgcctctgttctgagccgcatacagagagggggtgtgcaccccacgatcaggggagaggtttgggagttcttgctcggctgctttgaccctgggagcaccttcgatgagagggaccagattagggagcggagaaggatgcagtatgccagatggaaggaagaatgcaaagagatggattctcatgtcggcagtggtaaaatcatcaccgccccgattataactgaggatggattccctattaaggatccgttggtattacttgaggctacttcagacacgcaaggtacttcaatcgccaccggcaacagtggaaatggaattgagaaccgtgtcttggataaacaaattattgactggaagcttaccttacatcaaataggccttgatgttctgcgcactgaccgcaccatggtattttatgagaacaaagataacatttcaaagttgtgggatattcttgctgtctatgcatggatcgacaaagaagttggttattgtcaaggaatgagtgatttatgttcacccatgatagtgctactccacaatgaagcagatgcattttggtgctttgagagattgatgcgtagactgcgaggtaatttcagatgcacacaacagtctgttggggtggaaaaccagcttcagcatcttgcttctatcattcaggtgcttgatccaaagttacatggccacctagaaagacttggcgggggtgactatctcttcgcattccgcatgttcatggtattgttccggcgagaactatcatttggggactccttgtacctttgggagtttctccttcagaatggcaccatctgcatattcatcaaaccatatttgaggcaaaatatgctagcaagcatacaaaaaaggcacgtggatacaagaaattgtggaaaacctgcttttgtatcaacaacactacaacagcaagcctcaatactgcaaagagtgcatagattccatccaactgctgtgttgtcttgctgatgcatgggtgcggacggggttgctggcggtctggaaggagtccatgctgtagaactgggcaggaagtcaaccagcaaacttgtgcattggtgacccattattccacatgcgaatcatacagatgatgtgggctctcgaatatgatcctggcatttgctccacttatgaagaggataatactggggctgtggtccacaaaattgaaggaaaggtaaaatcaatacgtcagtttggtaagtacgagagggagaatatgaagaagagggcaaacgatggtgatggacctgtccctatttcggtcttcctggttgctagtgtcctaaaagagaacagtacaaagcttctgcaagaggctcgagggattgatgacattattaggatattgaataatgttaatggaaatctggacgccaaaagagcttgcgttgttgcactaaagcttcataggaagtatcacaaaaaggaaaagaaatcctaacatcatatggcgagattgcacgcaacacaacactgggacttatatattgcttgtttctgttcctttcattttcccactcactgtatcggaggaagaaggtggtttacatatacagtcgcgggcgagacctcataaatataagtgacttattgtatctacaatatcaatgatccacgtccacagcctactcaattgtgaacatcaacctagtacatgataatttattcacgatcacaatggacttggcaaatattatcccatcagtatttgtcatgaacctcagtctactctcgtatcatcttaggtttttggatcccttcgttttgaaggaactgaaatttacttaatggagtaggttacttggtttacattctaccacttttcaaaatttaaatacaagtatatctcaaatttataggatgatgaatgaaaattgattttatatatcgatagtctatgtttctaa

SEQ ID NO: 6024 - DNA, 2529 bp, Zea Mays
cacgcttctgccattgcttggctccccccacccgaatcttttctgcttgttgaatctgaaatttgtgctgggttgagcagcgtccgtccttgcgcttagcgaattcgcggtgtttacgctccgatgcctcacgtaaggctatctctcaggcttcccaaaagctcgggtaggttgaatcgtggagagttccacagcgtcctagccgccgccgtggcctgacctcgccataaccttccattccatggaggtctccaccatcagcttctcgtccccgccgccgcgggccacgccggccgacctcgaggccgtcggcctccgccgcctcagcgacaacctccagcgcctgctcgacccggccttcctcaactgctcggacgccgagatcgcgctcgccgcggcgaggggcggcggcgccgtcggcgtccaccgctgcatcctcgccgccaggagcgccttcttcctcgaccacctcgcctccctcccggctccggccgccgccggcgagaggccacggctggagctcgccgacctcgtcccgggcggccgccacatcggccgcgacgccctcgtgcccgtcctcggctatctctacaccggccgcctcaagcccccggcgcaggacgccaccgtctgcatggacgacgcgtgcggccacgggacttgccgcccggccatagatttcgtcgtcgagtccatgacctgctcaatctgtgtattcagagggtcgcagtctccgctctcgatagccgctacctggacaaggagcttccggctgacatatacaacaagatcaaggagatccgccgccaaccagagaacgccattattctggaccctgagcatgacaagagggtcaggaacatcctcaaggccttggattccgacgacgtcgatctcgtcggcttgctgttgaaggaatcgacggtgaccttggacgatgcattcgcgatacactatgctgcagcctactgtgagcccaaggtgtttgcagagctgctcaaactggactctgctaacgtgaacctgaagaacagcggtgggtatacgccgctgcacatagcttgcatgaggagagagccggacatcattctttcgctggtggagaggggagcctgtgtgctggagaggaccctggatgggcgcgatgctcttactatctgcaagagactgacaagagagaaagactgcaataggaagttggacaagtacgaggagaaaagtaaggcttacttgtgtatcgacattttggagcaagaactcaagaggaaatccttcgttttggaccccatctctatctctatagaggagtcgattgccacgcctttgctggtcgataattttcacatgaggctcataaacttggaaaacagagttgcgtttgctcggatattcttcccttctgaagccaagcttgtcatgcgcatcgcacaagccgattcaacccaagagtttgccggcatcaccaacttcagcagactcaaggaagttgatctaaacgaaaccccaacgatgcagaataggaggcttcgcgaacgccttgatgccttaacaaagacagttgagctagggagacgatacttcccacactgttcggacgttctggataagttcctcaacgaagaatccactgatccgatcttccttgagactgggaccccggaggatcagcaagtcaagaggatgcgtttctctgagctcagagaggacgtgcgcaaggcgttcacgaaagataaggcagcagtggctgcaatagcttcctcggcgtcctcgtcttcgtctccgaggtgcagacgacccaataggaaatcacggtgatgtcagtctgttcaggacacctgcactgggttgtgtgtgttttgacatgtaacactgtttcagtagataatgctgattgtcagatttgctgccgctctacagaagattaagcgaccgtctgtttcaagaattattcagacagttacttgtgattctttcaagcagcagttacaaaatgtccaagttgtcttggaggttggccagcacccgtaggacggtgtccacgacgacagggtccgcgcccagcagcctgtgcagctgcgcctcgacgctagagcccaagacgtcgcccacgaacctgtacacctgagcgaggcgcaggtcgtccggagacagggggaactgaaccgtctcgacgtccggcgccagggtaccaccatcgtcggcgcaccaggccgggcaaccggcggcagagcggtgagggtgccgcggcggcacggcgaggcccagcttcttgtccgctctgaggaagtgtttctgggcgtggctgcgtatctgcgtgcccgtcttggtggcgacgaacgcctggaccctcttccagtcgcggccgaacagcagcagcgcgtggaggaagcggccgtgctcgtcggcggtccacttctcccgcggcctgctcaccacgtacggcttccgggacttcttccccgccatcccggccgacgacttcactgctgctgctgccatgtgtttctctgtctccttcccttgcttgcc

SEQ ID NO: 6025 - DNA, 1413 bp, Zea Mays
aaccgcagaggccaacagcacaacgagcgcaccactccccaagaaatggagctgacccaactcctcctcctcaccggcaccgcctcccgagctcctgctccgcgcgcgtagccgcgccgcagttcccagtaataacacgcccgcaagctccgcagtccgctccctgcgcgaggttacgtacattgcctttgcgtaccatgtggcgcttcggtttggtgttgctgtgcctgtgcatggagatctacttgtgtcaccgacaccgagccgacccgatgatgtcttgtgggtgttgtttgagccatgaagatggcgacgatgactgcttacaagtatcaagctcaggcgttgatgagggactacttgctagctgatctactcgttccgtacacctctgtgctctttggcattgtcctctgcaaggtggcttatgatttcactcgaatactgagctccttttatttcaaggggtatactttattgacaaaaatacagcgcatcgaatggaacaataggggtatgtccagcgcacatgcaatttttatcacggctgtatcattatatattgtcacgtcgactgatcttttctccgattgtgtcaaggggcctattacattccgtaattcgataatatccacttctgcattgggggtttctgttggctacttcatcactgatcttgaaatgatcttctggctgtatccttcccttggtggaatggaatatgtcctccaccatactctttctctggttgcaatagcttacacaatgttgtctggggaagggcagttttacacatacatggttctcatttcagagacaaccacccctgaaatcaacttgcgatggtttcttgacactgctggactgaagaaatcaagtgcttacttggttaatggaattctgatgtttgttgcatggctggtggcaaggatatttttgttcatgtatgtattttaccacatttatttgcattacagtcagataatgcagatgcatgcctttgggtactacctgacgtttgttgtgccatcggtgctctttgtaatgaacacaatgtggttcatgaagatcttaaaaggcgtgatgaaaacactggcaaaatggtcatgatggatgatgccaagaggatcccagaactatcaacaggatttggtctttctggcatcattgatctgtaaagttatggatatcagggtaactagagaaagttaatatgtaaagtattagcaaacaagctagattaggtgaaattgccctattttcagcagtgctggaagttcataaccagtttggtttgtaccggagatccagcacgctgttctgcttacccccaatgccatgtgtatatctggagcattttgcttaccccaatgccatgtgtatatttggagcattttaatggatggtttgttc

SEQ ID NO: 6026 - DNA, 1005 bp, Zea Mays
ttatccagctctcgccatcctttggcttatgatttcactcgaatactgagctccttttatttcaaggggtatactttattgacaaaaatacagcgcatcgaatggaacaataggggtatgtccagcgcacatgcaatttttatcacggctgtatcattatatattgtcacgtcgactgatcttttctccgattgtgtcaaggggcctattacattccgtaattcgataatatccacttctgcattgggggtttctgttggctacttcatcactgatcttgaaatgatcttctggctgtatccttcccttggtggaatggaatatgtcctccaccatactctttctctggttgcaatagcttacacaatgttgtctggggaagggcagttttacacatacatggttctcatttcagagacaaccacccctgaaatcaacttgcgatggtttcttgacactgctggactgaagaaatcaagtgcttacttggttaatggaattctgatgtttgttgcatggctggtggcaaggatatttttgttcatgtatgtattttaccacatttatttgcattacagtcagatgcatgcctttgggtactacctgacgtttgttgtgccatcggtgctctttgtaatgaacacaatgtggttcatgaagatcttaaaaggcgtgatgaaaacactggcaaaatggtcatgatggatgatgccaagaggatcccagaactatcaacaggatttggtctttctggcatcattgatctgtaaagttatggatatcagggtaactagagaaagttaatatgtaaagtattagcaaacaagctagattaggtgaaattgccctattttcagcagtgctggaagttcataaccagtttggtttgtaccggagatccagcacgctgttctgcttacccccaatgccatgtgtatatctggagcattttgcttaccccaatgccatgtgtatatttggagcattttaatggatggtttgttc

SEQ ID NO: 6027 - DNA, 2203 bp, Zea Mays
cacccaatacccaaacaagactgctctgtgctctcccaccgtgcccccagtcccacaagccaagcaacagttggatcactgacatccgcgacctcgtcgcagggcccacactacatgaccgacagctcgcgggttgtgcccgccagcctaccagaagcgtttccggcagcgaggtttcctcccatcgatctgtacgccctccccaccggtgggtcgcgcacctccaccaacctaccttcccgccccgcccgtcgccgtcgacgactcgccgtccgtttccgccctccaaaaccctactacctcttaccttccagccccgcgtcctccatggccaccaacggcagctctccgagggttcgggacacggagagcagtctggagaaggtgaagcggcagctgtcatcggggtctgggaggtacctgctgcaagggcccctgctcaagcgatctgagacgttacggaaatggaatgagcgttgggtcatattggacccgacatcaggaaagatggaatacaaactccggagaaatgaaactgccattaaggggaccattctgtttgacgcctcgagcaccattactttatctcctgtgaactttcaagggatgccaaaatataatggctgctgcttctacatcggaactcctcaaaagaaggattactttctttgtgctgaaactcctggtgctgcgaaagcttgggtatctacattacaccatggaggctaccaaggagatagaagctgcactaaaggtttcaatgagggcagctcttgggttggatacaaataactccaacgagggccaacttgatgacctaacaatcatgaaggagaccctacgagtgaaagatgaggaattgcaacatttggctaaggatattcgttcccgagatgctacaataaaggaaatagcggacaaactaacagaaactgctgaggctgcagaagctgctgcttctgcagctcatacaatggatgaacagaggcagcttttgtgttcggagattgagcgactaaaacaagccttggaaagacaaatagaacaatcagtggttaagcttagacaatccgaagagaaggttatcagcctgagcaaagagaaggagcagttgatgaaggaaagagatgctgcatttcaggaggctcatatgtggcgcattgaactagtaaaagccagggagcaagcagtgatacaggaagcaactattgcccgagcagaggagaaggctagagtttctgaagcagatgccgcagctcggatcaaggaagctgctgaaaagttgcatactgttgagaaagaaaaggaggagcttctagccctggttggtgttctccaatcacaagtcctgagagagcagagcagcacaaagcaagtatgcgaggagaggtctgaatcatgctcaggcgccgataattcacctctgttgacaaagcatgttgacgcatcagacgatgatgtggacaaagcctgcgtaagtgactctagatcggtcccggtttcgagcgatagcactgaggtccagctggctgtggatggggtggacatccgtcctgttggcgatgcagagtggagtagcttccagcagccagaagcgctgatcgctgatgtccgggaggtctccccagaggcggacggcggcagcttggatattcctgtggtcaatcccccaccagtcagtgatcatatccagggaggcggcggcgcaacccatccctgaaggcctgaggttgctgctaccttccgagattggtgtggttgctgagaacccaatagatagggatgtctaaatctggagagaagtgccgttgagagtgtatgcggattgtatgtccattgtattcggagtataagaccgaataaaaagatcgcagctgtgtttggctgtgggattgtaaaaaacttttagcgctacacctcaacaggactgggccctcttgggctaccggccggcactgccctgctgctcgtactcctgctgacttggaaaaacatcaggcagcaagctaggcgagatgttgcttttatctcttgggacagttcactagtgaaaggtgagccctctctgtcatgatagcctcgaaaccaacttcagaagcatctggatgccgagctgtaatggagagcagcaatatcactgttctccaacccatctgtgactgcatttgctttgacgagccgtgcaacctcctgtgtgatgttc

SEQ ID NO: 6028 - DNA, 2281 bp, Zea Mays
cccaaacaagactgctctgtgctctcccaccgtgcccccagtcccacaagccaagcaacagttggatcactgacatccgcgacctcgtcgcagggcccacactacatgaccgacagctcgcgggttgtgcccgccagcctaccagaagcgtttccggcagcgaggtttcctcccatcgatctgtacgccctccccaccggtgggtcgcgcacctccaccaacctaccttcccgccccgcccgtcgccgtcgacgactcgccgtccgtttccgccctccaaaaccctactacctcttaccttccagccccgcgtcctccatggccaccaacggcagctctccgagggttcgggacacggagagcagtctggagaaggtgaagcggcagctgtcatcggggtctgggaggtacctgctgcaagggcccctgctcaagcgatctgagacgttacggaaatggaatgagcgttgggtcatattggacccgacatcaggaaagatggaatacaaactccggagaaatgaaactgccattaaggggaccattctgtttgacgcctcgagcaccattactttatctcctgtgaactttcaagggatgccaaaatataatggctgctgcttctacatcggaactcctcaaaagaaggattactttctttgtgctgaaactcctggtgctgcgaaagcttgggtatctacattacatgcaactcagttagtcttacgagctcataaagaggcagtaaattctttggctgggaatggctctccagctacattaggcacagttgctactgcagttgctaatgctaatgcaacagccatggaggctaccaaggagatagaagctgcactaaaggtttcaatgagggcagctcttgggttggatacaaataactccaacgagggccaacttgatgacctaacaatcatgaaggagaccctacgagtgaaagatgaggaattgcaacatttggctaaggatattcgttcccgagatgctacaataaaggaaatagcggacaaactaacagaaactgctgaggctgcagaagctgctgcttctgcagctcatacaatggatgaacagaggcagcttttgtgttcggagattgagcgactaaaacaagccttggaaagacaaatagaacaatcagtggttaagcttagacaatccgaagagaaggttatcagcctgagcaaagagaaggagcagttgatgaaggaaagagatgctgcatttcaggaggctcatatgtggcgcattgaactagtaaaagccagggagcaagcagtgatacaggaagcaactattgcccgagcagaggagaaggctagagtttctgaagcagatgccgcagctcggatcaaggaagctgctgaaaagttgcatactgttgagaaagaaaaggaggagcttctagccctgagagcagagcagcacaaagcaagtatgcgaggagaggtctgaatcatgctcaggcgccgataattcacctctgttgacaaagcatgttgacgcatcagacgatgatgtggacaaagcctgcgtaagtgactctagatcggtcccggtttcgagcgatagcactgaggtccagctggctgtggatggggtggacatccgtcctgttggcgatgcagagtggagtagcttccagcagccagaagcgctgatcgctgatgtccgggaggtctccccagaggcggacggcggcagcttggatattcctgtggtcaatcccccaccagtcagtgatcatatccagggaggcggcggcgcaacccatccctgaaggcctgaggttgctgctaccttccgagattggtgtggttgctgagaacccaatagatagggatgtctaaatctggagagaagtgccgttgagagtgtatgcggattgtatgtccattgtattcggagtataagaccgaataaaaagatcgcagctgtgtttggctgtgggattgtaaaaaacttttagcgctacacctcaacaggactgggccctcttgggctaccggccggcactgccctgctgctcgtactcctgctgacttggaaaaacatcaggcagcaagctaggcgagatgttgcttttatctcttgggacagttcactagtgaaaggtgagccctctctgtcatgatagcctcgaaaccaacttcagaagcatctggatgccgagctgtaatggagagcagcaatatcactgttctccaacccatctgtgactgcatttgctttgacgagccgtgcaacctcctgtgtgatgttc

SEQ ID NO: 6029 - DNA, 2180 bp, Zea Mays
cccagtcccacaagccaagcaacagttggatcactgacatccgcgacctcgtcgcagggcccacactacatgaccgacagctcgcgggttgtgcccgccagcctaccagaagcgtttccggcagcgaggtttcctcccatcgatctgtacgccctccccaccggtgggtcgcgcacctccaccaacctaccttcccgccccgcccgtcgccgtcgacgactcgccgtccgtttccgccctccaaaaccctactacctcttaccttccagccccgcgtcctccatggccaccaacggcagctctccgagggttcgggacacggagagcagtctggagaaggtgaagcggcagctgtcatcggggtctgggaggtacctgctgcaagggcccctgctcaagcgatctgagacgttacggaaatggaatgagcgttgggtcatattggacccgacatcaggaaagatggaatacaaactccggagaaatgaaactgccattaaggggaccattctgtttgacgcctcgagcaccattactttatctcctgtgaactttcaagggatgccaaaatataatggctgctgcttctacatcggaactcctcaaaagaaggattactttctttgtgctgaaactcctggtgctgcgaaagcttgggtatctacattacatgcaactcagttagtcttacgagctcataaagaggcagtaaattctttggctgggaatggctctccagctacattaggcacagttgctactgcagttgctaatgctaatgcaacagccatggaggctaccaaggagatagaagctgcactaaaggtttcaatgagggcagctcttgggttggatacaaataactccaacgagggccaacttgatgacctaacaatcatgaaggagaccctacgagtgaaagatgaggaattgcaacatttggctaaggatattcgttcccgagatgctacaataaaggaaatagcggacaaactaacagaaactgctgaggctgcagaagctgctgcttctgcagctcatacaatggatgaacagaggcagcttttgtgttcggagattgagcgactaaaacaagccttggaaagacaaatagaacaatcagtggttaagcttagacaatccgaagagaaggttatcagcctgagcaaagagaaggagcagttgatgaaggaaagagatgctgcatttcaggaggctcatatgtggcgcattgaactagtaaaagccagggagcaagcagtgatacaggaagcaactattgcccgagcagaggagaaggctagagtttctgaagcagatgccgcagctcggatcaaggaagctgctgaaaagttgcatactgttgagaaagaaaaggaggagcttctagccctggttggtgttctccaatcacaagtcctgagagagcagagcagcacaaagcaagtatgcgaggagaggtctgaatcatgctcaggcgccgataattcacctctgttgacaaagcatgttgacgcatcagacgatgatgtggacaaagcctgcagtggagtagcttccagcagccagaagcgctgatcgctgatgtccgggaggtctccccagaggcggacggcggcagcttggatattcctgtggtcaatcccccaccagtcagtgatcatatccagggaggcggcggcgcaacccatccctgaaggcctgaggttgctgctaccttccgagattggtgtggttgctgagaacccaatagatagggatgtctaaatctggagagaagtgccgttgagagtgtatgcggattgtatgtccattgtattcggagtataagaccgaataaaaagatcgcagctgtgtttggctgtgggattgtaaaaaacttttagcgctacacctcaacaggactgggccctcttgggctaccggccggcactgccctgctgctcgtactcctgctgacttggaaaaacatcaggcagcaagctaggcgagatgttgcttttatctcttgggacagttcactagtgaaaggtgagccctctctgtcatgatagcctcgaaaccaacttcagaagcatctggatgccgagctgtaatggagagcagcaatatcactgttctccaacccatctgtgactgcatttgctttgacgagccgtgcaacctcctgtgtgatgttc

SEQ ID NO: 6030 - DNA, 2375 bp, Zea Mays
gccaagcaacagttggatcactgacatccgcgacctcgtcgcagggcccacactacatgaccgacagctcgcgggttgtgcccgccagcctaccagaagcgtttccggcagcgaggtttcctcccatcgatctgtacgccctccccaccggtgggtcgcgcacctccaccaacctaccttcccgccccgcccgtcgccgtcgacgactcgccgtccgtttccgccctccaaaaccctactacctcttaccttccagccccgcgtcctccatggccaccaacggcagctctccgagggttcgggacacggagagcagtctggagaaggtgaagcggcagctgtcatcggggtctgggaggtacctgctgcaagggcccctgctcaagcgatctgagacgttacggaaatggaatgagcgttgggtcatattggacccgacatcaggaaagatggaatacaaactccggagaaatgaaactgccattaaggggaccattctgtttgacgcctcgagcaccattactttatctcctgtgaactttcaggatgccaaaatataatggctgctgcttctgtatcctattttcctatattttggttaaaaagattgtttcagaaagagtttcttaaatagttatatttagaggaatcacatgttttaaggttgtgctgttcctttactgtatttagacatcggaactcctcaaaagaaggattactttctttgtgctgaaactcctggtgctgcgaaagcttgggtatctacattacatgcaactcagttagtcttacgagctcataaagaggcagtaaattctttggctgggaatggctctccagctacattaggcacagttgctactgcagttgctaatgctaatgcaacagccatggaggctaccaaggagatagaagctgcactaaaggtttcaatgagggcagctcttgggttggatacaaataactccaacgagggccaacttgatgacctaacaatcatgaaggagaccctacgagtgaaagatgaggaattgcaacatttggctaaggatattcgttcccgagatgctacaataaaggaaatagcggacaaactaacagaaactgctgaggctgcagaagctgctgcttctgcagctcatacaatggatgaacagaggcagcttttgtgttcggagattgagcgactaaaacaagccttggaaagacaaatagaacaatcagtggttaagcttagacaatccgaagagaaggttatcagcctgagcaaagagaaggagcagttgatgaaggaaagagatgctgcatttcaggaggctcatatgtggcgcattgaactagtaaaagccagggagcaagcagtgatacaggaagcaactattgcccgagcagaggagaaggctagagtttctgaagcagatgccgcagctcggatcaaggaagctgctgaaaagttgcatactgttgagaaagaaaaggaggagcttctagccctggttggtgttctccaatcacaagtcctgagagagcagagcagcacaaagcaagtatgcgaggagaggtctgaatcatgctcaggcgccgataattcacctctgttgacaaagcatgttgacgcatcagacgatgatgtggacaaagcctgcgtaagtgactctagatcggtcccggtttcgagcgatagcactgaggtccagctggctgtggatggggtggacatccgtcctgttggcgatgcagagtggagtagcttccagcagccagaagcgctgatcgctgatgtccgggaggtctccccagaggcggacggcggcagcttggatattcctgtggtcaatcccccaccagtcagtgatcatatccagggaggcggcggcgcaacccatccctgaaggcctgaggttgctgctaccttccgagattggtgtggttgctgagaacccaatagatagggatgtctaaatctggagagaagtgccgttgagagtgtatgcggattgtatgtccattgtattcggagtataagaccgaataaaaagatcgcagctgtgtttggctgtgggattgtaaaaaacttttagcgctacacctcaacaggactgggccctcttgggctaccggccggcactgccctgctgctcgtactcctgctgacttggaaaaacatcaggcagcaagctaggcgagatgttgcttttatctcttgggacagttcactagtgaaaggtgagccctctctgtcatgatagcctcgaaaccaacttcagaagcatctggatgccgagctgtaatggagagcagcaatatcactgttctccaacccatctgtgactgcatttgctttgacgagccgtgcaacctcctgtgtgatgttc

SEQ ID NO: 6031 - DNA, 944 bp, Zea Mays
catgaggctggtctttgggccctcgctgccagctcctgcgtgtaactaccggcgcgaagctcacgcaacggccgccacgcgcgccgctgaccccagcgtggccgtcgtggtcgtagctcctcgcctacaaatagggggaaccctggcaacgcacaccccccacccgaacacacaaagccatcggagcgccaccaggagagactcgccgcgagcagaggagtgatctgagggcggccgccgtcggtgaactcttgacgccatcgttggggcttcggtgtggaatttgggtgctgtgctgggcatcaagagcatgttggtggccttggcgggggtcgcggtgcatcgagaacgggcgaatttctcgccgtcgtcgcgtcgccaccgcggttccgcccttcaccgtgggctgctgcacctcctacgtgcacctcgacgggcaggcaactgaggacctagatgctcagcaggtggaaagtactgagcagaagctcgttgaaggcaagttgtgcccttgaccacttttatttacccaataatattctctataatcactttggcatgcttatgcataattttgatgggacccaataggtcaccctagtttggtcatctttataccttgtttactcctgaacttttgggtagtctttgctattgctatatgtggttttgggtgttaagataattattactcatgatcatgctttattattgttgttctattctattcatgataagactattgtgttaattggaacatggagcttaacttgagataaacgtgccacccttctgggtggaatgtgacgctcttggctgactaattaggaaagctagtggaggtctaccttaccctaaaggggcaagggcagtaggggagttgtcggtatagagaggttctcaggttgattttgctgcgatggcttttcagacgggggattctt

SEQ ID NO: 6032 - DNA, 149 bp, Zea Mays
gcctctgcatattatgcggaccaaagaagaatgaaggtggtagagatagggggagctcaggaactgcttaatgtattggaaggtgctaaagatgataaaacacgaaaagaaactctaaaagctcttgctgcgctttcaaaatctggtga

SEQ ID NO: 6033 - DNA, 162 bp, Zea Mays
tcttccatgaggagtccccttccattgcaaagaccaaagaagaatgaaggtggtagagatagggggagctcaggaactgcttaatgtattggaaggtgctaaagatgataaaacacgaaaagaaactctaaaagctcttgctgcgctttcaaaatctggtga

SEQ ID NO: 6034 - DNA, 1735 bp, Zea Mays
ggggggggggggggggggtcgccgcctgaaccatttggattccctcacctggaattcgaaaaacggcgactactcccctagagcagatccatctagactctagagtacatccgagggggaagcgagcagatcgatggcgatggctgagaaggtgaaggagaagatgctgatgctccgcagcagcgacaaccaggagttcgaggtgaaggagtcggtggcgatgcaatcgatgaccctcaagaaaatggtcgaggacggctgcgccgacaaaggcatcccgctccccaacgtcacctcccacatcctcgtcaaggtcatcgagtattgcaacaagcacgccgagccgaccgggccgggcgacgcggccggcaccaccaacaggtccgccgaggatgagctcaacatcttcgacgcagacttcgtcaatgtagagcactccaccctcttggacctcatcctggctgcaaactacctggacatcaaggggctcctgaacctggcccgccaaaccattacagacttgatcaatgggaagatgcctgaggaggtctgcaagaccaacatcaagaacgacttgaccatcccttccacgtcggccttggccaccacaatgccctcctccgagcgaaagcagatggaggccaggtttatcgcctatatgcaagaaactgctgaggagaggatgactgggtttgctgttcgtggtgaaaaatacagaaagcatggtgaacgtccgccacaaccaccattggagatagttaaatacccagctcttttggaaagagcttggggatgggattcgatactgccgtactgtcctgtgaattcttggcccctatacaagacttacctccaagaatattatgagcgcaattctcgtgaagtattggctcatcaagtggaagctaatgctgcctctggtcccaatctcaacggggctgatgagaatgatctggcaactctgttcaacttgtgtatcagtagggaggttcaacttttgaatctgctgaagcgccgtgatcaaaaacacaatgttgatgagatcagcctgaatgaaaagctcaccaactgtgcccgtcagataacttttgtggaatatgctggttttcctttccccagtgttgccttaaagtgcatcatggcggagtctgatctgttgtgcatgttgctgatgtgtgggactggaatgatatcccaagtcaacatttgctccaggattcgaaaggtggccttcagatttatgacctacaaaggacctggatgttttgctgctgctgccaccatgatggccaccacaaaggaggccaagttgatgagtggactgctgaggaacagatgtagggaaaataatggtccattttcaaggagtgtctttatcaggaaatggaccattgcagctatgttcagaatatgtgaggaatgttctcctgtggaagagtctacagggggctacactgctactaaattgatacttgatggatctgatgacaagaatccttgtgataaggaactagttaataaggacaacctgctgcagaggaacaagataaatcaaaaataccaaggactgttcaaaggaaaaacaactaaatgccgacaccctgtacaaaagcaagaaccaggagatggagcaacgcccgcatcacccagtccggccaatcccatctcaactgtggtgcaaaaactttgaacatgaaacagctccaaaactgaattcattctttttgaagaggag

SEQ ID NO: 6035 - DNA, 1676 bp, Zea Mays
ggggggggggggggggggtcgccgcctgaaccatttggattccctcacctggaattcgaaaaacggcgactactcccctagagcagatccatctagactctagagtacatccgagggggaagcgagcagatcgatggcgatggctgagaaggtgaaggagaagatgctgatgctccgcagcagcgacaaccaggagttcgaggtgaaggagtcggtggcgatgcaatcgatgaccctcaagaaaatggtcgaggacggctgcgccgacaaaggcatcccgctccccaacgtcacctcccacatcctcgtcaaggtcatcgagtattgcaacaagcacgccgagccgaccgggccgggcgacgcggccggcaccaccaacaggtccgccgaggatgagctcaacatcttcgacgcagacttcgtcaatgtagagcactccaccctcttggacctcatcctggctgcaaactacctggacatcaaggggctcctgaacctggcccgccaaaccattacagacttgatcaatgggaagatgcctgaggaggtctgcaagaccaacatcaagaacgacttgaccatcccttccacgtcggccttggccaccacaatgccctcctccgagcgaaagcagatggaggccaggtttatcgcctatatgcaagaaactgctgaggagaggatgactgggtttgctgttcgtggtgaaaaatacagaaagcatggtgaacgtccgccacaaccaccattggagatagttaaatacccagctcttttggaaagagcttggggatgggattcgatactgccgtactgtcctgtgaattcttggcccctatacaagacttacctccaagaatattatgagcgcaattctcgtgaagtattggctcatcaagtggaagctaatgctgcctctggtcccaatctcaacggggctgatgagaatgatctggcaactctgttcaacttgtgtatcagtagggaggttcaacttttgaatctgctgaagcgccgtgatcaaaaacacaatgttgatgagatcagcctgaatgaaaagctcaccaactgtgcccgtcagataacttttgtggaatatgctggttttcctttccccagtgttgccttaaagtgcatcatggcggagtctgatctgttgtgcatgttgctgatgtgtgggactggaatgatatcccaagtcaacatttgctccaggattcgaaaggtggccttcagatttatgacctacaaaggacctggatgttttgctgctgctgccaccatgatggccaccacaaaggaggccaagttgatgagtggactgctgaggaacagatgtagggaaaataatggtccattttcaaggagtgtctttatcaggaaatggaccattgcagctatgttcagaatatgtgaggaatgttctcctgtggaagagtctacagggggctacactgctactaaattgatacttgatggatctgatgacaagaatccttgtgataaggaactagttaataaggacaacctgctgcagaggaacaagataaatcaaaaataccaaggactgttcaaaggaaaaacaactaaatgccgacaccctgtacaaaagcaagaaccaggagatggaggttgtggaaatcacagttctaacgaatgtaatatgatacttttat

SEQ ID NO: 6036 - DNA, 1427 bp, Zea Mays
ggcggatggagcagcgggcctaactgcagagttttgaagctttgaaccccagggcggttactgttgtcgtagaccccatatagagtgtgaaggggaaagtagttattgatgtattccgcctaattaatcctcagaccatgatgcttggccaggagccacggcagacgacatcaaaggtcgggcacctaaataactcatcgattcaggctcttatccatgggctgaacagacactactaatttgcaatcaattaccgcaaaaatgagctcgagaagaaaatgttgttgaacttgcacaaaaagaaatggatagatgggctaattttgaagaggtttgacactcactcaaaaaaccaacgagcaaactgtccaggttccatccgtcttgtatgggaatgaccattgagcaagccaaaaaattacatgtgctcggattgtgctaaagaaaatggtgcaaagagaccctcaaactcatacccagtttcaccaaactctgattctaagatatggacctcggtggttttctccacgttaggaaagctggaagagtcttttctactcagttttatgataacagtggtgttatggtcaaacaaagtcttgcgtttcctattctttaccagcccgagccacacaaatggtcgagtaactttgcatacctactgttcagtaagtttgcactgggacaagccccagccgcacaaatggcggagaccagcccagcggcgcggcaccagaacacctagaagaagaggttgaagtggaagtgggagaggaatcagttcctcaatcagaaacttctccagctgcagttcctcctgaaggtactctagtaggttacccggttaattgtgatattcttgtggaagagcctgacactcctcctcatcaaggcaagccccggtgcatttaaccctttccttgtgttttaaaaacttttatcacttatatgctgcattaggtggtaggagttgtgtgaataaacatttgatgcattcccattccttggaatattgattatcatccttgatacctgtttttcaaagctagaaatgcttagtatgcttatagattaggaacaaaatgtttttgatttatgaatcatgtttttacaaaagaaaaaggctgggaatgatgaaggcgtcaaaggccttgatgaattcatcattccagcggattacctctgacaagtacaagtttctgagaaatagtttaaaatgagaccagacgttgagcaggaaaggtcgtccgtctatgtcgtttaaggaccgtaacgattattggcctacatgatctaggaccttttaactggccacatgcctcatcatgggtaagcttagcttcggctggaccaataccagaaaggccggcccgcactaggagtggagagatggcgagagtatcgtgtacccacctggcaagaggttg

SEQ ID NO: 6037 - DNA, 304 bp, Zea Mays
gtttgccctaaccattctaaagtcacaaactgaactccactgtccctggtcgacttcatagttgttccatcatgctctgctgttctactacacatatatcacaccctcaacctatcccaatccttggattccactggaacaccatgagcgtgtggtgaacacagacagtggtgaccacgcaagccgactgtccatctcaccgtggccagtccatcctgtgatcgcctggaatgccgccacgccactagtgaacgccaccgtgattgagcttcacgtcgaccggccaagccatcctttctccgcg

SEQ ID NO: 6038 - DNA, 1211 bp, Zea Mays
ttggctgccctgtttgctttggaacgtgcaacgtttctgggaatgtcaagaattattttggagactgatgctatggagttgaagaagggcctgacaacgacgaccctagaccggagtgtagatggcagcttgttcagacaaatcagagaattcatgaatgtgtcatttgattgttgggaggttcaacattgtccaaggacgtgcaacaaagtggcagattgccttgcgaagtatggggcgagcgtggtttgctctggttcgaatgttttcatgagccaagtccccgcctttgtttccaatttagtctccggcgatctgcctggagatgttgtttaacagtctctatgagtctgtgtttcaaaaaaaaagtcttcttcgttcttccaatctccttcctattcctctgttagggtagccagtagctaacagctaggtcctgctctgctggtacgctgtcatcctggatctaccgcgcgtcatcctccttgcctaggcgtagcgctcgggcggaaccgagctgcggccttaagcatcgacaccgtcctcgacttccccaccagtacctacagtgaaggccgaccagattgaagtgaagcgccaacgccgacctgtagatctcgcctccaccgccgctagtgccctccatcccctgtccgcgagtctcggcaaccaaatctgagttttgaagctttgaaccccagggcggttactgttgtcgtagaccccatatagagtgtgaaggggaaagtagttattgatgtattccgcctaattaatcctcagaccatgatgcttggccaggagccacggcagacgacatcaaaggtcgggcacctaaataactcatcgattcaggctcttatccatgggctgaacagacactactaatttgcaatcaattaccgcaaaaatgagctcgagaagaaaatgttgttgaacttgcacaaaaagaaatggatagatgggctaattttgaagaggtttgacactcactcaaaaaaccaacgagcaaactgtccaggttccatccgtcttgtatgggaatgaccattgagcaagccaaaaaattacatgtgctcggattgtgctaaagaaaatggtgcaaagagaccctcaaactcatacccagtttcaccaaactctgattctaagaattggtagttttgcctgcatttccactcccaaattatatcatgagcagtgcttagttt

SEQ ID NO: 6039 - DNA, 565 bp, Zea Mays
catgtcggccatgtgggacacggtgcgcgccgccatgagggaggccgaagcagcagcactggagccaactcaaagccctcccatctctgcagaagatggaaccgtggatggagggagcattcctgcggcggatggagcagcgggcctaactgcaggtcagttgttcgatcaattatgcaactcaccatactcagtcaattattagactatttgcttggtttgatttattttttactcggcgtatattttggttgatgtagtcagcatcttattgcatatctgtttttgttgttctatgtttgctttctatttcttagaagcatttgttacataaattagtatggctcctaatggctgacgtttgtaatgcattttgttagatagcacctcattttgtcgacctgcgcacgttcttctgtaaaaaaagtgacattaactccctcactccagtttattatcccatgatagaataactgtgaaaaatctgtcaaacccactgaacgctattatacataagctggcaaacaaatctcttaattgcactgcacccttttgtatattcagg

SEQ ID NO: 6040 - DNA, 74 bp, Zea Mays
gccgaagcagcagcactggagccaactcaaagaaacgacgccgctggtgtccatctccggcgtggcgccgccgc

SEQ ID NO: 6041 - DNA, 3179 bp, Zea Mays
ggatggcccagctggcagacacgaattagattcatctacaatataacaatcaataaggttagcacaaatatcacttcacatgagacatacttcatggctttggataccggtgtgttgtacctgtaatcttaaaagttatctaccaatattgaaactttactcatcttgtctaataaaactaacaatcacacattcagaacgtagatgggttgattgtagcaaatagatgataatgttcagttacaaacatgcacctatatatgcggaacaataggttcagattaatggaaaagataagaaatgctaaatttttcatgtggtggtgcatctttcgcaccttctagagcctaatcctagagtaatattggcatcacgaaaaaatacaggtcattaatcttccttgcaaactgcaatgtattgatcaaaggatgccataccgatctagaaagtcaaatgagcactctaccctaatgggttcaagatttatagttgtattgttatgtgcaaccaaatgaagttatcaagatttaagtttaatagaaatggggttgcatttggttgcacattttagctgaacgtaaaaatagaaaagacatagaaacggttaaaattgtaaccaataaactgaacacatttctatgattaagcgtagcacctgacaactgacgaccacaactaacaataatatctatgagattaaccttagcacctgtccaaccttcctgtcgagccttaacacctgtcgagccttccttgtttgagcctcttgagggttgttctcaagaagcatccatagccaaagtgtgctgcagtagcatagtttttctgcttgaagcaaagagccatggcactagaaagcacaagccaaagtgtgctgtagtagcatagtttttctgccacatctgccactttgcgctgttattaagcctgcatcccaagccacatctgccatcttacacgtatacaagacgagcatagattcattttaccactacatcccaaaccacatctgccactttgcattgttattaagcctgtgttacagacacgagacgcacagtgaaaaaactaaccactataaagtacagtttccagcatcagttggcgtctgcatcatggttgtactgcggctgaggttagttttctgtggcggtggaggcgaagtcatgggcacaggctgctgccctgcaggctgcggtctgccaaaaaccaaggaaatatatgaaggaaatcaacaaggaaataccactgcaacagtttgttcagagaactgctcttaagatctaagatgaggagatgaaaatgctgcaaggaccaaagaaattttcgcagaaactcctaaaacagagatactcttctcacctagattctctatgcctgtctcttcccaaattcaagagccacagatactaaataaaatacatgtgccttgtgacatttgataagcgtagatgtagcaggtgtattaacaagaaacattcatcgaacctgatcaatgtttatgttgtaagcacacattgatcgaaccatttcttctctgtaaactaatgtattaacaagaatccaagtggggtataacttgggagcaatggacctcctttaggtgctgatgtatcgtccttcttatatttacactgtcccaatgatgaagagggtggcacgccaaccgccacggccataaaaaggaaatggcctatgccgtatacaccttcttgagtaacaggaggggcagctggtgcaaccacagcagcagtgcctgatgtatcgtccttcttgagtaacatccttgtacaggttttttacatatagtgatttaacctaaaaaaatacgcacattcatatacaagctgaatgtttgattgcctgctgagttgtcttgtgacggcagcgaaatcttctcgaaattaatcgagagttgtcgacacatttgtctgtaattaaaaattctaaattaactttttataattaatttgtgtggtattgataatgttttccacacgtattttgcatattatagtgatgtttgttgttccgtatcaatgtttcatacaaatcttttacttccatcgcaacgcacgggcacatatctatactatatattgttaacaagggccaagcattgcttatggattgtggggaatggaaccactctgttcaacagcaattttgtttggcaaaagattgtcaaggacacaagggatagaggttgtttttaaatgccactgatgagaaggagttgttgaatgcaattttcaagcttgctgttgagtatcctcacgcggacaatttagctggcgaggagacaaggcagcgattgagtaccaggataagtctattcaatgtcgctgaggcaacagttacaagatcctagaagaaaacccgtggcagctctacactacaataaaggtgataaatatgtctcacccaatggaagacatgatcaaggtagcaagatgttgaccccatgggtccttttggtggaataatgatagagtgcggcaccaatcaacctattgagaaagtgcttgcagctgaagatgcagcgcgaggatgttgcagcattcgaacaacgccaacgagctgctcttgcgccggaagctggaggagcagcagcaggctgccgaacttcagcacgccattgagctccagagccgccgcctcatgggtctccagctgctcgacctcaaggctcgcgcagctgcgacagcagcggcggcatcggcactgccaacaccagttgccaatgccttcgcgtccagccatcctttgagcaccatggcagtcgagtcgccactagagtccggagagtagctcaagctgagcagtgggtttgctctggaggggaagctcaacggtggcgacaaggaagaatctgcttgcgaggcgagccctgacgccgctgatagcgaccaaaggtggattaaacaacccatttcatcattcttcttccttgttagttatgattcccacgcttgcctttcatgaatcatgatcctatatgtatattgatattaatcagttctagaaagttcaacaacatttgagcatgtcaaaacctgatcgttgcctgttccatgtcaacagtggattataacacgtgcaaatgtagctatttgtgtgagaagacgtgtgatcgactctttttttatatagatagcattgagatcaactgtttgtat

SEQ ID NO: 6042 - DNA, 1317 bp, Zea Mays
ataggtgattgatttctcgatttgggtcgattggagcaatcgttggctattctatcggcatgaataattgatgagacaaactcaatgtcaaacatatttctttgagttttcttcattgatagagtcaaaggcataaagataggacgacaactgacagcacacccctgactaagcagtggagaggtaaagcatcacagtagtctggaggaaaccgacaacacaccggtgaccaagcagtggagaagaggagcatcacagtagtctcgcattgcttatggattgtggggaatggaaccactctgttcaacagcaattttgtttggcaaaagattgtcaaggacacaagggatagaggttgtttttaaatgccactgatgagaaggagttgttgaatgcaattttcaagcttgctgttgagtatcctcacgcggacaatttagctggcgaggagacaaggcagcgattgagtaccaggataagtctattcaatgtcgctgaggcaacagttacaagatcctagaagaaaacccgtggcagctctacactacaataaaggtgataaatatgtctcacccaatggaaggtagcaagatgttgaccccatgggtccttttggtggaataatgatagagtgcggcaccaatcaacctattgagaaagtgcttgcagctgaagatgcagcgcgaggatgttgcagcattcgaacaacgccaacgagctgctcttgcgccggaagctggaggagcagcagcaggctgccgaacttcagcacgccattgagctccagagccgccgcctcatgggtctccagctgctcgacctcaaggctcgcgcagctgcgacagcagcggcggcatcggcactgccaacaccagttgccaatgccttcgcgtccagccatcctttgagcaccatggcagtcgagtcgccactagagtccggagagtagctcaagctgagcagtgggtttgctctggaggggaagctcaacggtggcgacaaggaagaatctgcttgcgaggcgagccctgacgccgctgatagcgaccaaaggtggattaaacaacccatttcatcattcttcttccttgttagttatgattcccacgcttgcctttcatgaatcatgatcctatatgtatattgatattaatcagttctagaaagttcaacaacatttgagcatgtcaaaacctgatcgttgcctgttccatgtcaacagtggattataacacgtgcaaatgtagctatttgtgtgagaagacgtgtgatcgactctttttttatatagatagcattgagatcaactgtttgtat

SEQ ID NO: 6043 - DNA, 1221 bp, Zea Mays
aataggtgattgatttctcgatttgggtcgattggagcaatcgttggctattctatcggcatgaataattgatgagacaaactcaatgtcaaacatatttctttgagttttcttcattgatagagtcaaaggcataaagataggacgacaactgacagcacacccctgactaagcagtggagaggtaaagcatcacagtagtctggaggaaaccgacaacacaccggtgaccaagcagtggagaagaggagcatcacagtagtctcgcattgcttatggattgtggggaatggaaccactctgttcaacagcaattttgtttggcaaaagattgtcaaggacacaagggatagaggttgtttttaaatgccactgatgagaaggagttgttgaatgcaattttcaagcttgctgttgagtatcctcacgcggacaatttagctggcgaggagacaaggcagcgattgagtaccaggataagtctattcaatgtcgctgaggcaacagttacaagatcctagaagaaaacccgtggcagctctacactacaataaaggtgataaatatgtctcacccaatggaaggcgcgaggatgttgcagcattcgaacaacgccaacgagctgctcttgcgccggaagctggaggagcagcagcaggctgccgaacttcagcacgccattgagctccagagccgccgcctcatgggtctccagctgctcgacctcaaggctcgcgcagctgcgacagcagcggcggcatcggcactgccaacaccagttgccaatgccttcgcgtccagccatcctttgagcaccatggcagtcgagtcgccactagagtccggagagtagctcaagctgagcagtgggtttgctctggaggggaagctcaacggtggcgacaaggaagaatctgcttgcgaggcgagccctgacgccgctgatagcgaccaaaggtggattaaacaacccatttcatcattcttcttccttgttagttatgattcccacgcttgcctttcatgaatcatgatcctatatgtatattgatattaatcagttctagaaagttcaacaacatttgagcatgtcaaaacctgatcgttgcctgttccatgtcaacagtggattataacacgtgcaaatgtagctatttgtgtgagaagacgtgtgatcgactctttttttatatagatagcattgagatcaactgtttgtat

SEQ ID NO: 6044 - DNA, 2407 bp, Zea Mays
aataggtgattgatttctcgatttgggtcgattggagcaatcgttggctattctatcggcatgaataattgatgagacaaactcaatgtcaaacatatttctttgagttttcttcattgatagagtcaaaggcataaagataggacgacaactgacagcacacccctgactaagcagtggagaggtaaagcatcacagtagtctggaggaaaccgacaacacaccggtgaccaagcagtggagaagaggagcatcacagtagtctctttccagcatcagttggcgtctgcatcatggttgtactgcggctgaggttagttttctgtggcggtggaggcgaagtcatgggcacaggctgctgccctgcaggctgcggtctgccaaaaaccaaggaaatatatgaaggaaatcaacaaggaaataccactgcaacagtttgttcagagaactgctcttaagatctaagatgaggagatgaaaatgctgcaaggaccaaagaaattttcgcagaaactcctaaaacagagatactcttctcacctagattctctatgcctgtctcttcccaaattcaagagccacagatactaaataaaatacatgtgccttgtgacatttgataagcgtagatgtagcaggtgtattaacaagaaacattcatcgaacctgatcaatgtttatgttgtaagcacacattgatcgaaccatttcttctctgtaaactaatgtattaacaagaatccaagtggggtataacttgggagcaatggacctcctttaggtgctgatgtatcgtccttcttatatttacactgtcccaatgatgaagagggtggcacgccaaccgccacggccataaaaaggaaatggcctatgccgtatacaccttcttgagtaacaggaggggcagctggtgcaaccacagcagcagtgcctgatgtatcgtccttcttgagtaacatccttgtacaggttttttacatatagtgatttaacctaaaaaaatacgcacattcatatacaagctgaatgtttgattgcctgctgagttgtcttgtgacggcagcgaaatcttctcgaaattaatcgagagttgtcgacacatttgtctgtaattaaaaattctaaattaactttttataattaatttgtgtggtattgataatgttttccacacgtattttgcatattatagtgatgtttgttgttccgtatcaatgtttcatacaaatcttttacttccatcgcaacgcacgggcacatatctatactatatattgttaacaagggccaagcattgcttatggattgtggggaatggaaccactctgttcaacagcaattttgtttggcaaaagattgtcaaggacacaagggatagaggttgtttttaaatgccactgatgagaaggagttgttgaatgcaattttcaagcttgctgttgagtatcctcacgcggacaatttagctggcgaggagacaaggcagcgattgagtaccaggataagtctattcaatgtcgctgaggcaacagttacaagatcctagaagaaaacccgtggcagctctacactacaataaaggtgataaatatgtctcacccaatggaagacatgatcaaggtagcaagatgttgaccccatgggtccttttggtggaataatgatagagtgcggcaccaatcaacctattgagaaagtgcttgcagctgaagatgcagagtgttgtatttgcctatcggcttacgatgacagtgcagagttgcgcgaactaccctgcgcgaggatgttgcagcattcgaacaacgccaacgagctgctcttgcgccggaagctggaggagcagcagcaggctgccgaacttcagcacgccattgagctccagagccgccgcctcatgggtctccagctgctcgacctcaaggctcgcgcagctgcgacagcagcggcggcatcggcactgccaacaccagttgccaatgccttcgcgtccagccatcctttgagcaccatggcagtcgagtcgccactagagtccgctcaagctgagcagtgggtttgctctggaggggaagctcaacggtggcgacaaggaagaatctgcttgcgaggcgagccctgacgccgctgatagcgaccaaaggtggattaaacaacccatttcatcattcttcttccttgttagttatgattcccacgcttgcctttcatgaatcatgatcctatatgtatattgatattaatcagttctagaaagttcaacaacatttgagcatgtcaaaacctgatcgttgcctgttccatgtcaacagtggattataacacgtgcaaatgtagctatttgtgtgagaagacgtgtgatcgactctttttttatatagatagcattgagatcaactgtttgtat

SEQ ID NO: 6045 - DNA, 1590 bp, Zea Mays
aaaccaacacgtttatatgataaccttaatgtatatcagacattcgtgaaaaatatcagaaattcatccggaaattcggtgaagtgctaatcgcttgcggcttgcctgccggtcttgtggttttgtgctgctctcgctgtccgcagatgctctccatggaagcctctccccagttccttgatggaaggtgaataggtgattgatttctcgatttgggtcgattggagcaatcgttggctattctatcggcatgaataattgatgagacaaactcaatgtcaaacatatttctttgagttttcttcattgatagagtcaaaggcataaagataggacgacaactgacagcacacccctgactaagcagtggagaggtaaagcatcacagtagtctggaggaaaccgacaacacaccggtgaccaagcagtggagaagaggagcatcacagtagtctcgcattgcttatggattgtggggaatggaaccactctgttcaacagcaattttgtttggcaaaagattgtcaaggacacaagggatagaggttgtttttaaatgccactgatgagaaggagttgttgaatgcaattttcaagcttgctgttgagtatcctcacgcggacaatttagctggcgaggagacaaggcagcgattgagtaccaggataagtctattcaatgtcgctgaggcaacagttacaagatcctagaagaaaacccgtggcagctctacactacaataaaggtgataaatatgtctcacccaatggaagatatcatatttagacatgatcaaggtagcaagatgttgaccccatgggtccttttggtggaataatgatagagtgcggcaccaatcaacctattgagaaagtgcttgcagctgaagatgcagagtgttgtatttgcctatcggcttacgatgacagtgcagagttgcgcgaactaccctgcgcgaggatgttgcagcattcgaacaacgccaacgagctgctcttgcgccggaagctggaggagcagcagcaggctgccgaacttcagcacgccattgagctccagagccgccgcctcatgggtctccagctgctcgacctcaaggctcgcgcagctgcgacagcagcggcggcatcggcactgccaacaccagttgccaatgccttcgcgtccagccatcctttgagcaccatggcagtcgagtcgccactagagtccggagagtagctcaagctgagcagtgggtttgctctggaggggaagctcaacggtggcgacaaggaagaatctgcttgcgaggcgagccctgacgccgctgatagcgaccaaaggtggattaaacaacccatttcatcattcttcttccttgttagttatgattcccacgcttgcctttcatgaatcatgatcctatatgtatattgatattaatcagttctagaaagttcaacaacatttgagcatgtcaaaacctgatcgttgcctgttccatgtcaacagtggattataacacgtgcaaatgtagctatttgtgtgagaagacgtgtgatcgactctttttttatatagatagcattgagatcaactgtttgtat

SEQ ID NO: 6046 - DNA, 1519 bp, Zea Mays
aaaccaacacgtttatatgataaccttaatgtatatcagacattcgtgaaaaatatcagaaattcatccggaaattcggtgaagtgctaatcgcttgcggcttgcctgccggtcttgtggttttgtgctgctctcgctgtccgcagatgctctccatggaagcctctccccagttccttgatggaaggtgaataggtgattgatttctcgatttgggtcgattggagcaatcgttggctattctatcggcatgaataattgatgagacaaactcaatgtcaaacatatttctttgagttttcttcattgatagagtcaaaggcataaagataggacgacaactgacagcacacccctgactaagcagtggagaggtaaagcatcacagtagtctggaggaaaccgacaacacaccggtgaccaagcagtggagaagaggagcatcacagtagtctcgcattgcttatggattgtggggaatggaaccactctgttcaacagcaattttgtttggcaaaagattgtcaaggacacaagggatagaggttgtttttaaatgccactgatgagaaggagttgttgaatgcaattttcaagcttgctgttgagtatcctcacgcggacaatttagctggcgaggagacaaggcagcgattgagtaccaggataagtctattcaatgtcgctgaggcaacagttacaagatcctagaagaaaacccgtggcagctctacactacaataaaggtgataaatatgtctcacccaatggaagacatgatcaaggtagcaagatgttgaccccatgggtccttttggtggaataatgatagagtgcggcaccaatcaacctattgagaaagtgcttgcagctgaagatgcagcgcgaggatgttgcagcattcgaacaacgccaacgagctgctcttgcgccggaagctggaggagcagcagcaggctgccgaacttcagcacgccattgagctccagagccgccgcctcatgggtctccagctgctcgacctcaaggctcgcgcagctgcgacagcagcggcggcatcggcactgccaacaccagttgccaatgccttcgcgtccagccatcctttgagcaccatggcagtcgagtcgccactagagtccggagagtagctcaagctgagcagtgggtttgctctggaggggaagctcaacggtggcgacaaggaagaatctgcttgcgaggcgagccctgacgccgctgatagcgaccaaaggtggattaaacaacccatttcatcattcttcttccttgttagttatgattcccacgcttgcctttcatgaatcatgatcctatatgtatattgatattaatcagttctagaaagttcaacaacatttgagcatgtcaaaacctgatcgttgcctgttccatgtcaacagtggattataacacgtgcaaatgtagctatttgtgtgagaagacgtgtgatcgactctttttttatatagatagcattgagatcaactgtttgtat

SEQ ID NO: 6047 - DNA, 1532 bp, Zea Mays
aaaccaacacgtttatatgataaccttaatgtatatcagacattcgtgaaaaatatcagaaattcatccggaaattcggtgaagtgctaatcgcttgcggcttgcctgccggtcttgtggttttgtgctgctctcgctgtccgcagatgctctccatggaagcctctccccagttccttgatggaaggtgaataggtgattgatttctcgatttgggtcgattggagcaatcgttggctattctatcggcatgaataattgatgagacaaactcaatgtcaaacatatttctttgagttttcttcattgatagagtcaaaggcataaagataggacgacaactgacagcacacccctgactaagcagtggagaggtaaagcatcacagtagtctggaggaaaccgacaacacaccggtgaccaagcagtggagaagaggagcatcacagtagtctcgcattgcttatggattgtggggaatggaaccactctgttcaacagcaattttgtttggcaaaagattgtcaaggacacaagggatagaggttgtttttaaatgccactgatgagaaggagttgttgaatgcaattttcaagcttgctgttgagtatcctcacgcggacaatttagctggcgaggagacaaggcagcgattgagtaccaggataagtctattcaatgtcgctgaggcaacagttacaagatcctagaagaaaacccgtggcagctctacactacaataaaggtgataaatatgtctcacccaatggaagatatcatatttagacatgatcaaggtagcaagatgttgaccccatgggtccttttggtggaataatgatagagtgcggcaccaatcaacctattgagaaagtgcttgcagctgaagatgcagcgcgaggatgttgcagcattcgaacaacgccaacgagctgctcttgcgccggaagctggaggagcagcagcaggctgccgaacttcagcacgccattgagctccagagccgccgcctcatgggtctccagctgctcgacctcaaggctcgcgcagctgcgacagcagcggcggcatcggcactgccaacaccagttgccaatgccttcgcgtccagccatcctttgagcaccatggcagtcgagtcgccactagagtccggagagtagctcaagctgagcagtgggtttgctctggaggggaagctcaacggtggcgacaaggaagaatctgcttgcgaggcgagccctgacgccgctgatagcgaccaaaggtggattaaacaacccatttcatcattcttcttccttgttagttatgattcccacgcttgcctttcatgaatcatgatcctatatgtatattgatattaatcagttctagaaagttcaacaacatttgagcatgtcaaaacctgatcgttgcctgttccatgtcaacagtggattataacacgtgcaaatgtagctatttgtgtgagaagacgtgtgatcgactctttttttatatagatagcattgagatcaactgtttgtat

SEQ ID NO: 6048 - DNA, 648 bp, Zea Mays
aataggtgattgatttctcgatttgggtcgattggagcaatcgttggctattctatcggcatgaataattgatgagacaaactcaatgtcaaacatatttctttgagttttcttcattgatagagtcaaaggcataaagataggacgacaactgacagcacacccctgactaagcagtggagaggtaaagcatcacagtagtctggaggaaaccgacaacacaccggtgaccaagcagtggagaagaggagcatcacagtagtctcgcattgcttatggattgtggggaatggaaccactctgttcaacagcaattttgtttggcaaaagattgtcaaggacacaagggatagaggttgtttttaaatgccactgatgagaaggagttgttgaatgcaattttcaagcttgctgttgagtatcctcacgcggacaatttagctggcgaggagacaaggcagcgattgagtaccaggataagtctattcaatgtcgctgaggcaacagttacaagatcctagaagaaaacccgtggcagctctacactacaataaaggtgataaatatgtctcacccaatggaagagtgcggcaccaatcaacctattgagaaagtgcttgcagctgaagatgcagcgcgaggatgttg

SEQ ID NO: 6049 - DNA, 721 bp, Zea Mays
aataggtgattgatttctcgatttgggtcgattggagcaatcgttggctattctatcggcatgaataattgatgagacaaactcaatgtcaaacatatttctttgagttttcttcattgatagagtcaaaggcataaagatagaggacgacaactgacagcacacccctgactaagcagtggagaggtaaagcatcacagtagtctggaggaaaccgacaacacaccggtgaccaagcagtggagaagaggagcatcacagtagtctcgcattgcttatggattgtggggaatggaaccactctgttcaacagcaattttgtttggcaaaagattgtcaaggacacaagggatagaggttgtttttaaatgccactgatgagaaggagttgttgaatgcaattttcaagcttgctgttgagtatcctcacgcggacaatttagctggcgaggagacaaggcagcgattgagtaccaggataagtctattcaatgtcgctgaggcaacagttacaagatcctagaagaaaacccgtggcagctctacactacaataaaggtgataaatatgtctcacccaatggaagatatcatatttagacatgatcaaggtagcaagatgttgaccccatgggtccttttggtggaataatgatagagtgcggcaccaatcaacctattgagaaagtgcttgcagctgaagatgcagcgcgaggatgttg

SEQ ID NO: 6050 - DNA, 523 bp, Zea Mays
aataggtgattgatttctcgatttgggtcgattggagcaatcgttggctattctatcggcatgaataattgatgagacaaactcaatgtcaaacatatttctttgagttttcttcattgatagagtcaaaggcataaagataggacgacaactgacagcacacccctgactaagcagtggagaggaggaaaccgacaacacaccggtgaccaagcagtggagaagaggagcatcacagtagtctcgcattgcttatggattgtggggaatggaaccactctgttcaacagcaattttgtttggcaaaagattgtcaaggacacaagggatagaggttgtttttaaatgccactgatgagaaggagttgttgaatgcaattttcaagcttgctgttgagtatcctcacgcggacaatttagctggcgaggagacaaggcagcgattgagtaccaggataagtctattcaatgtcgctgaggcaacagttacaagatcctagaagaaaacccgtggcagctctac

SEQ ID NO: 6051 - DNA, 2886 bp, Zea Mays
gatctagctggctcttgtgcaattggtatgccacagctgctcttctcaccgtgtgaggacgagcacagtaaaagctaagcatttcttgattcatcctcccagcttcgttaattactatcaatgatgttgctgcatatttctttggcatcttctttgggaaaacaccgctgatcaagctctctccaaagaaaacgtgggaaggctttataggtgcatcaatgacaacattgctttctgcatttgtgctactcctgctgaaaatgtactaaccacaccttccatggtggagtgcagggcctccctgttggggcacgagatcgcccacccgtcgtctacaccagattatttctatcataccatcagatagtggatggacaaccaagcgtgcaccgtttcatcatttctgattctttcttagatgactaagataagtgtgaggtctgtactcatattctttccttttcttttcaatgcaggtatgatcttatacgagtggagattggcaacaaagatataaagcttgaatacttagtggaggcatttacaacttcaaatgacgtagcctcctcgacaccttctgcttctgctaactccggtgcaaggtacgccgctgccatcccaatccctacccccaggcaagctttgttgattgctttctggttgttgatttctgagctagctatttagaagtcaaaaattgggtgaaatctgattaaccaaactacctggttagaaatcaaattggatgaaatctaattaattttgatatgtgtctcctgagttcaaggatgtcttctacaataattcagccaagaacaagaagcgctaattggaatccaaattgtttgatgtggtgatatgatctggaacttggaccatctttatgctttatggggctaagaagcataagacctgtccgaggcaattgtatctcaacataatcagtttgatgggctccaggagttatatcatcagaaatgtttttttagtatttctatgtaccagcaaaatattgactgaatatttctaaccaggtagatccttgctatacttgacaaactaaaggaggaaagggagcaacaagaaggaaaatatggggaggaagatgtggatggttcatgtatatcagaagaagaagatggtgactgggatgtagatgagccagatgaggaggacatcatttacgtaaaatagcccattgtcttctaggaacttggtcatcattcatccagaacacagcaggtgtgcttctactgatcgaaaatacatcttccaaataactatgaggacttaaccaagcaccattcaatcttcatttgcttctatagtttgggtacagtctctctctctttttctaagccattgtgtaatagagtagcattagtacgatttaatgatacaatgtcactttctcatatgttctaacagaaatgatcagtggaagatgttgtcttcgtagccaatgattggcacactgctattttgccatgttatctaaagagcatgtataagtcaaatggaatttataaaaatgctaaggttgcgttctgcatacataatattgcctatcaagggagaaagattaactggatgaagacagggatcgttgagagtgatctggttctaacagttagtccacattatgttaaggaactcacttatggcccagataaaggtgttgagttggatggtgtccttcgcacaaagcctcttgaaattggaattgtaaatggcatggatgtttatgaatgggatccttcaacagataagtacaccagcgtgaaatatgatgcaacaacggtaactgaagcaaaggctctcaataaagagaggttgcaagctgaagttggattgcctgtggactcgagcatccctgttatagtttttgtcgggcgtcttgaagaacagaaagggtctgacatactcattgcagccattccagagttcgtgggcgagaatgttcagataatcgttcttggcacgggaaagaagaaaatggaggaggaattaatgcagctggaagtgaaatatccaaacattgctagaggcatagcgaaattcaatgttccattggcacatatgatgtttgctgggtctgacttcattattgtcccaaattcccatctgttcatcacctggaggacttgttgacacggttgaggaggggtgtcaccggattccacatgggttctttcaatgtcgagtgtgaaactgtagacctagctgacgtgacggcagtagcgtcaaccatcacacgggcctagaacagtacggcaccccggcgttccaagaaatggttcagaactgcatggcgcaaaacctatcctggaaggggcctgcgaagaagtgggaggaggtgcttctgggccttggagtcgaggggagtcaagctggcatcgacgacgcagaggagatcgctccacttgccaaggaaaacgtagctactccatgacgcttggtgcctcggaaacacgcgttggtgataggaagcatcttctaggatcctcctggccttgtggctggagtgagttgttcagtcagacacagtttcgcctctacaacatcttcctcctcctggtggtggtccgaactccgaagcaaattccagtgataaaggatgaactaagaggtccatgtttctattgctagaccttttgcctcctaaatagacgatgtactgcgcttgtaacaagaacctcactttcgtgtcaagtaatatcaacaggtttcataatggtagtgaactgcactggaaaaacctgtaaacaatgcaaacaggattcaaaactaaaacaaatctgctattaaaagctgttattcaaaattgaaaaaaacaaaacctgttaattcagtattataactcagcaaacataaataaaaaaaaca

SEQ ID NO: 6052 - DNA, 2273 bp, Zea Mays
cgccagcgcagcattgttcgtagagattcatcctcccagcttcgttaattactatcaatgatgttgctgcatatttctttggcatcttctttgggaaaacaccgctgatcaagctctctccaaagaaaacgtgggaaggctttatagttaactatcttctgaagcatttccctatgtttagctactcctgctgaaaatgtactaaccacaccttccatggtggagtgcagggcctccctgttggggcacgagatcgcccacccgtcgtctacaccagattatttctatcataccatcagatagtggatggacaaccaagcgtgcaccgtttcatcatttctgattctttcttagatgactaagataagtgtgaggtctgtactcatattctttccttttcttttcaatgcaggtatgatcttatacgagtggagattggcaacaaagatataaagcttgaatacttagtggaggcatttacaacttcaaatgacgtagcctcctcgacaccttctgcttctgctaactccggtgcaaggtagatccttgctatacttgacaaactaaaggaggaaagggagcaacaagaaggaaaatatggggaggaagatgtggatggttcatgtatatcagaagaagaagatggtgactgggatgtagatgagccagatgaggaggacatcatttacgtaaaatagcccattgtcttctaggaacttggtcatcattcatccagaacacagcaggttgcgttctgcatacataatattgcctatcaaggtagatttgccagagcagacttcgatcttcttaatctacctgacagtttcttaccatcatttgattttattgatggacatgttaagcctgttctagggagaaagattaactggatgaagacagggatcgttgagagtgatctggttctaacagttagtccacattatgttaaggaactcacttatggcccagataaaggtgttgagttggatggtgtccttcgcacaaagcctcttgaaattggaattgtaaatggcatggatgtttatgaatgggatccttcaacagataagtacaccagcgtgaaatatgatgcaacaacggtaactgaagcaaaggctctcaataaagagaggttgcaagctgaagttggattgcctgtggactcgagcatccctgttatagtttttgtcgggcgtcttgaagaacagaaagggtctgacatactcattgcagccattccagagttcgtgggcgagaatgttcagataatcgttcttggcacgggaaagaagaaaatggaggaggaattaatgcagctggaagtgaaatatccaaacattgctagaggcatagcgaaattcaatgttccattggcacatatgatgtttgctgggtctgacttcattattgtcccaagtaggtttgagccatgtggtctcattcagttgcaagggatgagagtttctagctcgctttgttacagttcagatttgagtgcgcattcccatctgttcatcacctggaggacttgttgacacggttgaggaggggtgtcaccggattccacatgggttctttcaatgtcgagtgtgaaactgtagacctagctgacgtgacggcagtagcgtcaaccatcacacgggcctagaacagtacggcaccccggcgttccaagaaatggttcagaactgcatggcgcaaaacctatcctggaaggggcctgcgaagaagtgggaggaggtgcttctgggccttggagtcgaggggagtcaagctggcatcgacgacgcagaggagatcgctccacttgccaaggaaaacgtagctactccatgacgcttggtgcctcggaaacacgcgttggtgataggaagcatcttctaggatcctcctggccttgtggctggagtgagttgttcagtcagacacagtttcgcctctacaacatcttcctcctcctggtggtggtccgaactccgaagcaaattccagtgataaaggatgaactaagaggtccatgtttctattgctagaccttttgcctcctaaatagacgatgtactgcgcttgtaacaagaacctcactttcgtgtcaagtaatatcaacaggtttcataatggtagtgaactgcactggaaaaacctgtaaacaatgcaaacaggattcaaaactaaaacaaatctgctattaaaagctgttattcaaaattgaaaaaaacaaaacctgttaattcagtattataactcagcaaacataaataaaaaaaaca

SEQ ID NO: 6053 - DNA, 2905 bp, Zea Mays
cgcttcaccgccagcgccagcgcagcattgttcgtagagattcatcctcccagcttcgttaattactatcaatgatgttgctgcatatttctttggcatcttctttgggaaaacaccgctgatcaagctctctccaaagaaaacgtgggaaggctttataggtgcatcaatgacaacattgctttctgcatttgtgctactcctgctgaaaatgtactaaccacaccttccatggtggagtgcagggcctccctgttggggcacgagatcgcccacccgtcgtctacaccagattatttctatcataccatcagatagtggatggacaaccaagcgtgcaccgtttcatcatttctgattctttcttagatgactaagataagtgtgaggtctgtactcatattctttccttttcttttcaatgcaggtatgatcttatacgagtggagattggcaacaaagatataaagcttgaatacttagtggaggcatttacaacttcaaatgagtaacattccttgatctgaaatgtgtacaataatcctgatgaactactaaaacacttgccttaatctgaaatgagtacaataaaacatatataaggaaactcaaataagtaaagtcttgcttgtccctcacaccataacatgactgatgaactactaaaacacctgcgaggtctgtcagcgtagcctcctcgacaccttctgcttctgctaactccggtgcaagccaagaacaagaagcgctaattggaatccaaattgtttgatgtggtgatatgatctggaacttggaccatctttatgctttatggggctaagaagcataagacctgtccgaggcaattgtatctcaacataatcagtttgatgggctccaggagttatatcatcagaaatgtttttttagtatttctatgtaccagcaaaatattgactgaatatttctaaccaggtagatccttgctatacttgacaaactaaaggaggaaagggagcaacaagaaggaaaatatggggaggaagatgtggatggttcatgtatatcagaagaagaagatggtgactgggatgtagatgagccagatgaggaggacatcatttacgtaaaatagcccattgtcttctaggaacttggtcatcattcatccagaacacagcaggtgtgcttctactgatcgaaaatacatcttccaaataactatgaggacttaaccaagcaccattcaatcttcatttgcttctatagtttgggtacagtctctctctctttttctaagccattgtgtaatagagtagcattagtacgatttaatgatacaatgtcactttctcatatgttctaacagaaatgatcagtggaagatgttgtcttcgtagccaatgattggcacactgctattttgccatgttatctaaagagcatgtataagtcaaatggaatttataaaaatgctaaggttgcgttctgcatacataatattgcctatcaaggtagatttgccagagcagacttcgatcttcttaatctacctgacagtttcttaccatcatttgattttattgatggacatgttaagcctgttctagggagaaagattaactggatgaagacagggatcgttgagagtgatctggttctaacagttagtccacattatgttaaggaactcacttatggcccagataaaggtgttgagttggatggtgtccttcgcacaaagcctcttgaaattggaattgtaaatggcatggatgtttatgaatgggatccttcaacagataagtacaccagcgtgaaatatgatgcaacaacggtaactgaagcaaaggctctcaataaagagaggttgcaagctgaagttggattgcctgtggactcgagcatccctgttatagtttttgtcgggcgtcttgaagaacagaaagggtctgacatactcattgcagccattccagagttcgtgggcgagaatgttcagataatcgttcttggcacgggaaagaagaaaatggaggaggaattaatgcagctggaagtgaaatatccaaacattgctagaggcatagcgaaattcaatgttccattggcacatatgatgtttgctgggtctgacttcattattgtcccaaattcccatctgttcatcacctggaggacttgttgacacggttgaggaggggtgtcaccggattccacatgggttctttcaatgtcgagtgtgaaactgtagacctagctgacgtgacggcagtagcgtcaaccatcacacgggcctagaacagtacggcaccccggcgttccaagaaatggttcagaactgcatggcgcaaaacctatcctggaaggggcctgcgaagaagtgggaggaggtgcttctgggccttggagtcgaggggagtcaagctggcatcgacgacgcagaggagatcgctccacttgccaaggaaaacgtagctactccatgacgcttggtgcctcggaaacacgcgttggtgataggaagcatcttctaggatcctcctggccttgtggctggagtgagttgttcagtcagacacagtttcgcctctacaacatcttcctcctcctggtggtggtccgaactccgaagcaaattccagtgataaaggatgaactaagaggtccatgtttctattgctagaccttttgcctcctaaatagacgatgtactgcgcttgtaacaagaacctcactttcgtgtcaagtaatatcaacaggtttcataatggtagtgaactgcactggaaaaacctgtaaacaatgcaaacaggattcaaaactaaaacaaatctgctattaaaagctgttattcaaaattgaaaaaaacaaaacctgttaattcagtattataactcagcaaacataaataaaaaaaaca

SEQ ID NO: 6054 - DNA, 3040 bp, Zea Mays
atcgcttcaccgccagcgccagcgcagcattgttcgtagagaggatggttcatggtagcaaaagtatggcggtaccagaacaagggattccccctaatgttgttgaggatggggaacccttcaggcacaccagtgtgggcacttacagaggagcagatgttctttagaggcatgttgtgttgtactcttccacccactctctgccaggttgtggtggaaaacactcgtgtgggatctagctggctcttgtgcaattggtatgccacagctgctcttctcaccgtgtgaggacgagcacagtaaaagctaagcatttcttgattcatcctcccagcttcgttaattactatcaatgatgttgctgcatatttctttggcatcttctttgggaaaacaccgctgatcaagctctctccaaagaaaacgtgggaaggctttatagttaactatcttctgaagcatttccctatgtttagctactcctgctgaaaatgtactaaccacaccttccatggtggagtgcagggcctccctgttggggcacgagatcgcccacccgtcgtctacaccagattatttctatcataccatcagatagtggatggacaaccaagcgtgcaccgtttcatcatttctgattctttcttagatgactaagataagtgtgaggtctgtactcatattctttccttttcttttcaatgcaggtatgatcttatacgagtggagattggcaacaaagatataaagcttgaatacttagtggaggcatttacaacttcaaatgagtaacattccttgatctgaaatgtgtacaataatcctgatgaactactaaaacacttgccttaatctgaaatgagtacaataaaacatatataaggaaactcaaataagtaaagtcttgcttgtccctcacaccataacatgactgatgaactactaaaacacctgcgaggtctgtcagcgtagcctcctcgacaccttctgcttctgctaactccggtgcaagatccttgctatacttgacaaactaaaggaggaaagggagcaacaagaaggaaaatatggggaggaagatgtggatggttcatgtatatcagaagaagaagatggtgactgggatgtagatgagccagatgaggaggacatcatttacgtaaaatagcccattgtcttctaggaacttggtcatcattcatccagaacacagcaggtgtgcttctactgatcgaaaatacatcttccaaataactatgaggacttaaccaagcaccattcaatcttcatttgcttctatagtttgggtacagtctctctctctttttctaagccattgtgtaatagagtagcattagtacgatttaatgatacaatgtcactttctcatatgttctaacagaaatgatcagtggaagatgttgtcttcgtagccaatgattggcacactgctattttgccatgttatctaaagagcatgtataagtcaaatggaatttataaaaatgctaaggttgcgttctgcatacataatattgcctatcaaggtagatttgccagagcagacttcgatcttcttaatctacctgacagtttcttaccatcatttgattttattgatggacatgttaagcctgttctagggagaaagattaactggatgaagacagggatcgttgagagtgatctggttctaacagttagtccacattatgttaaggaactcacttatggcccagataaaggtgttgagttggatggtgtccttcgcacaaagcctcttgaaattggaattgtaaatggcatggatgtttatgaatgggatccttcaacagataagtacaccagcgtgaaatatgatgcaacaacggtaactgaagcaaaggctctcaataaagagaggttgcaagctgaagttggattgcctgtggactcgagcatccctgttatagtttttgtcgggcgtcttgaagaacagaaagggtctgacatactcattgcagccattccagagttcgtgggcgagaatgttcagataatcgttcttggcacgggaaagaagaaaatggaggaggaattaatgcagctggaagtgaaatatccaaacattgctagaggcatagcgaaattcaatgttccattggcacatatgatgtttgctgggtctgacttcattattgtcccaagtaggtttgagccatgtggtctcattcagttgcaagggatgagagtttctagctcgctttgttacagttcagatttgagtgcgcattcccatctgttcatcacctggaggacttgttgacacggttgaggaggggtgtcaccggattccacatgggttctttcaatgtcgagtgtgaaactgtagacctagctgacgtgacggcagtagcgtcaaccatcacacgggcctagaacagtacggcaccccggcgttccaagaaatggttcagaactgcatggcgcaaaacctatcctggaaggggcctgcgaagaagtgggaggaggtgcttctgggccttggagtcgaggggagtcaagctggcatcgacgacgcagaggagatcgctccacttgccaaggaaaacgtagctactccatgacgcttggtgcctcggaaacacgcgttggtgataggaagcatcttctaggatcctcctggccttgtggctggagtgagttgttcagtcagacacagtttcgcctctacaacatcttcctcctcctggtggtggtccgaactccgaagcaaattccagtgataaaggatgaactaagaggtccatgtttctattgctagaccttttgcctcctaaatagacgatgtactgcgcttgtaacaagaacctcactttcgtgtcaagtaatatcaacaggtttcataatggtagtgaactgcactggaaaaacctgtaaacaatgcaaacaggattcaaaactaaaacaaatctgctattaaaagctgttattcaaaattgaaaaaaacaaaacctgttaattcagtattataactcagcaaacataaataaaaaaaaca

SEQ ID NO: 6055 - DNA, 3288 bp, Zea Mays
cgcaatctccttcgccgatcgcttcaccgccagcgccagcgcagcattgttcgtagagaggatggttcatggtagcaaaagtatggcggtaccagaacaagggattccccctaatgttgttgaggatggggaacccttcaggcacaccagtgtgggcacttacagaggagcagatgttctttagaggcatgttgtgttgtactcttccacccactctctgccaggttgtggtggaaaacactcgtgtgggatctagctggctcttgtgcaattggtatgccacagctgctcttctcaccgtgtgaggacgagcacagtaaaagctaagcatttcttgattcatcctcccagcttcgttaattactatcaatgatgttgctgcatatttctttggcatcttctttgggaaaacaccgctgatcaagctctctccaaagaaaacgtgggaaggctttataggtgcatcaatgacaacattgctttctgcatttgtgctactcctgctgaaaatgtactaaccacaccttccatggtggagtgcagggcctccctgttggggcacgagatcgcccacccgtcgtctacaccagattatttctatcataccatcagatagtggatggacaaccaagcgtgcaccgtttcatcatttctgattctttcttagatgactaagataagtgtgaggtctgtactcatattctttccttttcttttcaatgcaggtatgatcttatacgagtggagattggcaacaaagatataaagcttgaatacttagtggaggcatttacaacttcaaatgagtaacattccttgatctgaaatgtgtacaataatcctgatgaactactaaaacacttgccttaatctgaaatgagtacaataaaacatatataaggaaactcaaataagtaaagtcttgcttgtccctcacaccataacatgactgatgaactactaaaacacctgcgaggtctgtcagcgtagcctcctcgacaccttctgcttctgctaactccggtgcaaggtacgccgctgccatcccaatccctacccccaggcaagctttgttgattgctttctggttgttgatttctgagctagctatttagaagtcaaaaattgggtgaaatctgattaaccaaactacctggttagaaatcaaattggatgaaatctaattaattttgatatgtgtctcctgagttcaaggatgtcttctacaataattcagccaagaacaagaagcgctaattggaatccaaattgtttgatgtggtgatatgatctggaacttggaccatctttatgctttatggggctaagaagcataagacctgtccgaggcaattgtatctcaacataatcagtttgatgggctccaggagttatatcatcagaaatgtttttttagtatttctatgtaccagcaaaatattgactgaatatttctaaccaggtagatccttgctatacttgacaaactaaaggaggaaagggagcaacaagaaggaaaatatggggaggaagatgtggatggttcatgtatatcagaagaagaagatggtgactgggatgtagatgagccagatgaggaggacatcatttacgtaaaatagcccattgtcttctaggaacttggtcatcattcatccagaacacagcaggtgtgcttctactgatcgaaaatacatcttccaaataactatgaggacttaaccaagcaccattcaatcttcatttgcttctatagtttgggttgcgttctgcatacataatattgcctatcaaggtagatttgccagagcagacttcgatcttcttaatctacctgacagtttcttaccatcatttgattttattgatggacatgttaagcctgttctagggagaaagattaactggatgaagacagggatcgttgagagtgatctggttctaacagttagtccacattatgttaaggaactcacttatggcccagataaaggtgttgagttggatggtgtccttcgcacaaagcctcttgaaattggaattgtaaatggcatggatgtttatgaatgggatccttcaacagataagtacaccagcgtgaaatatgatgcaacaacggtaactgaagcaaaggctctcaataaagagaggttgcaagctgaagttggattgcctgtggactcgagcatccctgttatagtttttgtcgggcgtcttgaagaacagaaagggtctgacatactcattgcagccattccagagttcgtgggcgagaatgttcagataatcgttcttggcacgggaaagaagaaaatggaggaggaattaatgcagctggaagtgaaatatccaaacattgctagaggcatagcgaaattcaatgttccattggcacatatgatgtttgctgggtctgacttcattattgtcccaagtaggtttgagccatgtggtctcattcagttgcaagggatgagagtttctagctcgctttgttacagttcagatttgagtgcgcattcccatctgttcatcacctggaggacttgttgacacggttgaggaggggtgtcaccggattccacatgggttctttcaatgtcgagtgtgaaactgtagacctagctgacgtgacggcagtagcgtcaaccatcacacgggcctagaacagtacggcaccccggcgttccaagaaatggttcagaactgcatggcgcaaaacctatcctggaaggggcctgcgaagaagtgggaggaggtgcttctgggccttggagtcgaggggagtcaagctggcatcgacgacgcagaggagatcgctccacttgccaaggaaaacgtagctactccatgacgcttggtgcctcggaaacacgcgttggtgataggaagcatcttctaggatcctcctggccttgtggctggagtgagttgttcagtcagacacagtttcgcctctacaacatcttcctcctcctggtggtggtccgaactccgaagcaaattccagtgataaaggatgaactaagaggtccatgtttctattgctagaccttttgcctcctaaatagacgatgtactgcgcttgtaacaagaacctcactttcgtgtcaagtaatatcaacaggtttcataatggtagtgaactgcactggaaaaacctgtaaacaatgcaaacaggattcaaaactaaaacaaatctgctattaaaagctgttattcaaaattgaaaaaaacaaaacctgttaattcagtattataactcagcaaacataaataaaaaaaaca

SEQ ID NO: 6056 - DNA, 3142 bp, Zea Mays
cgacggggcattcgcaatctccttcgccgatcgcttcaccgccagcgccagcgcagcattgttcgtagagattcatcctcccagcttcgttaattactatcaatgatgttgctgcatatttctttggcatcttctttgggaaaacaccgctgatcaagctctctccaaagaaaacgtgggaaggctttatagttaactatcttctgaagcatttccctatgtttagctactcctgctgaaaatgtactaaccacaccttccatggtggagtgcagggcctccctgttggggcacgagatcgcccacccgtcgtctacaccagattatttctatcataccatcagatagtggatggacaaccaagcgtgcaccgtttcatcatttctgattctttcttagatgactaagataagtgtgaggtctgtactcatattctttccttttcttttcaatgcaggtatgatcttatacgagtggagattggcaacaaagatataaagcttgaatacttagtggaggcatttacaacttcaaatgagtaacattccttgatctgaaatgtgtacaataatcctgatgaactactaaaacacttgccttaatctgaaatgagtacaataaaacatatataaggaaactcaaataagtaaagtcttgcttgtccctcacaccataacatgactgatgaactactaaaacacctgcgaggtctgtcagcgtagcctcctcgacaccttctgcttctgctaactccggtgcaaggtacgccgctgccatcccaatccctacccccaggcaagctttgttgattgctttctggttgttgatttctgagctagctatttagaagtcaaaaattgggtgaaatctgattaaccaaactacctggttagaaatcaaattggatgaaatctaattaattttgatatgtgtctcctgagttcaaggatgtcttctacaataattcagccaagaacaagaagcgctaattggaatccaaattgtttgatgtggtgatatgatctggaacttggaccatctttatgctttatggggctaagaagcataagacctgtccgaggcaattgtatctcaacataatcagtttgatgggctccaggagttatatcatcagaaatgtttttttagtatttctatgtaccagcaaaatattgactgaatatttctaaccaggtagatccttgctatacttgacaaactaaaggaggaaagggagcaacaagaaggaaaatatggggaggaagatgtggatggttcatgtatatcagaagaagaagatggtgactgggatgtagatgagccagatgaggaggacatcatttacgtaaaatagcccattgtcttctaggaacttggtcatcattcatccagaacacagcaggtgtgcttctactgatcgaaaatacatcttccaaataactatgaggacttaaccaagcaccattcaatcttcatttgcttctatagtttgggtacagtctctctctctttttctaagccattgtgtaatagagtagcattagtacgatttaatgatacaatgtcactttctcatatgttctaacagaaatgatcagtggaagatgttgtcttcgtagccaatgattggcacactgctattttgccatgttatctaaagagcatgtataagtcaaatggaatttataaaaatgctaaggttgcgttctgcatacataatattgcctatcaaggtagatttgccagagcagacttcgatcttcttaatctacctgacagtttcttaccatcatttgattttattgatggacatgttaagcctgttctagggagaaagattaactggatgaagacagggatcgttgagagtgatctggttctaacagttagtccacattatgttaaggaactcacttatggcccagataaaggtgttgagttggatggtgtccttcgcacaaagcctcttgaaattggaattgtaaatggcatggatgtttatgaatgggatccttcaacagataagtacaccagcgtgaaatatgatgcaacaacggtaactgaagcaaaggctctcaataaagagaggttgcaagctgaagttggattgcctgtggactcgagcatccctgttatagtttttgtcgggcgtcttgaagaacagaaagggtctgacatactcattgcagccattccagagttcgtgggcgagaatgttcagataatcgttcttggcacgggaaagaagaaaatggaggaggaattaatgcagctggaagtgaaatatccaaacattgctagaggcatagcgaaattcaatgttccattggcacatatgatgtttgctgggtctgacttcattattgtcccaaattcccatctgttcatcacctggaggacttgttgacacggttgaggaggggtgtcaccggattccacatgggttctttcaatgtcgagtgtgaaactgtagacctagctgacgtgacggcagtagcgtcaaccatcacacgggcctagaacagtacggcaccccggcgttccaagaaatggttcagaactgcatggcgcaaaacctatcctggaaggggcctgcgaagaagtgggaggaggtgcttctgggccttggagtcgaggggagtcaagctggcatcgacgacgcagaggagatcgctccacttgccaaggaaaacgtagctactccatgacgcttggtgcctcggaaacacgcgttggtgataggaagcatcttctaggatcctcctggccttgtggctggagtgagttgttcagtcagacacagtttcgcctctacaacatcttcctcctcctggtggtggtccgaactccgaagcaaattccagtgataaaggatgaactaagaggtccatgtttctattgctagaccttttgcctcctaaatagacgatgtactgcgcttgtaacaagaacctcactttcgtgtcaagtaatatcaacaggtttcataatggtagtgaactgcactggaaaaacctgtaaacaatgcaaacaggattcaaaactaaaacaaatctgctattaaaagctgttattcaaaattgaaaaaaacaaaacctgttaattcagtattataactcagcaaacataaataaaaaaaaca

SEQ ID NO: 6057 - DNA, 3934 bp, Zea Mays
cgcgatgcgctcgcacgtgccaccgccccccggcccgcgataccgtgcctccgctcgacgcctgcccccgatccctgcgattccagcgccgtcgccgcgcgcgatgcccgtgcacgcacccccaccccaatccccgcctcagcgccgctcccccgcccccacccccgtcctcgccgccccgctccacgctcgcgtggcgtcgtcatcgctgcgctctgcgcccgctccgcccccacccccacacgcgcacacacacctcaccccgcgtcgtcatccacagcccctgcatcgccaccatggactcggggttgaactggtagcccgagggcgcgggaggtgccgccggcggcggaggatgaggcaggcagggcgagggcggcgacgccggaagctcctggaaatggctgcgcgcgcggtggtggtgagaccgctggtccgtgccgggaagcgagaggctgagcaaggtgagcgggtcctcctcctgcggacggctcatggcagtctgccggctcgaacccgccggagcgcgccacggggcggtaaatctggccggacccggagccggcgccgtggctgctgaggtcgctacggtgtatggttggaccccgaccacgaccccgataggctgtcgggcgagaggctcatcatcagcttgcccgggcgcgcctcggtctcggtggcgtcagtgggaaccggcgaaccggacacgacggcccaccgcctccctctgcttcctcccgtcgaagccctccacctctgacacggcgaccgaccactcctccgactccgactttgccaccacgaacagcaacgaggacactgccatcctcggcatgacgggcgacggggcattcgcaatctccttcgccgatcgcttcaccgccagcgccagcgcagcattgttcgtagagaagaggatggttcatggtagcaaaagtatggcggtaccagaacaagggattccccctaatgttgttgaggatggggaacccttcaggcacaccagtgtgggcacttacagaggagcagatgttctttagaggcatgttgtgttgtactcttccacccactctctgccaggttgtggtggaaaacactcgtgtgggatctagctggctcttgtgcaattggtatgccacagctgctcttctcaccgtgtgaggacgagcacagtaaaagctaagcatttcttgattcatcctcccagcttcgttaattactatcaatgatgttgctgcatatttctttggcatcttctttgggaaaacaccgctgatcaagctctctccaaagaaaacgtgggaaggctttatagctactcctgctgaaaatgtactaaccacaccttccatggtggagtgcagggcctccctgttggggcacgagatcgcccacccgtcgtctacaccagattatttctatcataccatcagatagtggatggacaaccaagcgtgcaccgtttcatcatttctgattctttcttagatgactaagataagtgtgaggtctgtactcatattctttccttttcttttcaatgcaggtatgatcttatacgagtggagattggcaacaaagatataaagcttgaatacttagtggaggcatttacaacttcaaatgagtaacattccttgatctgaaatgtgtacaataatcctgatgaactactaaaacacttgccttaatctgaaatgagtacaataaaacatatataaggaaactcaaataagtaaagtcttgcttgtccctcacaccataacatgactgatgaactactaaaacacctgcgaggtctgtcagcgtagcctcctcgacaccttctgcttctgctaactccggtgcaaggtacgccgctgccatcccaatccctacccccaggcaagctttgttgattgctttctggttgttgatttctgagctagctatttagaagtcaaaaattgggtgaaatctgattaaccaaactacctggttagaaatcaaattggatgaaatctaattaattttgatatgtgtctcctgagttcaaggatgtcttctacaataattcagccaagaacaagaagcgctaattggaatccaaattgtttgatgtggtgatatgatctggaacttggaccatctttatgctttatggggctaagaagcataagacctgtccgaggcaattgtatctcaacataatcagtttgatgggctccaggagttatatcatcagaaatgtttttttagtatttctatgtaccagcaaaatattgactgaatatttctaaccaggtagatccttgctatacttgacaaactaaaggaggaaagggagcaacaagaaggaaaatatggggaggaagatgtggatggttcatgtatatcagaagaagaagatggtgactgggatgtagatgagccagatgaggaggacatcatttacgtaaaatagcccattgtcttctaggaacttggtcatcattcatccagaacacagcaggttgcgttctgcatacataatattgcctatcaaggtagatttgccagagcagacttcgatcttcttaatctacctgacagtttcttaccatcatttgattttattgatggacatgttaagcctgttctagggagaaagattaactggatgaagacagggatcgttgagagtgatctggttctaacagttagtccacattatgttaaggaactcacttatggcccagataaaggtgttgagttggatggtgtccttcgcacaaagcctcttgaaattggaattgtaaatggcatggatgtttatgaatgggatccttcaacagataagtacaccagcgtgaaatatgatgcaacaacggtaactgaagcaaaggctctcaataaagagaggttgcaagctgaagttggattgcctgtggactcgagcatccctgttatagtttttgtcgggcgtcttgaagaacagaaagggtctgacatactcattgcagccattccagagttcgtgggcgagaatgttcagataatcgttcttggcacgggaaagaagaaaatggaggaggaattaatgcagctggaagtgaaatatccaaacattgctagaggcatagcgaaattcaatgttccattggcacatatgatgtttgctgggtctgacttcattattgtcccaaattcccatctgttcatcacctggaggacttgttgacacggttgaggaggggtgtcaccggattccacatgggttctttcaatgtcgagtgtgaaactgtagacctagctgacgtgacggcagtagcgtcaaccatcacacgggcctagaacagtacggcaccccggcgttccaagaaatggttcagaactgcatggcgcaaaacctatcctggaaggggcctgcgaagaagtgggaggaggtgcttctgggccttggagtcgaggggagtcaagctggcatcgacgacgcagaggagatcgctccacttgccaaggaaaacgtagctactccatgacgcttggtgcctcggaaacacgcgttggtgataggaagcatcttctaggatcctcctggccttgtggctggagtgagttgttcagtcagacacagtttcgcctctacaacatcttcctcctcctggtggtggtccgaactccgaagcaaattccagtgataaaggatgaactaagaggtccatgtttctattgctagaccttttgcctcctaaatagacgatgtactgcgcttgtaacaagaacctcactttcgtgtcaagtaatatcaacaggtttcataatggtagtgaactgcactggaaaaacctgtaaacaatgcaaacaggattcaaaactaaaacaaatctgctattaaaagctgttattcaaaattgaaaaaaacaaaacctgttaattcagtattataactcagcaaacataaataaaaaaaaca

SEQ ID NO: 6058 - DNA, 4042 bp, Zea Mays
cgcgatgcgctcgcacgtgccaccgccccccggcccgcgataccgtgcctccgctcgacgcctgcccccgatccctgcgattccagcgccgtcgccgcgcgcgatgcccgtgcacgcacccccaccccaatccccgcctcagcgccgctcccccgcccccacccccgtcctcgccgccccgctccacgctcgcgtggcgtcgtcatcgctgcgctctgcgcccgctccgcccccacccccacacgcgcacacacacctcaccccgcgtcgtcatccacagcccctgcatcgccaccatggactcggggttgaactggtagcccgagggcgcgggaggtgccgccggcggcggaggatgaggcaggcagggcgagggcggcgacgccggaagctcctggaaatggctgcgcgcgcggtggtggtgagaccgctggtccgtgccgggaagcgagaggctgagcaaggtgagcgggtcctcctcctgcggacggctcatggcagtctgccggctcgaacccgccggagcgcgccacggggcggtaaatctggccggacccggagccggcgccgtggctgctgaggtcgctacggtgtatggttggaccccgaccacgaccccgataggctgtcgggcgagaggctcatcatcagcttgcccgggcgcgcctcggtctcggtggcgtcagtgggaaccggcgaaccggacacgacggcccaccgcctccctctgcttcctcccgtcgaagccctccacctctgacacggcgaccgaccactcctccgactccgactttgccaccacgaacagcaacgaggacactgccatcctcggcatgacgggcgacggggcattcgcaatctccttcgccgatcgcttcaccgccagcgccagcgcagcattgttcgtagagaagaggatggttcatggtagcaaaagtatggcggtaccagaacaagggattccccctaatgttgttgaggatggggaacccttcaggcacaccagtgtgggcacttacagaggagcagatgttctttagaggttgtggtggaaaacactcgtgtgggatctagctggctcttgtgcaattggtatgccacagctgctcttctcaccgtgtgaggacgagcacagtaaaagctaagcatttcttgattcatcctcccagcttcgttaattactatcaatgatgttgctgcatatttctttggcatcttctttgggaaaacaccgctgatcaagctctctccaaagaaaacgtgggaaggctttatagttaactatcttctgaagcatttccctatgtttagctactcctgctgaaaatgtactaaccacaccttccatggtggagtgcagggcctccctgttggggcacgagatcgcccacccgtcgtctacaccagattatttctatcataccatcagatagtggatggacaaccaagcgtgcaccgtttcatcatttctgattctttcttagatgactaagataagtgtgaggtctgtactcatattctttccttttcttttcaatgcaggtatgatcttatacgagtggagattggcaacaaagatataaagcttgaatacttagtggaggcatttacaacttcaaatgagtaacattccttgatctgaaatgtgtacaataatcctgatgaactactaaaacacttgccttaatctgaaatgagtacaataaaacatatataaggaaactcaaataagtaaagtcttgcttgtccctcacaccataacatgactgatgaactactaaaacacctgcgaggtctgtcagcgtagcctcctcgacaccttctgcttctgctaactccggtgcaaggatgtcttctacaataattcagccaagaacaagaagcgctaattggaatccaaattgtttgatgtggtgatatgatctggaacttggaccatctttatgctttatggggctaagaagcataagacctgtccgaggcaattgtatctcaacataatcagtttgatgggctccaggagttatatcatcagaaatgtttttttagtatttctatgtaccagcaaaatattgactgaatatttctaaccaggtagatccttgctatacttgacaaactaaaggaggaaagggagcaacaagaaggaaaatatggggaggaagatgtggatggttcatgtatatcagaagaagaagatggtgactgggatgtagatgagccagatgaggaggacatcatttacgtaaaatagcccattgtcttctaggaacttggtcatcattcatccagaacacagcaggtgtgcttctactgatcgaaaatacatcttccaaataactatgaggacttaaccaagcaccattcaatcttcatttgcttctatagtttgggtacagtctctctctctttttctaagccattgtgtaatagagtagcattagtacgatttaatgatacaatgtcactttctcatatgttctaacagaaatgatcagtggaagatgttgtcttcgtagccaatgattggcacactgctattttgccatgttatctaaagagcatgtataagtcaaatggaatttataaaaatgctaaggttgcgttctgcatacataatattgcctatcaaggtagatttgccagagcagacttcgatcttcttaatctacctgacagtttcttaccatcatttgattttattgatggacatgttaagcctgttctagggagaaagattaactggatgaagacagggatcgttgagagtgatctggttctaacagttagtccacattatgttaaggaactcacttatggcccagataaaggtgttgagttggatggtgtccttcgcacaaagcctcttgaaattggaattgtaaatggcatggatgtttatgaatgggatccttcaacagataagtacaccagcgtgaaatatgatgcaacaacggtaactgaagcaaaggctctcaataaagagaggttgcaagctgaagttggattgcctgtggactcgagcatccctgttatagtttttgtcgggcgtcttgaagaacagaaagggtctgacatactcattgcagccattccagagttcgtgggcgagaatgttcagataatcgttcttggcacgggaaagaagaaaatggaggaggaattaatgcagctggaagtgaaatatccaaacattgctagaggcatagcgaaattcaatgttccattggcacatatgatgtttgctgggtctgacttcattattgtcccaaattcccatctgttcatcacctggaggacttgttgacacggttgaggaggggtgtcaccggattccacatgggttctttcaatgtcgagtgtgaaactgtagacctagctgacgtgacggcagtagcgtcaaccatcacacgggcctagaacagtacggcaccccggcgttccaagaaatggttcagaactgcatggcgcaaaacctatcctggaaggggcctgcgaagaagtgggaggaggtgcttctgggccttggagtcgaggggagtcaagctggcatcgacgacgcagaggagatcgctccacttgccaaggaaaacgtagctactccatgacgcttggtgcctcggaaacacgcgttggtgataggaagcatcttctaggatcctcctggccttgtggctggagtgagttgttcagtcagacacagtttcgcctctacaacatcttcctcctcctggtggtggtccgaactccgaagcaaattccagtgataaaggatgaactaagaggtccatgtttctattgctagaccttttgcctcctaaatagacgatgtactgcgcttgtaacaagaacctcactttcgtgtcaagtaatatcaacaggtttcataatggtagtgaactgcactggaaaaacctgtaaacaatgcaaacaggattcaaaactaaaacaaatctgctattaaaagctgttattcaaaattgaaaaaaacaaaacctgttaattcagtattataactcagcaaacataaataaaaaaaaca

SEQ ID NO: 6059 - DNA, 3617 bp, Zea Mays
cgcgatgcgctcgcacgtgccaccgccccccggcccgcgataccgtgcctccgctcgacgcctgcccccgatccctgcgattccagcgccgtcgccgcgcgcgatgcccgtgcacgcacccccaccccaatccccgcctcagcgccgctcccccgcccccacccccgtcctcgccgccccgctccacgctcgcgtggcgtcgtcatcgctgcgctctgcgcccgctccgcccccacccccacacgcgcacacacacctcaccccgcgtcgtcatccacagcccctgcatcgccaccatggactcggggttgaactggtagcccgagggcgcgggaggtgccgccggcggcggaggatgaggcaggcagggcgagggcggcgacgccggaagctcctggaaatggctgcgcgcgcggtggtggtgagaccgctggtccgtgccgggaagcgagaggctgagcaaggtgagcgggtcctcctcctgcggacggctcatggcagtctgccggctcgaacccgccggagcgcgccacggggcggtaaatctggccggacccggagccggcgccgtggctgctgaggtcgctacggtgtatggttggaccccgaccacgaccccgataggctgtcgggcgagaggctcatcatcagcttgcccgggcgcgcctcggtctcggtggcgtcagtgggaaccggcgaaccggacacgacggcccaccgcctccctctgcttcctcccgtcgaagccctccacctctgacacggcgaccgaccactcctccgactccgactttgccaccacgaacagcaacgaggacactgccatcctcggcatgacgggcgacggggcattcgcaatctccttcgccgatcgcttcaccgccagcgccagcgcagcattgttcgtagagaagaggatggttcatggtagcaaaagtatggcggtaccagaacaagggattccccctaatgttgttgaggatggggaacccttcaggcacaccagtgtgggcacttacagaggagcagatgttctttagaggcatgttgtgttgtactcttccacccactctctgccaggttgtggtggaaaacactcgtgtgggatctagctggctcttgtgcaattggtatgccacagctgctcttctcaccgtgtgaggacgagcacagtaaaagctaagcatttcttgattcatcctcccagcttcgttaattactatcaatgatgttgctgcatatttctttggcatcttctttgggaaaacaccgctgatcaagctctctccaaagaaaacgtgggaaggctttataggtgcatcaatgacaacattgctttctgcatttgtgctactcctgctgaaaatgtactaaccacaccttccatggtggagtgcagggcctccctgttggggcacgagatcgcccacccgtcgtctacaccagattatttctatcataccatcagatagtggatggacaaccaagcgtgcaccgtttcatcatttctgattctttcttagatgactaagataagtgtgaggtctgtactcatattctttccttttcttttcaatgcaggtatgatcttatacgagtggagattggcaacaaagatataaagcttgaatacttagtggaggcatttacaacttcaaatgagtaacattccttgatctgaaatgtgtacaataatcctgatgaactactaaaacacttgccttaatctgaaatgagtacaataaaacatatataaggaaactcaaataagtaaagtcttgcttgtccctcacaccataacatgactgatgaactactaaaacacctgcgaggtctgtcagcgtagcctcctcgacaccttctgcttctgctaactccggtgcaagatccttgctatacttgacaaactaaaggaggaaagggagcaacaagaaggaaaatatggggaggaagatgtggatggttcatgtatatcagaagaagaagatggtgactgggatgtagatgagccagatgaggaggacatcatttacgtaaaatagcccattgtcttctaggaacttggtcatcattcatccagaacacagcaggttgcgttctgcatacataatattgcctatcaaggtagatttgccagagcagacttcgatcttcttaatctacctgacagtttcttaccatcatttgattttattgatggacatgttaagcctgttctagggagaaagattaactggatgaagacagggatcgttgagagtgatctggttctaacagttagtccacattatgttaaggaactcacttatggcccagataaaggtgttgagttggatggtgtccttcgcacaaagcctcttgaaattggaattgtaaatggcatggatgtttatgaatgggatccttcaacagataagtacaccagcgtgaaatatgatgcaacaacggtaactgaagcaaaggctctcaataaagagaggttgcaagctgaagttggattgcctgtggactcgagcatccctgttatagtttttgtcgggcgtcttgaagaacagaaagggtctgacatactcattgcagccattccagagttcgtgggcgagaatgttcagataatcgttcttggcacgggaaagaagaaaatggaggaggaattaatgcagctggaagtgaaatatccaaacattgctagaggcatagcgaaattcaatgttccattggcacatatgatgtttgctgggtctgacttcattattgtcccaagtaggtttgagccatgtggtctcattcagttgcaagggatgagagtttctagctcgctttgttacagttcagatttgagtgcgcattcccatctgttcatcacctggaggacttgttgacacggttgaggaggggtgtcaccggattccacatgggttctttcaatgtcgagtgtgaaactgtagacctagctgacgtgacggcagtagcgtcaaccatcacacgggcctagaacagtacggcaccccggcgttccaagaaatggttcagaactgcatggcgcaaaacctatcctggaaggggcctgcgaagaagtgggaggaggtgcttctgggccttggagtcgaggggagtcaagctggcatcgacgacgcagaggagatcgctccacttgccaaggaaaacgtagctactccatgacgcttggtgcctcggaaacacgcgttggtgataggaagcatcttctaggatcctcctggccttgtggctggagtgagttgttcagtcagacacagtttcgcctctacaacatcttcctcctcctggtggtggtccgaactccgaagcaaattccagtgataaaggatgaactaagaggtccatgtttctattgctagaccttttgcctcctaaatagacgatgtactgcgcttgtaacaagaacctcactttcgtgtcaagtaatatcaacaggtttcataatggtagtgaactgcactggaaaaacctgtaaacaatgcaaacaggattcaaaactaaaacaaatctgctattaaaagctgttattcaaaattgaaaaaaacaaaacctgttaattcagtattataactcagcaaacataaataaaaaaaaca

SEQ ID NO: 6060 - DNA, 3980 bp, Zea Mays
cgcgatgcgctcgcacgtgccaccgccccccggcccgcgataccgtgcctccgctcgacgcctgcccccgatccctgcgattccagcgccgtcgccgcgcgcgatgcccgtgcacgcacccccaccccaatccccgcctcagcgccgctcccccgcccccacccccgtcctcgccgccccgctccacgctcgcgtggcgtcgtcatcgctgcgctctgcgcccgctccgcccccacccccacacgcgcacacacacctcaccccgcgtcgtcatccacagcccctgcatcgccaccatggactcggggttgaactggtagcccgagggcgcgggaggtgccgccggcggcggaggatgaggcaggcagggcgagggcggcgacgccggaagctcctggaaatggctgcgcgcgcggtggtggtgagaccgctggtccgtgccgggaagcgagaggctgagcaaggtgagcgggtcctcctcctgcggacggctcatggcagtctgccggctcgaacccgccggagcgcgccacggggcggtaaatctggccggacccggagccggcgccgtggctgctgaggtcgctacggtgtatggttggaccccgaccacgaccccgataggctgtcgggcgagaggctcatcatcagcttgcccgggcgcgcctcggtctcggtggcgtcagtgggaaccggcgaaccggacacgacggcccaccgcctccctctgcttcctcccgtcgaagccctccacctctgacacggcgaccgaccactcctccgactccgactttgccaccacgaacagcaacgaggacactgccatcctcggcatgacgggcgacggggcattcgcaatctccttcgccgatcgcttcaccgccagcgccagcgcagcattgttcgtagagaagaggatggttcatggtagcaaaagtatggcggtaccagaacaagggattccccctaatgttgttgaggatggggaacccttcaggcacaccagtgtgggcacttacagaggagcagatgttctttagaggcatgttgtgttgtactcttccacccactctctgccagtctctacacaggttgtggtggaaaacactcgtgtgggatctagctggctcttgtgcaattggtatgccacagctgctcttctcaccgtgtgaggacgagcacagtaaaagctaagcatttcttgattcatcctcccagcttcgttaattactatcaatgatgttgctgcatatttctttggcatcttctttgggaaaacaccgctgatcaagctctctccaaagaaaacgtgggaaggctttataggtgcatcaatgacaacattgctttctgcatttgtgctactcctgctgaaaatgtactaaccacaccttccatggtggagtgcagggcctccctgttggggcacgagatcgcccacccgtcgtctacaccagattatttctatcataccatcagatagtggatggacaaccaagcgtgcaccgtttcatcatttctgattctttcttagatgactaagataagtgtgaggtctgtactcatattctttccttttcttttcaatgcaggtatgatcttatacgagtggagattggcaacaaagatataaagcttgaatacttagtggaggcatttacaacttcaaatgagtaacattccttgatctgaaatgtgtacaataatcctgatgaactactaaaacacttgccttaatctgaaatgagtacaataaaacatatataaggaaactcaaataagtaaagtcttgcttgtccctcacaccataacatgactgatgaactactaaaacacctgcgaggtctgtcagcgtagcctcctcgacaccttctgcttctgctaactccggtgcaaggtacgccgctgccatcccaatccctacccccaggcaagctttgttgattgctttctggttgttgatttctgagctagctatttagaagtcaaaaattgggtgaaatctgattaaccaaactacctggttagaaatcaaattggatgaaatctaattaattttgatatgtgtctcctgagttcaaggatgtcttctacaataattcagccaagaacaagaagcgctaattggaatccaaattgtttgatgtggtgatatgatctggaacttggaccatctttatgctttatggggctaagaagcataagacctgtccgaggcaattgtatctcaacataatcagtttgatgggctccaggagttatatcatcagaaatgtttttttagtatttctatgtaccagcaaaatattgactgaatatttctaaccaggtagatccttgctatacttgacaaactaaaggaggaaagggagcaacaagaaggaaaatatggggaggaagatgtggatggttcatgtatatcagaagaagaagatggtgactgggatgtagatgagccagatgaggaggacatcatttacgtaaaatagcccattgtcttctaggaacttggtcatcattcatccagaacacagcaggttgcgttctgcatacataatattgcctatcaaggtagatttgccagagcagacttcgatcttcttaatctacctgacagtttcttaccatcatttgattttattgatggacatgttaagcctgttctagggagaaagattaactggatgaagacagggatcgttgagagtgatctggttctaacagttagtccacattatgttaaggaactcacttatggcccagataaaggtgttgagttggatggtgtccttcgcacaaagcctcttgaaattggaattgtaaatggcatggatgtttatgaatgggatccttcaacagataagtacaccagcgtgaaatatgatgcaacaacggtaactgaagcaaaggctctcaataaagagaggttgcaagctgaagttggattgcctgtggactcgagcatccctgttatagtttttgtcgggcgtcttgaagaacagaaagggtctgacatactcattgcagccattccagagttcgtgggcgagaatgttcagataatcgttcttggcacgggaaagaagaaaatggaggaggaattaatgcagctggaagtgaaatatccaaacattgctagaggcatagcgaaattcaatgttccattggcacatatgatgtttgctgggtctgacttcattattgtcccaaattcccatctgttcatcacctggaggacttgttgacacggttgaggaggggtgtcaccggattccacatgggttctttcaatgtcgagtgtgaaactgtagacctagctgacgtgacggcagtagcgtcaaccatcacacgggcctagaacagtacggcaccccggcgttccaagaaatggttcagaactgcatggcgcaaaacctatcctggaaggggcctgcgaagaagtgggaggaggtgcttctgggccttggagtcgaggggagtcaagctggcatcgacgacgcagaggagatcgctccacttgccaaggaaaacgtagctactccatgacgcttggtgcctcggaaacacgcgttggtgataggaagcatcttctaggatcctcctggccttgtggctggagtgagttgttcagtcagacacagtttcgcctctacaacatcttcctcctcctggtggtggtccgaactccgaagcaaattccagtgataaaggatgaactaagaggtccatgtttctattgctagaccttttgcctcctaaatagacgatgtactgcgcttgtaacaagaacctcactttcgtgtcaagtaatatcaacaggtttcataatggtagtgaactgcactggaaaaacctgtaaacaatgcaaacaggattcaaaactaaaacaaatctgctattaaaagctgttattcaaaattgaaaaaaacaaaacctgttaattcagtattataactcagcaaacataaataaaaaaaaca

SEQ ID NO: 6061 - DNA, 3566 bp, Zea Mays
cgcgatgcgctcgcacgtgccaccgccccccggcccgcgataccgtgcctccgctcgacgcctgcccccgatccctgcgattccagcgccgtcgccgcgcgcgatgcccgtgcacgcacccccaccccaatccccgcctcagcgccgctcccccgcccccacccccgtcctcgccgccccgctccacgctcgcgtggcgtcgtcatcgctgcgctctgcgcccgctccgcccccacccccacacgcgcacacacacctcaccccgcgtcgtcatccacagcccctgcatcgccaccatggactcggggttgaactggtagcccgagggcgcgggaggtgccgccggcggcggaggatgaggcaggcagggcgagggcggcgacgccggaagctcctggaaatggctgcgcgcgcggtggtggtgagaccgctggtccgtgccgggaagcgagaggctgagcaaggtgagcgggtcctcctcctgcggacggctcatggcagtctgccggctcgaacccgccggagcgcgccacggggcggtaaatctggccggacccggagccggcgccgtggctgctgaggtcgctacggtgtatggttggaccccgaccacgaccccgataggctgtcgggcgagaggctcatcatcagcttgcccgggcgcgcctcggtctcggtggcgtcagtgggaaccggcgaaccggacacgacggcccaccgcctccctctgcttcctcccgtcgaagccctccacctctgacacggcgaccgaccactcctccgactccgactttgccaccacgaacagcaacgaggacactgccatcctcggcatgacgggcgacggggcattcgcaatctccttcgccgatcgcttcaccgccagcgccagcgcagcattgttcgtagagaagaggatggttcatggtagcaaaagtatggcggtaccagaacaagggattccccctaatgttgttgaggatggggaacccttcaggcacaccagtgtgggcacttacagaggagcagatgttctttagaggcatgttgtgttgtactcttccacccactctctgccagtctctacacaggttgtggtggaaaacactcgtgtgggatctagctggctcttgtgcaattggtatgccacagctgctcttctcaccgtgtgaggacgagcacagtaaaagctaagcatttcttgattcatcctcccagcttcgttaattactatcaatgatgttgctgcatatttctttggcatcttctttgggaaaacaccgctgatcaagctctctccaaagaaaacgtgggaaggctttatagttaactatcttctgaagcatttccctatgtttagctactcctgctgaaaatgtactaaccacaccttccatggtggagtgcagggcctccctgttggggcacgagatcgcccacccgtcgtctacaccagattatttctatcataccatcagatagtggatggacaaccaagcgtgcaccgtttcatcatttctgattctttcttagatgactaagataagtgtgaggtctgtactcatattctttccttttcttttcaatgcaggtatgatcttatacgagtggagattggcaacaaagatataaagcttgaatacttagtggaggcatttacaacttcaaatgacgtagcctcctcgacaccttctgcttctgctaactccggtgcaagatccttgctatacttgacaaactaaaggaggaaagggagcaacaagaaggaaaatatggggaggaagatgtggatggttcatgtatatcagaagaagaagatggtgactgggatgtagatgagccagatgaggaggacatcatttacgtaaaatagcccattgtcttctaggaacttggtcatcattcatccagaacacagcaggtgtgcttctactgatcgaaaatacatcttccaaataactatgaggacttaaccaagcaccattcaatcttcatttgcttctatagtttggaaatgatcagtggaagatgttgtcttcgtagccaatgattggcacactgctattttgccatgttatctaaagagcatgtataagtcaaatggaatttataaaaatgctaaggttgcgttctgcatacataatattgcctatcaaggtagatttgccagagcagacttcgatcttcttaatctacctgacagtttcttaccatcatttgattttattgatggacatgttaagcctgttctagggagaaagattaactggatgaagacagggatcgttgagagtgatctggttctaacagttagtccacattatgttaaggaactcacttatggcccagataaaggtgttgagttggatggtgtccttcgcacaaagcctcttgaaattggaattgtaaatggcatggatgtttatgaatgggatccttcaacagataagtacaccagcgtgaaatatgatgcaacaacggtaactgaagcaaaggctctcaataaagagaggttgcaagctgaagttggattgcctgtggactcgagcatccctgttatagtttttgtcgggcgtcttgaagaacagaaagggtctgacatactcattgcagccattccagagttcgtgggcgagaatgttcagataatcgttcttggcacgggaaagaagaaaatggaggaggaattaatgcagctggaagtgaaatatccaaacattgctagaggcatagcgaaattcaatgttccattggcacatatgatgtttgctgggtctgacttcattattgtcccaaattcccatctgttcatcacctggaggacttgttgacacggttgaggaggggtgtcaccggattccacatgggttctttcaatgtcgagtgtgaaactgtagacctagctgacgtgacggcagtagcgtcaaccatcacacgggcctagaacagtacggcaccccggcgttccaagaaatggttcagaactgcatggcgcaaaacctatcctggaaggggcctgcgaagaagtgggaggaggtgcttctgggccttggagtcgaggggagtcaagctggcatcgacgacgcagaggagatcgctccacttgccaaggaaaacgtagctactccatgacgcttggtgcctcggaaacacgcgttggtgataggaagcatcttctaggatcctcctggccttgtggctggagtgagttgttcagtcagacacagtttcgcctctacaacatcttcctcctcctggtggtggtccgaactccgaagcaaattccagtgataaaggatgaactaagaggtccatgtttctattgctagaccttttgcctcctaaatagacgatgtactgcgcttgtaacaagaacctcactttcgtgtcaagtaatatcaacaggtttcataatggtagtgaactgcactggaaaaacctgtaaacaatgcaaacaggattcaaaactaaaacaaatctgctattaaaagctgttattcaaaattgaaaaaaacaaaacctgttaattcagtattataactcagcaaacataaataaaaaaaaca

SEQ ID NO: 6062 - DNA, 3722 bp, Zea Mays
cgcgatgcgctcgcacgtgccaccgccccccggcccgcgataccgtgcctccgctcgacgcctgcccccgatccctgcgattccagcgccgtcgccgcgcgcgatgcccgtgcacgcacccccaccccaatccccgcctcagcgccgctcccccgcccccacccccgtcctcgccgccccgctccacgctcgcgtggcgtcgtcatcgctgcgctctgcgcccgctccgcccccacccccacacgcgcacacacacctcaccccgcgtcgtcatccacagcccctgcatcgccaccatggactcggggttgaactggtagcccgagggcgcgggaggtgccgccggcggcggaggatgaggcaggcagggcgagggcggcgacgccggaagctcctggaaatggctgcgcgcgcggtggtggtgagaccgctggtccgtgccgggaagcgagaggctgagcaaggtgagcgggtcctcctcctgcggacggctcatggcagtctgccggctcgaacccgccggagcgcgccacggggcggtaaatctggccggacccggagccggcgccgtggctgctgaggtcgctacggtgtatggttggaccccgaccacgaccccgataggctgtcgggcgagaggctcatcatcagcttgcccgggcgcgcctcggtctcggtggcgtcagtgggaaccggcgaaccggacacgacggcccaccgcctccctctgcttcctcccgtcgaagccctccacctctgacacggcgaccgaccactcctccgactccgactttgccaccacgaacagcaacgaggacactgccatcctcggcatgacgggcgacggggcattcgcaatctccttcgccgatcgcttcaccgccagcgccagcgcagcattgttcgtagagaagaggatggttcatggtagcaaaagtatggcggtaccagaacaagggattccccctaatgttgttgaggatggggaacccttcaggcacaccagtgtgggcacttacagaggagcagatgttctttagaggcatgttgtgttgtactcttccacccactctctgccagtctctacacaggttgtggtggaaaacactcgtgtgggatctagctggctcttgtgcaattggtatgccacagctgctcttctcaccgtgtgaggacgagcacagtaaaagctaagcatttcttgattcatcctcccagcttcgttaattactatcaatgatgttgctgcatatttctttggcatcttctttgggaaaacaccgctgatcaagctctctccaaagaaaacgtgggaaggctttatagttaactatcttctgaagcatttccctatgtttagctactcctgctgaaaatgtactaaccacaccttccatggtggagtgcagggcctccctgttggggcacgagatcgcccacccgtcgtctacaccagattatttctatcataccatcagatagtggatggacaaccaagcgtgcaccgtttcatcatttctgattctttcttagatgactaagataagtgtgaggtctgtactcatattctttccttttcttttcaatgcaggtatgatcttatacgagtggagattggcaacaaagatataaagcttgaatacttagtggaggcatttacaacttcaaatgagtaacattccttgatctgaaatgtgtacaataatcctgatgaactactaaaacacttgccttaatctgaaatgagtacaataaaacatatataaggaaactcaaataagtaaagtcttgcttgtccctcacaccataacatgactgatgaactactaaaacacctgcgaggtctgtcagcgtagcctcctcgacaccttctgcttctgctaactccggtgcaaggtagatccttgctatacttgacaaactaaaggaggaaagggagcaacaagaaggaaaatatggggaggaagatgtggatggttcatgtatatcagaagaagaagatggtgactgggatgtagatgagccagatgaggaggacatcatttacgtaaaatagcccattgtcttctaggaacttggtcatcattcatccagaacacagcaggtgtgcttctactgatcgaaaatacatcttccaaataactatgaggacttaaccaagcaccattcaatcttcatttgcttctatagtttgggttgcgttctgcatacataatattgcctatcaaggtagatttgccagagcagacttcgatcttcttaatctacctgacagtttcttaccatcatttgattttattgatggacatgttaagcctgttctagggagaaagattaactggatgaagacagggatcgttgagagtgatctggttctaacagttagtccacattatgttaaggaactcacttatggcccagataaaggtgttgagttggatggtgtccttcgcacaaagcctcttgaaattggaattgtaaatggcatggatgtttatgaatgggatccttcaacagataagtacaccagcgtgaaatatgatgcaacaacggtaactgaagcaaaggctctcaataaagagaggttgcaagctgaagttggattgcctgtggactcgagcatccctgttatagtttttgtcgggcgtcttgaagaacagaaagggtctgacatactcattgcagccattccagagttcgtgggcgagaatgttcagataatcgttcttggcacgggaaagaagaaaatggaggaggaattaatgcagctggaagtgaaatatccaaacattgctagaggcatagcgaaattcaatgttccattggcacatatgatgtttgctgggtctgacttcattattgtcccaagtaggtttgagccatgtggtctcattcagttgcaagggatgagagtttctagctcgctttgttacagttcagatttgagtgcgcattcccatctgttcatcacctggaggacttgttgacacggttgaggaggggtgtcaccggattccacatgggttctttcaatgtcgagtgtgaaactgtagacctagctgacgtgacggcagtagcgtcaaccatcacacgggcctagaacagtacggcaccccggcgttccaagaaatggttcagaactgcatggcgcaaaacctatcctggaaggggcctgcgaagaagtgggaggaggtgcttctgggccttggagtcgaggggagtcaagctggcatcgacgacgcagaggagatcgctccacttgccaaggaaaacgtagctactccatgacgcttggtgcctcggaaacacgcgttggtgataggaagcatcttctaggatcctcctggccttgtggctggagtgagttgttcagtcagacacagtttcgcctctacaacatcttcctcctcctggtggtggtccgaactccgaagcaaattccagtgataaaggatgaactaagaggtccatgtttctattgctagaccttttgcctcctaaatagacgatgtactgcgcttgtaacaagaacctcactttcgtgtcaagtaatatcaacaggtttcataatggtagtgaactgcactggaaaaacctgtaaacaatgcaaacaggattcaaaactaaaacaaatctgctattaaaagctgttattcaaaattgaaaaaaacaaaacctgttaattcagtattataactcagcaaacataaataaaaaaaaca

SEQ ID NO: 6063 - DNA, 3985 bp, Zea Mays
cgcgatgcgctcgcacgtgccaccgccccccggcccgcgataccgtgcctccgctcgacgcctgcccccgatccctgcgattccagcgccgtcgccgcgcgcgatgcccgtgcacgcacccccaccccaatccccgcctcagcgccgctcccccgcccccacccccgtcctcgccgccccgctccacgctcgcgtggcgtcgtcatcgctgcgctctgcgcccgctccgcccccacccccacacgcgcacacacacctcaccccgcgtcgtcatccacagcccctgcatcgccaccatggactcggggttgaactggtagcccgagggcgcgggaggtgccgccggcggcggaggatgaggcaggcagggcgagggcggcgacgccggaagctcctggaaatggctgcgcgcgcggtggtggtgagaccgctggtccgtgccgggaagcgagaggctgagcaaggtgagcgggtcctcctcctgcggacggctcatggcagtctgccggctcgaacccgccggagcgcgccacggggcggtaaatctggccggacccggagccggcgccgtggctgctgaggtcgctacggtgtatggttggaccccgaccacgaccccgataggctgtcgggcgagaggctcatcatcagcttgcccgggcgcgcctcggtctcggtggcgtcagtgggaaccggcgaaccggacacgacggcccaccgcctccctctgcttcctcccgtcgaagccctccacctctgacacggcgaccgaccactcctccgactccgactttgccaccacgaacagcaacgaggacactgccatcctcggcatgacgggcgacggggcattcgcaatctccttcgccgatcgcttcaccgccagcgccagcgcagcattgttcgtagagaagaggatggttcatggtagcaaaagtatggcggtaccagaacaagggattccccctaatgttgttgaggatggggaacccttcaggcacaccagtgtgggcacttacagaggagcagatgttctttagaggcatgttgtgttgtactcttccacccactctctgccaggttgtggtggaaaacactcgtgtgggatctagctggctcttgtgcaattggtatgccacagctgctcttctcaccgtgtgaggacgagcacagtaaaagctaagcatttcttgattcatcctcccagcttcgttaattactatcaatgatgttgctgcatatttctttggcatcttctttgggaaaacaccgctgatcaagctctctccaaagaaaacgtgggaaggctttatagttaactatcttctgaagcatttccctatgtttagctactcctgctgaaaatgtactaaccacaccttccatggtggagtgcagggcctccctgttggggcacgagatcgcccacccgtcgtctacaccagattatttctatcataccatcagatagtggatggacaaccaagcgtgcaccgtttcatcatttctgattctttcttagatgactaagataagtgtgaggtctgtactcatattctttccttttcttttcaatgcaggtatgatcttatacgagtggagattggcaacaaagatataaagcttgaatacttagtggaggcatttacaacttcaaatgagtaacattccttgatctgaaatgtgtacaataatcctgatgaactactaaaacacttgccttaatctgaaatgagtacaataaaacatatataaggaaactcaaataagtaaagtcttgcttgtccctcacaccataacatgactgatgaactactaaaacacctgcgaggtctgtcagcgtagcctcctcgacaccttctgcttctgctaactccggtgcaaggatgtcttctacaataattcagccaagaacaagaagcgctaattggaatccaaattgtttgatgtggtgatatgatctggaacttggaccatctttatgctttatggggctaagaagcataagacctgtccgaggcaattgtatctcaacataatcagtttgatgggctccaggagttatatcatcagaaatgtttttttagtatttctatgtaccagcaaaatattgactgaatatttctaaccaggtagatccttgctatacttgacaaactaaaggaggaaagggagcaacaagaaggaaaatatggggaggaagatgtggatggttcatgtatatcagaagaagaagatggtgactgggatgtagatgagccagatgaggaggacatcatttacgtaaaatagcccattgtcttctaggaacttggtcatcattcatccagaacacagcaggtgtgcttctactgatcgaaaatacatcttccaaataactatgaggacttaaccaagcaccattcaatcttcatttgcttctatagtttggaaatgatcagtggaagatgttgtcttcgtagccaatgattggcacactgctattttgccatgttatctaaagagcatgtataagtcaaatggaatttataaaaatgctaaggttgcgttctgcatacataatattgcctatcaaggtagatttgccagagcagacttcgatcttcttaatctacctgacagtttcttaccatcatttgattttattgatggacatgttaagcctgttctagggagaaagattaactggatgaagacagggatcgttgagagtgatctggttctaacagttagtccacattatgttaaggaactcacttatggcccagataaaggtgttgagttggatggtgtccttcgcacaaagcctcttgaaattggaattgtaaatggcatggatgtttatgaatgggatccttcaacagataagtacaccagcgtgaaatatgatgcaacaacggtaactgaagcaaaggctctcaataaagagaggttgcaagctgaagttggattgcctgtggactcgagcatccctgttatagtttttgtcgggcgtcttgaagaacagaaagggtctgacatactcattgcagccattccagagttcgtgggcgagaatgttcagataatcgttcttggcacgggaaagaagaaaatggaggaggaattaatgcagctggaagtgaaatatccaaacattgctagaggcatagcgaaattcaatgttccattggcacatatgatgtttgctgggtctgacttcattattgtcccaaattcccatctgttcatcacctggaggacttgttgacacggttgaggaggggtgtcaccggattccacatgggttctttcaatgtcgagtgtgaaactgtagacctagctgacgtgacggcagtagcgtcaaccatcacacgggcctagaacagtacggcaccccggcgttccaagaaatggttcagaactgcatggcgcaaaacctatcctggaaggggcctgcgaagaagtgggaggaggtgcttctgggccttggagtcgaggggagtcaagctggcatcgacgacgcagaggagatcgctccacttgccaaggaaaacgtagctactccatgacgcttggtgcctcggaaacacgcgttggtgataggaagcatcttctaggatcctcctggccttgtggctggagtgagttgttcagtcagacacagtttcgcctctacaacatcttcctcctcctggtggtggtccgaactccgaagcaaattccagtgataaaggatgaactaagaggtccatgtttctattgctagaccttttgcctcctaaatagacgatgtactgcgcttgtaacaagaacctcactttcgtgtcaagtaatatcaacaggtttcataatggtagtgaactgcactggaaaaacctgtaaacaatgcaaacaggattcaaaactaaaacaaatctgctattaaaagctgttattcaaaattgaaaaaaacaaaacctgttaattcagtattataactcagcaaacataaataaaaaaaaca

SEQ ID NO: 6064 - DNA, 3634 bp, Zea Mays
cgcgatgcgctcgcacgtgccaccgccccccggcccgcgataccgtgcctccgctcgacgcctgcccccgatccctgcgattccagcgccgtcgccgcgcgcgatgcccgtgcacgcacccccaccccaatccccgcctcagcgccgctcccccgcccccacccccgtcctcgccgccccgctccacgctcgcgtggcgtcgtcatcgctgcgctctgcgcccgctccgcccccacccccacacgcgcacacacacctcaccccgcgtcgtcatccacagcccctgcatcgccaccatggactcggggttgaactggtagcccgagggcgcgggaggtgccgccggcggcggaggatgaggcaggcagggcgagggcggcgacgccggaagctcctggaaatggctgcgcgcgcggtggtggtgagaccgctggtccgtgccgggaagcgagaggctgagcaaggtgagcgggtcctcctcctgcggacggctcatggcagtctgccggctcgaacccgccggagcgcgccacggggcggtaaatctggccggacccggagccggcgccgtggctgctgaggtcgctacggtgtatggttggaccccgaccacgaccccgataggctgtcgggcgagaggctcatcatcagcttgcccgggcgcgcctcggtctcggtggcgtcagtgggaaccggcgaaccggacacgacggcccaccgcctccctctgcttcctcccgtcgaagccctccacctctgacacggcgaccgaccactcctccgactccgactttgccaccacgaacagcaacgaggacactgccatcctcggcatgacgggcgacggggcattcgcaatctccttcgccgatcgcttcaccgccagcgccagcgcagcattgttcgtagagaagaggatggttcatggtagcaaaagtatggcggtaccagaacaagggattccccctaatgttgttgaggatggggaacccttcaggcacaccagtgtgggcacttacagaggagcagatgttctttagaggcatgttgtgttgtactcttccacccactctctgccagtctctacacaggttgtggtggaaaacactcgtgtgggatctagctggctcttgtgcaattggtatgccacagctgctcttctcaccgtgtgaggacgagcacagtaaaagctaagcatttcttgattcatcctcccagcttcgttaattactatcaatgatgttgctgcatatttctttggcatcttctttgggaaaacaccgctgatcaagctctctccaaagaaaacgtgggaaggctttatagttaactatcttctgaagcatttccctatgtttagctactcctgctgaaaatgtactaaccacaccttccatggtggagtgcagggcctccctgttggggcacgagatcgcccacccgtcgtctacaccagattatttctatcataccatcagatagtggatggacaaccaagcgtgcaccgtttcatcatttctgattctttcttagatgactaagataagtgtgaggtctgtactcatattctttccttttcttttcaatgcaggtatgatcttatacgagtggagattggcaacaaagatataaagcttgaatacttagtggaggcatttacaacttcaaatgagtaacattccttgatctgaaatgtgtacaataatcctgatgaactactaaaacacttgccttaatctgaaatgagtacaataaaacatatataaggaaactcaaataagtaaagtcttgcttgtccctcacaccataacatgactgatgaactactaaaacacctgcgaggtctgtcagcgtagcctcctcgacaccttctgcttctgctaactccggtgcaagatccttgctatacttgacaaactaaaggaggaaagggagcaacaagaaggaaaatatggggaggaagatgtggatggttcatgtatatcagaagaagaagatggtgactgggatgtagatgagccagatgaggaggacatcatttacgtaaaatagcccattgtcttctaggaacttggtcatcattcatccagaacacagcaggtgtgcttctactgatcgaaaatacatcttccaaataactatgaggacttaaccaagcaccattcaatcttcatttgcttctatagtttgggttgcgttctgcatacataatattgcctatcaaggtagatttgccagagcagacttcgatcttcttaatctacctgacagtttcttaccatcatttgattttattgatggacatgttaagcctgttctagggagaaagattaactggatgaagacagggatcgttgagagtgatctggttctaacagttagtccacattatgttaaggaactcacttatggcccagataaaggtgttgagttggatggtgtccttcgcacaaagcctcttgaaattggaattgtaaatggcatggatgtttatgaatgggatccttcaacagataagtacaccagcgtgaaatatgatgcaacaacggtaactgaagcaaaggctctcaataaagagaggttgcaagctgaagttggattgcctgtggactcgagcatccctgttatagtttttgtcgggcgtcttgaagaacagaaagggtctgacatactcattgcagccattccagagttcgtgggcgagaatgttcagataatcgttcttggcacgggaaagaagaaaatggaggaggaattaatgcagctggaagtgaaatatccaaacattgctagaggcatagcgaaattcaatgttccattggcacatatgatgtttgctgggtctgacttcattattgtcccaaattcccatctgttcatcacctggaggacttgttgacacggttgaggaggggtgtcaccggattccacatgggttctttcaatgtcgagtgtgaaactgtagacctagctgacgtgacggcagtagcgtcaaccatcacacgggcctagaacagtacggcaccccggcgttccaagaaatggttcagaactgcatggcgcaaaacctatcctggaaggggcctgcgaagaagtgggaggaggtgcttctgggccttggagtcgaggggagtcaagctggcatcgacgacgcagaggagatcgctccacttgccaaggaaaacgtagctactccatgacgcttggtgcctcggaaacacgcgttggtgataggaagcatcttctaggatcctcctggccttgtggctggagtgagttgttcagtcagacacagtttcgcctctacaacatcttcctcctcctggtggtggtccgaactccgaagcaaattccagtgataaaggatgaactaagaggtccatgtttctattgctagaccttttgcctcctaaatagacgatgtactgcgcttgtaacaagaacctcactttcgtgtcaagtaatatcaacaggtttcataatggtagtgaactgcactggaaaaacctgtaaacaatgcaaacaggattcaaaactaaaacaaatctgctattaaaagctgttattcaaaattgaaaaaaacaaaacctgttaattcagtattataactcagcaaacataaataaaaaaaaca

SEQ ID NO: 6065 - DNA, 4011 bp, Zea Mays
cgcgatgcgctcgcacgtgccaccgccccccggcccgcgataccgtgcctccgctcgacgcctgcccccgatccctgcgattccagcgccgtcgccgcgcgcgatgcccgtgcacgcacccccaccccaatccccgcctcagcgccgctcccccgcccccacccccgtcctcgccgccccgctccacgctcgcgtggcgtcgtcatcgctgcgctctgcgcccgctccgcccccacccccacacgcgcacacacacctcaccccgcgtcgtcatccacagcccctgcatcgccaccatggactcggggttgaactggtagcccgagggcgcgggaggtgccgccggcggcggaggatgaggcaggcagggcgagggcggcgacgccggaagctcctggaaatggctgcgcgcgcggtggtggtgagaccgctggtccgtgccgggaagcgagaggctgagcaaggtgagcgggtcctcctcctgcggacggctcatggcagtctgccggctcgaacccgccggagcgcgccacggggcggtaaatctggccggacccggagccggcgccgtggctgctgaggtcgctacggtgtatggttggaccccgaccacgaccccgataggctgtcgggcgagaggctcatcatcagcttgcccgggcgcgcctcggtctcggtggcgtcagtgggaaccggcgaaccggacacgacggcccaccgcctccctctgcttcctcccgtcgaagccctccacctctgacacggcgaccgaccactcctccgactccgactttgccaccacgaacagcaacgaggacactgccatcctcggcatgacgggcgacggggcattcgcaatctccttcgccgatcgcttcaccgccagcgccagcgcagcattgttcgtagagaagaggatggttcatggtagcaaaagtatggcggtaccagaacaagggattccccctaatgttgttgaggatggggaacccttcaggcacaccagtgtgggcacttacagaggagcagatgttctttagaggcatgttgtgttgtactcttccacccactctctgccaggttgtggtggaaaacactcgtgtgggatctagctggctcttgtgcaattggtatgccacagctgctcttctcaccgtgtgaggacgagcacagtaaaagctaagcatttcttgattcatcctcccagcttcgttaattactatcaatgatgttgctgcatatttctttggcatcttctttgggaaaacaccgctgatcaagctctctccaaagaaaacgtgggaaggctttataggtgcatcaatgacaacattgctttctgcatttgtgggcctccctgttggggcacgagatcgcccacccgtcgtctacaccagattatttctatcataccatcagatagtggatggacaaccaagcgtgcaccgtttcatcatttctgattctttcttagatgactaagataagtgtgaggtctgtactcatattctttccttttcttttcaatgcaggtatgatcttatacgagtggagattggcaacaaagatataaagcttgaatacttagtggaggcatttacaacttcaaatgagtaacattccttgatctgaaatgtgtacaataatcctgatgaactactaaaacacttgccttaatctgaaatgagtacaataaaacatatataaggaaactcaaataagtaaagtcttgcttgtccctcacaccataacatgactgatgaactactaaaacacctgcgaggtctgtcagcgtagcctcctcgacaccttctgcttctgctaactccggtgcaaggtacgccgctgccatcccaatccctacccccaggcaagctttgttgattgctttctggttgttgatttctgagctagctatttagaagtcaaaaattgggtgaaatctgattaaccaaactacctggttagaaatcaaattggatgaaatctaattaattttgatatgtgtctcctgagttcaaggatgtcttctacaataattcagccaagaacaagaagcgctaattggaatccaaattgtttgatgtggtgatatgatctggaacttggaccatctttatgctttatggggctaagaagcataagacctgtccgaggcaattgtatctcaacataatcagtttgatgggctccaggagttatatcatcagaaatgtttttttagtatttctatgtaccagcaaaatattgactgaatatttctaaccaggtagatccttgctatacttgacaaactaaaggaggaaagggagcaacaagaaggaaaatatggggaggaagatgtggatggttcatgtatatcagaagaagaagatggtgactgggatgtagatgagccagatgaggaggacatcatttacgtaaaatagcccattgtcttctaggaacttggtcatcattcatccagaacacagcaggtgtgcttctactgatcgaaaatacatcttccaaataactatgaggacttaaccaagcaccattcaatcttcatttgcttctatagtttgggttgcgttctgcatacataatattgcctatcaaggtagatttgccagagcagacttcgatcttcttaatctacctgacagtttcttaccatcatttgattttattgatggacatgttaagcctgttctagggagaaagattaactggatgaagacagggatcgttgagagtgatctggttctaacagttagtccacattatgttaaggaactcacttatggcccagataaaggtgttgagttggatggtgtccttcgcacaaagcctcttgaaattggaattgtaaatggcatggatgtttatgaatgggatccttcaacagataagtacaccagcgtgaaatatgatgcaacaacggtaactgaagcaaaggctctcaataaagagaggttgcaagctgaagttggattgcctgtggactcgagcatccctgttatagtttttgtcgggcgtcttgaagaacagaaagggtctgacatactcattgcagccattccagagttcgtgggcgagaatgttcagataatcgttcttggcacgggaaagaagaaaatggaggaggaattaatgcagctggaagtgaaatatccaaacattgctagaggcatagcgaaattcaatgttccattggcacatatgatgtttgctgggtctgacttcattattgtcccaaattcccatctgttcatcacctggaggacttgttgacacggttgaggaggggtgtcaccggattccacatgggttctttcaatgtcgagtgtgaaactgtagacctagctgacgtgacggcagtagcgtcaaccatcacacgggcctagaacagtacggcaccccggcgttccaagaaatggttcagaactgcatggcgcaaaacctatcctggaaggggcctgcgaagaagtgggaggaggtgcttctgggccttggagtcgaggggagtcaagctggcatcgacgacgcagaggagatcgctccacttgccaaggaaaacgtagctactccatgacgcttggtgcctcggaaacacgcgttggtgataggaagcatcttctaggatcctcctggccttgtggctggagtgagttgttcagtcagacacagtttcgcctctacaacatcttcctcctcctggtggtggtccgaactccgaagcaaattccagtgataaaggatgaactaagaggtccatgtttctattgctagaccttttgcctcctaaatagacgatgtactgcgcttgtaacaagaacctcactttcgtgtcaagtaatatcaacaggtttcataatggtagtgaactgcactggaaaaacctgtaaacaatgcaaacaggattcaaaactaaaacaaatctgctattaaaagctgttattcaaaattgaaaaaaacaaaacctgttaattcagtattataactcagcaaacataaataaaaaaaaca

SEQ ID NO: 6066 - DNA, 3532 bp, Zea Mays
cgcgatgcgctcgcacgtgccaccgccccccggcccgcgataccgtgcctccgctcgacgcctgcccccgatccctgcgattccagcgccgtcgccgcgcgcgatgcccgtgcacgcacccccaccccaatccccgcctcagcgccgctcccccgcccccacccccgtcctcgccgccccgctccacgctcgcgtggcgtcgtcatcgctgcgctctgcgcccgctccgcccccacccccacacgcgcacacacacctcaccccgcgtcgtcatccacagcccctgcatcgccaccatggactcggggttgaactggtagcccgagggcgcgggaggtgccgccggcggcggaggatgaggcaggcagggcgagggcggcgacgccggaagctcctggaaatggctgcgcgcgcggtggtggtgagaccgctggtccgtgccgggaagcgagaggctgagcaaggtgagcgggtcctcctcctgcggacggctcatggcagtctgccggctcgaacccgccggagcgcgccacggggcggtaaatctggccggacccggagccggcgccgtggctgctgaggtcgctacggtgtatggttggaccccgaccacgaccccgataggctgtcgggcgagaggctcatcatcagcttgcccgggcgcgcctcggtctcggtggcgtcagtgggaaccggcgaaccggacacgacggcccaccgcctccctctgcttcctcccgtcgaagccctccacctctgacacggcgaccgaccactcctccgactccgactttgccaccacgaacagcaacgaggacactgccatcctcggcatgacgggcgacggggcattcgcaatctccttcgccgatcgcttcaccgccagcgccagcgcagcattgttcgtagagaagaggatggttcatggtagcaaaagtatggcggtaccagaacaagggattccccctaatgttgttgaggatggggaacccttcaggcacaccagtgtgggcacttacagaggagcagatgttctttagaggcatgttgtgttgtactcttccacccactctctgccaggttgtggtggaaaacactcgtgtgggatctagctggctcttgtgcaattggtatgccacagctgctcttctcaccgtgtgaggacgagcacagtaaaagctaagcatttcttgattcatcctcccagcttcgttaattactatcaatgatgttgctgcatatttctttggcatcttctttgggaaaacaccgctgatcaagctctctccaaagaaaacgtgggaaggctttatagttaactatcttctgaagcatttccctatgtttagctactcctgctgaaaatgtactaaccacaccttccatggtggagtgcagggcctccctgttggggcacgagatcgcccacccgtcgtctacaccagattatttctatcataccatcagatagtggatggacaaccaagcgtgcaccgtttcatcatttctgattctttcttagatgactaagataagtgtgaggtctgtactcatattctttccttttcttttcaatgcaggtatgatcttatacgagtggagattggcaacaaagatataaagcttgaatacttagtggaggcatttacaacttcaaatgagtaacattccttgatctgaaatgtgtacaataatcctgatgaactactaaaacacttgccttaatctgaaatgagtacaataaaacatatataaggaaactcaaataagtaaagtcttgcttgtccctcacaccataacatgactgatgaactactaaaacacctgcgaggtctgtcagcgtagcctcctcgacaccttctgcttctgctaactccggtgcaagatccttgctatacttgacaaactaaaggaggaaagggagcaacaagaaggaaaatatggggaggaagatgtggatggttcatgtatatcagaagaagaagatggtgactgggatgtagatgagccagatgaggaggacatcatttacgtaaaatagcccattgtcttctaggaacttggtcatcattcatccagaacacagcaggttgcgttctgcatacataatattgcctatcaaggtagatttgccagagcagacttcgatcttcttaatctacctgacagtttcttaccatcatttgattttattgatggacatgttaagcctgttctagggagaaagattaactggatgaagacagggatcgttgagagtgatctggttctaacagttagtccacattatgttaaggaactcacttatggcccagataaaggtgttgagttggatggtgtccttcgcacaaagcctcttgaaattggaattgtaaatggcatggatgtttatgaatgggatccttcaacagataagtacaccagcgtgaaatatgatgcaacaacggtaactgaagcaaaggctctcaataaagagaggttgcaagctgaagttggattgcctgtggactcgagcatccctgttatagtttttgtcgggcgtcttgaagaacagaaagggtctgacatactcattgcagccattccagagttcgtgggcgagaatgttcagataatcgttcttggcacgggaaagaagaaaatggaggaggaattaatgcagctggaagtgaaatatccaaacattgctagaggcatagcgaaattcaatgttccattggcacatatgatgtttgctgggtctgacttcattattgtcccaaattcccatctgttcatcacctggaggacttgttgacacggttgaggaggggtgtcaccggattccacatgggttctttcaatgtcgagtgtgaaactgtagacctagctgacgtgacggcagtagcgtcaaccatcacacgggcctagaacagtacggcaccccggcgttccaagaaatggttcagaactgcatggcgcaaaacctatcctggaaggggcctgcgaagaagtgggaggaggtgcttctgggccttggagtcgaggggagtcaagctggcatcgacgacgcagaggagatcgctccacttgccaaggaaaacgtagctactccatgacgcttggtgcctcggaaacacgcgttggtgataggaagcatcttctaggatcctcctggccttgtggctggagtgagttgttcagtcagacacagtttcgcctctacaacatcttcctcctcctggtggtggtccgaactccgaagcaaattccagtgataaaggatgaactaagaggtccatgtttctattgctagaccttttgcctcctaaatagacgatgtactgcgcttgtaacaagaacctcactttcgtgtcaagtaatatcaacaggtttcataatggtagtgaactgcactggaaaaacctgtaaacaatgcaaacaggattcaaaactaaaacaaatctgctattaaaagctgttattcaaaattgaaaaaaacaaaacctgttaattcagtattataactcagcaaacataaataaaaaaaaca

SEQ ID NO: 6067 - DNA, 3560 bp, Zea Mays
cgcgatgcgctcgcacgtgccaccgccccccggcccgcgataccgtgcctccgctcgacgcctgcccccgatccctgcgattccagcgccgtcgccgcgcgcgatgcccgtgcacgcacccccaccccaatccccgcctcagcgccgctcccccgcccccacccccgtcctcgccgccccgctccacgctcgcgtggcgtcgtcatcgctgcgctctgcgcccgctccgcccccacccccacacgcgcacacacacctcaccccgcgtcgtcatccacagcccctgcatcgccaccatggactcggggttgaactggtagcccgagggcgcgggaggtgccgccggcggcggaggatgaggcaggcagggcgagggcggcgacgccggaagctcctggaaatggctgcgcgcgcggtggtggtgagaccgctggtccgtgccgggaagcgagaggctgagcaaggtgagcgggtcctcctcctgcggacggctcatggcagtctgccggctcgaacccgccggagcgcgccacggggcggtaaatctggccggacccggagccggcgccgtggctgctgaggtcgctacggtgtatggttggaccccgaccacgaccccgataggctgtcgggcgagaggctcatcatcagcttgcccgggcgcgcctcggtctcggtggcgtcagtgggaaccggcgaaccggacacgacggcccaccgcctccctctgcttcctcccgtcgaagccctccacctctgacacggcgaccgaccactcctccgactccgactttgccaccacgaacagcaacgaggacactgccatcctcggcatgacgggcgacggggcattcgcaatctccttcgccgatcgcttcaccgccagcgccagcgcagcattgttcgtagagaagaggatggttcatggtagcaaaagtatggcggtaccagaacaagggattccccctaatgttgttgaggatggggaacccttcaggcacaccagtgtgggcacttacagaggagcagatgttctttagaggcatgttgtgttgtactcttccacccactctctgccaggttgtggtggaaaacactcgtgtgggatctagctggctcttgtgcaattggtatgccacagctgctcttctcaccgtgtgaggacgagcacagtaaaagctaagcatttcttgattcatcctcccagcttcgttaattactatcaatgatgttgctgcatatttctttggcatcttctttgggaaaacaccgctgatcaagctctctccaaagaaaacgtgggaaggctttataggtgcatcaatgacaacattgctttctgcatttgtgctactcctgctgaaaatgtactaaccacaccttccatggtggagtgcagggcctccctgttggggcacgagatcgcccacccgtcgtctacaccagattatttctatcataccatcagatagtggatggacaaccaagcgtgcaccgtttcatcatttctgattctttcttagatgactaagataagtgtgaggtctgtactcatattctttccttttcttttcaatgcaggtatgatcttatacgagtggagattggcaacaaagatataaagcttgaatacttagtggaggcatttacaacttcaaatgacgtagcctcctcgacaccttctgcttctgctaactccggtgcaaggtagatccttgctatacttgacaaactaaaggaggaaagggagcaacaagaaggaaaatatggggaggaagatgtggatggttcatgtatatcagaagaagaagatggtgactgggatgtagatgagccagatgaggaggacatcatttacgtaaaatagcccattgtcttctaggaacttggtcatcattcatccagaacacagcaggtgtgcttctactgatcgaaaatacatcttccaaataactatgaggacttaaccaagcaccattcaatcttcatttgcttctatagtttggaaatgatcagtggaagatgttgtcttcgtagccaatgattggcacactgctattttgccatgttatctaaagagcatgtataagtcaaatggaatttataaaaatgctaaggttgcgttctgcatacataatattgcctatcaaggtagatttgccagagcagacttcgatcttcttaatctacctgacagtttcttaccatcatttgattttattgatggacatgttaagcctgttctagggagaaagattaactggatgaagacagggatcgttgagagtgatctggttctaacagttagtccacattatgttaaggaactcacttatggcccagataaaggtgttgagttggatggtgtccttcgcacaaagcctcttgaaattggaattgtaaatggcatggatgtttatgaatgggatccttcaacagataagtacaccagcgtgaaatatgatgcaacaacggtaactgaagcaaaggctctcaataaagagaggttgcaagctgaagttggattgcctgtggactcgagcatccctgttatagtttttgtcgggcgtcttgaagaacagaaagggtctgacatactcattgcagccattccagagttcgtgggcgagaatgttcagataatcgttcttggcacgggaaagaagaaaatggaggaggaattaatgcagctggaagtgaaatatccaaacattgctagaggcatagcgaaattcaatgttccattggcacatatgatgtttgctgggtctgacttcattattgtcccaaattcccatctgttcatcacctggaggacttgttgacacggttgaggaggggtgtcaccggattccacatgggttctttcaatgtcgagtgtgaaactgtagacctagctgacgtgacggcagtagcgtcaaccatcacacgggcctagaacagtacggcaccccggcgttccaagaaatggttcagaactgcatggcgcaaaacctatcctggaaggggcctgcgaagaagtgggaggaggtgcttctgggccttggagtcgaggggagtcaagctggcatcgacgacgcagaggagatcgctccacttgccaaggaaaacgtagctactccatgacgcttggtgcctcggaaacacgcgttggtgataggaagcatcttctaggatcctcctggccttgtggctggagtgagttgttcagtcagacacagtttcgcctctacaacatcttcctcctcctggtggtggtccgaactccgaagcaaattccagtgataaaggatgaactaagaggtccatgtttctattgctagaccttttgcctcctaaatagacgatgtactgcgcttgtaacaagaacctcactttcgtgtcaagtaatatcaacaggtttcataatggtagtgaactgcactggaaaaacctgtaaacaatgcaaacaggattcaaaactaaaacaaatctgctattaaaagctgttattcaaaattgaaaaaaacaaaacctgttaattcagtattataactcagcaaacataaataaaaaaaaca

SEQ ID NO: 6068 - DNA, 3264 bp, Zea Mays
cgcgatgcgctcgcacgtgccaccgccccccggcccgcgataccgtgcctccgctcgacgcctgcccccgatccctgcgattccagcgccgtcgccgcgcgcgatgcccgtgcacgcacccccaccccaatccccgcctcagcgccgctcccccgcccccacccccgtcctcgccgccccgctccacgctcgcgtggcgtcgtcatcgctgcgctctgcgcccgctccgcccccacccccacacgcgcacacacacctcaccccgcgtcgtcatccacagcccctgcatcgccaccatggactcggggttgaactggtagcccgagggcgcgggaggtgccgccggcggcggaggatgaggcaggcagggcgagggcggcgacgccggaagctcctggaaatggctgcgcgcgcggtggtggtgagaccgctggtccgtgccgggaagcgagaggctgagcaaggtgagcgggtcctcctcctgcggacggctcatggcagtctgccggctcgaacccgccggagcgcgccacggggcggtaaatctggccggacccggagccggcgccgtggctgctgaggtcgctacggtgtatggttggaccccgaccacgaccccgataggctgtcgggcgagaggctcatcatcagcttgcccgggcgcgcctcggtctcggtggcgtcagtgggaaccggcgaaccggacacgacggcccaccgcctccctctgcttcctcccgtcgaagccctccacctctgacacggcgaccgaccactcctccgactccgactttgccaccacgaacagcaacgaggacactgccatcctcggcatgacgggcgacggggcattcgcaatctccttcgccgatcgcttcaccgccagcgccagcgcagcattgttcgtagagaagaggatggttcatggtagcaaaagtatggcggtaccagaacaagggattccccctaatgttgttgaggatggggaacccttcaggcacaccagtgtgggcacttacagaggagcagatgttctttagaggcatgttgtgttgtactcttccacccactctctgccaggttgtggtggaaaacactcgtgtgggatctagctggctcttgtgcaattggtatgccacagctgctcttctcaccgtgtgaggacgagcacagtaaaagctaagcatttcttgattcatcctcccagcttcgttaattactatcaatgatgttgctgcatatttctttggcatcttctttgggaaaacaccgctgatcaagctctctccaaagaaaacgtgggaaggctttataggtgcatcaatgacaacattgctttctgcatttgtgctactcctgctgaaaatgtactaaccacaccttccatggtggagtgcagggcctccctgttggggcacgagatcgcccacccgtcgtctacaccagattatttctatcataccatcagatagtggatggacaaccaagtatgatcttatacgagtggagattggcaacaaagatataaagcttgaatacttagtggaggcatttacaacttcaaatgacgtagcctcctcgacaccttctgcttctgctaactccggtgcaaggtagatccttgctatacttgacaaactaaaggaggaaagggagcaacaagaaggaaaatatggggaggaagatgtggatggttcatgtatatcagaagaagaagatggtgactgggatgtagatgagccagatgaggaggacatcatttacgtaaaatagcccattgtcttctaggaacttggtcatcattcatccagaacacagcaggttgcgttctgcatacataatattgcctatcaaggtagatttgccagagcagacttcgatcttcttaatctacctgacagtttcttaccatcatttgattttattgatggacatgttaagcctgttctagggagaaagattaactggatgaagacagggatcgttgagagtgatctggttctaacagttagtccacattatgttaaggaactcacttatggcccagataaaggtgttgagttggatggtgtccttcgcacaaagcctcttgaaattggaattgtaaatggcatggatgtttatgaatgggatccttcaacagataagtacaccagcgtgaaatatgatgcaacaacggtaactgaagcaaaggctctcaataaagagaggttgcaagctgaagttggattgcctgtggactcgagcatccctgttatagtttttgtcgggcgtcttgaagaacagaaagggtctgacatactcattgcagccattccagagttcgtgggcgagaatgttcagataatcgttcttggcacgggaaagaagaaaatggaggaggaattaatgcagctggaagtgaaatatccaaacattgctagaggcatagcgaaattcaatgttccattggcacatatgatgtttgctgggtctgacttcattattgtcccaaattcccatctgttcatcacctggaggacttgttgacacggttgaggaggggtgtcaccggattccacatgggttctttcaatgtcgagtgtgaaactgtagacctagctgacgtgacggcagtagcgtcaaccatcacacgggcctagaacagtacggcaccccggcgttccaagaaatggttcagaactgcatggcgcaaaacctatcctggaaggggcctgcgaagaagtgggaggaggtgcttctgggccttggagtcgaggggagtcaagctggcatcgacgacgcagaggagatcgctccacttgccaaggaaaacgtagctactccatgacgcttggtgcctcggaaacacgcgttggtgataggaagcatcttctaggatcctcctggccttgtggctggagtgagttgttcagtcagacacagtttcgcctctacaacatcttcctcctcctggtggtggtccgaactccgaagcaaattccagtgataaaggatgaactaagaggtccatgtttctattgctagaccttttgcctcctaaatagacgatgtactgcgcttgtaacaagaacctcactttcgtgtcaagtaatatcaacaggtttcataatggtagtgaactgcactggaaaaacctgtaaacaatgcaaacaggattcaaaactaaaacaaatctgctattaaaagctgttattcaaaattgaaaaaaacaaaacctgttaattcagtattataactcagcaaacataaataaaaaaaaca

SEQ ID NO: 6069 - DNA, 3844 bp, Zea Mays
cgcgatgcgctcgcacgtgccaccgccccccggcccgcgataccgtgcctccgctcgacgcctgcccccgatccctgcgattccagcgccgtcgccgcgcgcgatgcccgtgcacgcacccccaccccaatccccgcctcagcgccgctcccccgcccccacccccgtcctcgccgccccgctccacgctcgcgtggcgtcgtcatcgctgcgctctgcgcccgctccgcccccacccccacacgcgcacacacacctcaccccgcgtcgtcatccacagcccctgcatcgccaccatggactcggggttgaactggtagcccgagggcgcgggaggtgccgccggcggcggaggatgaggcaggcagggcgagggcggcgacgccggaagctcctggaaatggctgcgcgcgcggtggtggtgagaccgctggtccgtgccgggaagcgagaggctgagcaaggtgagcgggtcctcctcctgcggacggctcatggcagtctgccggctcgaacccgccggagcgcgccacggggcggtaaatctggccggacccggagccggcgccgtggctgctgaggtcgctacggtgtatggttggaccccgaccacgaccccgataggctgtcgggcgagaggctcatcatcagcttgcccgggcgcgcctcggtctcggtggcgtcagtgggaaccggcgaaccggacacgacggcccaccgcctccctctgcttcctcccgtcgaagccctccacctctgacacggcgaccgaccactcctccgactccgactttgccaccacgaacagcaacgaggacactgccatcctcggcatgacgggcgacggggcattcgcaatctccttcgccgatcgcttcaccgccagcgccagcgcagcattgttcgtagagaagaggatggttcatggtagcaaaagtatggcggtaccagaacaagggattccccctaatgttgttgaggatggggaacccttcaggcacaccagtgtgggcacttacagaggagcagatgttctttagaggcatgttgtgttgtactcttccacccactctctgccagtctctacacaggttgtggtggaaaacactcgtgtgggatctagctggctcttgtgcaattggtatgccacagctgctcttctcaccgtgtgaggacgagcacagtaaaagctaagcatttcttgattcatcctcccagcttcgttaattactatcaatgatgttgctgcatatttctttggcatcttctttgggaaaacaccgctgatcaagctctctccaaagaaaacgtgggaaggctttatagttaactatcttctgaagcatttccctatgtttagctactcctgctgaaaatgtactaaccacaccttccatggtggagtgcagggcctccctgttggggcacgagatcgcccacccgtcgtctacaccagattatttctatcataccatcagatagtggatggacaaccaagcgtgcaccgtttcatcatttctgattctttcttagatgactaagataagtgtgaggtctgtactcatattctttccttttcttttcaatgcaggtatgatcttatacgagtggagattggcaacaaagatataaagcttgaatacttagtggaggcatttacaacttcaaatgagtaacattccttgatctgaaatgtgtacaataatcctgatgaactactaaaacacttgccttaatctgaaatgagtacaataaaacatatataaggaaactcaaataagtaaagtcttgcttgtccctcacaccataacatgactgatgaactactaaaacacctgcgaggtctgtcagcgtagcctcctcgacaccttctgcttctgctaactccggtgcaaggtagatccttgctatacttgacaaactaaaggaggaaagggagcaacaagaaggaaaatatggggaggaagatgtggatggttcatgtatatcagaagaagaagatggtgactgggatgtagatgagccagatgaggaggacatcatttacgtaaaatagcccattgtcttctaggaacttggtcatcattcatccagaacacagcaggtgtgcttctactgatcgaaaatacatcttccaaataactatgaggacttaaccaagcaccattcaatcttcatttgcttctatagtttgggtacagtctctctctctttttctaagccattgtgtaatagagtagcattagtacgatttaatgatacaatgtcactttctcatatgttctaacagaaatgatcagtggaagatgttgtcttcgtagccaatgattggcacactgctattttgccatgttatctaaagagcatgtataagtcaaatggaatttataaaaatgctaaggttgcgttctgcatacataatattgcctatcaaggtagatttgccagagcagacttcgatcttcttaatctacctgacagtttcttaccatcatttgattttattgatggacatgttaagcctgttctagggagaaagattaactggatgaagacagggatcgttgagagtgatctggttctaacagttagtccacattatgttaaggaactcacttatggcccagataaaggtgttgagttggatggtgtccttcgcacaaagcctcttgaaattggaattgtaaatggcatggatgtttatgaatgggatccttcaacagataagtacaccagcgtgaaatatgatgcaacaacggtaactgaagcaaaggctctcaataaagagaggttgcaagctgaagttggattgcctgtggactcgagcatccctgttatagtttttgtcgggcgtcttgaagaacagaaagggtctgacatactcattgcagccattccagagttcgtgggcgagaatgttcagataatcgttcttggcacgggaaagaagaaaatggaggaggaattaatgcagctggaagtgaaatatccaaacattgctagaggcatagcgaaattcaatgttccattggcacatatgatgtttgctgggtctgacttcattattgtcccaaattcccatctgttcatcacctggaggacttgttgacacggttgaggaggggtgtcaccggattccacatgggttctttcaatgtcgagtgtgaaactgtagacctagctgacgtgacggcagtagcgtcaaccatcacacgggcctagaacagtacggcaccccggcgttccaagaaatggttcagaactgcatggcgcaaaacctatcctggaaggggcctgcgaagaagtgggaggaggtgcttctgggccttggagtcgaggggagtcaagctggcatcgacgacgcagaggagatcgctccacttgccaaggaaaacgtagctactccatgacgcttggtgcctcggaaacacgcgttggtgataggaagcatcttctaggatcctcctggccttgtggctggagtgagttgttcagtcagacacagtttcgcctctacaacatcttcctcctcctggtggtggtccgaactccgaagcaaattccagtgataaaggatgaactaagaggtccatgtttctattgctagaccttttgcctcctaaatagacgatgtactgcgcttgtaacaagaacctcactttcgtgtcaagtaatatcaacaggtttcataatggtagtgaactgcactggaaaaacctgtaaacaatgcaaacaggattcaaaactaaaacaaatctgctattaaaagctgttattcaaaattgaaaaaaacaaaacctgttaattcagtattataactcagcaaacataaataaaaaaaaca

SEQ ID NO: 6070 - DNA, 3487 bp, Zea Mays
cgcgatgcgctcgcacgtgccaccgccccccggcccgcgataccgtgcctccgctcgacgcctgcccccgatccctgcgattccagcgccgtcgccgcgcgcgatgcccgtgcacgcacccccaccccaatccccgcctcagcgccgctcccccgcccccacccccgtcctcgccgccccgctccacgctcgcgtggcgtcgtcatcgctgcgctctgcgcccgctccgcccccacccccacacgcgcacacacacctcaccccgcgtcgtcatccacagcccctgcatcgccaccatggactcggggttgaactggtagcccgagggcgcgggaggtgccgccggcggcggaggatgaggcaggcagggcgagggcggcgacgccggaagctcctggaaatggctgcgcgcgcggtggtggtgagaccgctggtccgtgccgggaagcgagaggctgagcaaggtgagcgggtcctcctcctgcggacggctcatggcagtctgccggctcgaacccgccggagcgcgccacggggcggtaaatctggccggacccggagccggcgccgtggctgctgaggtcgctacggtgtatggttggaccccgaccacgaccccgataggctgtcgggcgagaggctcatcatcagcttgcccgggcgcgcctcggtctcggtggcgtcagtgggaaccggcgaaccggacacgacggcccaccgcctccctctgcttcctcccgtcgaagccctccacctctgacacggcgaccgaccactcctccgactccgactttgccaccacgaacagcaacgaggacactgccatcctcggcatgacgggcgacggggcattcgcaatctccttcgccgatcgcttcaccgccagcgccagcgcagcattgttcgtagagaagaggatggttcatggtagcaaaagtatggcggtaccagaacaagggattccccctaatgttgttgaggatggggaacccttcaggcacaccagtgtgggcacttacagaggagcagatgttctttagaggcatgttgtgttgtactcttccacccactctctgccagtctctacacaggttgtggtggaaaacactcgtgtgggatctagctggctcttgtgcaattggtatgccacagctgctcttctcaccgtgtgaggacgagcacagtaaaagctaagcatttcttgattcatcctcccagcttcgttaattactatcaatgatgttgctgcatatttctttggcatcttctttgggaaaacaccgctgatcaagctctctccaaagaaaacgtgggaaggctttataggtgcatcaatgacaacattgctttctgcatttgtgttaactatcttctgaagcatttccctatgtttagctactcctgctgaaaatgtactaaccacaccttccatggtggagtgcagggcctccctgttggggcacgagatcgcccacccgtcgtctacaccagattatttctatcataccatcagatagtggatggacaaccaagcgtgcaccgtttcatcatttctgattctttcttagatgactaagataagtgtgaggtctgtactcatattctttccttttcttttcaatgcaggtatgatcttatacgagtggagattggcaacaaagatataaagcttgaatacttagtggaggcatttacaacttcaaatgacgtagcctcctcgacaccttctgcttctgctaactccggtgcaaggtagatccttgctatacttgacaaactaaaggaggaaagggagcaacaagaaggaaaatatggggaggaagatgtggatggttcatgtatatcagaagaagaagatggtgactgggatgtagatgagccagatgaggaggacatcatttacgtaaaatagcccattgtcttctaggaacttggtcatcattcatccagaacacagcaggttgcgttctgcatacataatattgcctatcaaggtagatttgccagagcagacttcgatcttcttaatctacctgacagtttcttaccatcatttgattttattgatggacatgttaagcctgttctagggagaaagattaactggatgaagacagggatcgttgagagtgatctggttctaacagttagtccacattatgttaaggaactcacttatggcccagataaaggtgttgagttggatggtgtccttcgcacaaagcctcttgaaattggaattgtaaatggcatggatgtttatgaatgggatccttcaacagataagtacaccagcgtgaaatatgatgcaacaacggtaactgaagcaaaggctctcaataaagagaggttgcaagctgaagttggattgcctgtggactcgagcatccctgttatagtttttgtcgggcgtcttgaagaacagaaagggtctgacatactcattgcagccattccagagttcgtgggcgagaatgttcagataatcgttcttggcacgggaaagaagaaaatggaggaggaattaatgcagctggaagtgaaatatccaaacattgctagaggcatagcgaaattcaatgttccattggcacatatgatgtttgctgggtctgacttcattattgtcccaagtaggtttgagccatgtggtctcattcagttgcaagggatgagagtttctagctcgctttgttacagttcagatttgagtgcgcattcccatctgttcatcacctggaggacttgttgacacggttgaggaggggtgtcaccggattccacatgggttctttcaatgtcgagtgtgaaactgtagacctagctgacgtgacggcagtagcgtcaaccatcacacgggcctagaacagtacggcaccccggcgttccaagaaatggttcagaactgcatggcgcaaaacctatcctggaaggggcctgcgaagaagtgggaggaggtgcttctgggccttggagtcgaggggagtcaagctggcatcgacgacgcagaggagatcgctccacttgccaaggaaaacgtagctactccatgacgcttggtgcctcggaaacacgcgttggtgataggaagcatcttctaggatcctcctggccttgtggctggagtgagttgttcagtcagacacagtttcgcctctacaacatcttcctcctcctggtggtggtccgaactccgaagcaaattccagtgataaaggatgaactaagaggtccatgtttctattgctagaccttttgcctcctaaatagacgatgtactgcgcttgtaacaagaacctcactttcgtgtcaagtaatatcaacaggtttcataatggtagtgaactgcactggaaaaacctgtaaacaatgcaaacaggattcaaaactaaaacaaatctgctattaaaagctgttattcaaaattgaaaaaaacaaaacctgttaattcagtattataactcagcaaacataaataaaaaaaaca

SEQ ID NO: 6071 - DNA, 3274 bp, Zea Mays
cgcgatgcgctcgcacgtgccaccgccccccggcccgcgataccgtgcctccgctcgacgcctgcccccgatccctgcgattccagcgccgtcgccgcgcgcgatgcccgtgcacgcacccccaccccaatccccgcctcagcgccgctcccccgcccccacccccgtcctcgccgccccgctccacgctcgcgtggcgtcgtcatcgctgcgctctgcgcccgctccgcccccacccccacacgcgcacacacacctcaccccgcgtcgtcatccacagcccctgcatcgccaccatggactcggggttgaactggtagcccgagggcgcgggaggtgccgccggcggcggaggatgaggcaggcagggcgagggcggcgacgccggaagctcctggaaatggctgcgcgcgcggtggtggtgagaccgctggtccgtgccgggaagcgagaggctgagcaaggtgagcgggtcctcctcctgcggacggctcatggcagtctgccggctcgaacccgccggagcgcgccacggggcggtaaatctggccggacccggagccggcgccgtggctgctgaggtcgctacggtgtatggttggaccccgaccacgaccccgataggctgtcgggcgagaggctcatcatcagcttgcccgggcgcgcctcggtctcggtggcgtcagtgggaaccggcgaaccggacacgacggcccaccgcctccctctgcttcctcccgtcgaagccctccacctctgacacggcgaccgaccactcctccgactccgactttgccaccacgaacagcaacgaggacactgccatcctcggcatgacgggcgacggggcattcgcaatctccttcgccgatcgcttcaccgccagcgccagcgcagcattgttcgtagagaagaggatggttcatggtagcaaaagtatggcggtaccagaacaagggattccccctaatgttgttgaggatggggaacccttcaggcacaccagtgtgggcacttacagaggagcagatgttctttagaggcatgttgtgttgtactcttccacccactctctgccagtctctacacaggttgtggtggaaaacactcgtgtgggatctagctggctcttgtgcaattggtatgccacagctgctcttctcaccgtgtgaggacgagcacagtaaaagctaagcatttcttgattcatcctcccagcttcgttaattactatcaatgatgttgctgcatatttctttggcatcttctttgggaaaacaccgctgatcaagctctctccaaagaaaacgtgggaaggctttatagttaactatcttctgaagcatttccctatgtttagctactcctgctgaaaatgtactaaccacaccttccatggtggagtgcagggcctccctgttggggcacgagatcgcccacccgtcgtctacaccagattatttctatcataccatcagatagtggatggacaaccaagtatgatcttatacgagtggagattggcaacaaagatataaagcttgaatacttagtggaggcatttacaacttcaaatgacgtagcctcctcgacaccttctgcttctgctaactccggtgcaaggtagatccttgctatacttgacaaactaaaggaggaaagggagcaacaagaaggaaaatatggggaggaagatgtggatggttcatgtatatcagaagaagaagatggtgactgggatgtagatgagccagatgaggaggacatcatttacgtaaaatagcccattgtcttctaggaacttggtcatcattcatccagaacacagcaggttgcgttctgcatacataatattgcctatcaaggtagatttgccagagcagacttcgatcttcttaatctacctgacagtttcttaccatcatttgattttattgatggacatgttaagcctgttctagggagaaagattaactggatgaagacagggatcgttgagagtgatctggttctaacagttagtccacattatgttaaggaactcacttatggcccagataaaggtgttgagttggatggtgtccttcgcacaaagcctcttgaaattggaattgtaaatggcatggatgtttatgaatgggatccttcaacagataagtacaccagcgtgaaatatgatgcaacaacggtaactgaagcaaaggctctcaataaagagaggttgcaagctgaagttggattgcctgtggactcgagcatccctgttatagtttttgtcgggcgtcttgaagaacagaaagggtctgacatactcattgcagccattccagagttcgtgggcgagaatgttcagataatcgttcttggcacgggaaagaagaaaatggaggaggaattaatgcagctggaagtgaaatatccaaacattgctagaggcatagcgaaattcaatgttccattggcacatatgatgtttgctgggtctgacttcattattgtcccaaattcccatctgttcatcacctggaggacttgttgacacggttgaggaggggtgtcaccggattccacatgggttctttcaatgtcgagtgtgaaactgtagacctagctgacgtgacggcagtagcgtcaaccatcacacgggcctagaacagtacggcaccccggcgttccaagaaatggttcagaactgcatggcgcaaaacctatcctggaaggggcctgcgaagaagtgggaggaggtgcttctgggccttggagtcgaggggagtcaagctggcatcgacgacgcagaggagatcgctccacttgccaaggaaaacgtagctactccatgacgcttggtgcctcggaaacacgcgttggtgataggaagcatcttctaggatcctcctggccttgtggctggagtgagttgttcagtcagacacagtttcgcctctacaacatcttcctcctcctggtggtggtccgaactccgaagcaaattccagtgataaaggatgaactaagaggtccatgtttctattgctagaccttttgcctcctaaatagacgatgtactgcgcttgtaacaagaacctcactttcgtgtcaagtaatatcaacaggtttcataatggtagtgaactgcactggaaaaacctgtaaacaatgcaaacaggattcaaaactaaaacaaatctgctattaaaagctgttattcaaaattgaaaaaaacaaaacctgttaattcagtattataactcagcaaacataaataaaaaaaaca

SEQ ID NO: 6072 - DNA, 3712 bp, Zea Mays
cgcgatgcgctcgcacgtgccaccgccccccggcccgcgataccgtgcctccgctcgacgcctgcccccgatccctgcgattccagcgccgtcgccgcgcgcgatgcccgtgcacgcacccccaccccaatccccgcctcagcgccgctcccccgcccccacccccgtcctcgccgccccgctccacgctcgcgtggcgtcgtcatcgctgcgctctgcgcccgctccgcccccacccccacacgcgcacacacacctcaccccgcgtcgtcatccacagcccctgcatcgccaccatggactcggggttgaactggtagcccgagggcgcgggaggtgccgccggcggcggaggatgaggcaggcagggcgagggcggcgacgccggaagctcctggaaatggctgcgcgcgcggtggtggtgagaccgctggtccgtgccgggaagcgagaggctgagcaaggtgagcgggtcctcctcctgcggacggctcatggcagtctgccggctcgaacccgccggagcgcgccacggggcggtaaatctggccggacccggagccggcgccgtggctgctgaggtcgctacggtgtatggttggaccccgaccacgaccccgataggctgtcgggcgagaggctcatcatcagcttgcccgggcgcgcctcggtctcggtggcgtcagtgggaaccggcgaaccggacacgacggcccaccgcctccctctgcttcctcccgtcgaagccctccacctctgacacggcgaccgaccactcctccgactccgactttgccaccacgaacagcaacgaggacactgccatcctcggcatgacgggcgacggggcattcgcaatctccttcgccgatcgcttcaccgccagcgccagcgcagcattgttcgtagagaagaggatggttcatggtagcaaaagtatggcggtaccagaacaagggattccccctaatgttgttgaggatggggaacccttcaggcacaccagtgtgggcacttacagaggagcagatgttctttagaggcatgttgtgttgtactcttccacccactctctgccagtctctacacaggttgtggtggaaaacactcgtgtgggatctagctggctcttgtgcaattggtatgccacagctgctcttctcaccgtgtgaggacgagcacagtaaaagctaagcatttcttgattcatcctcccagcttcgttaattactatcaatgatgttgctgcatatttctttggcatcttctttgggaaaacaccgctgatcaagctctctccaaagaaaacgtgggaaggctttatagttaactatcttctgaagcatttccctatgtttagctactcctgctgaaaatgtactaaccacaccttccatggtggagtgcagggcctccctgttggggcacgagatcgcccacccgtcgtctacaccagattatttctatcataccatcagatagtggatggacaaccaagcgtgcaccgtttcatcatttctgattctttcttagatgactaagataagtgtgaggtctgtactcatattctttccttttcttttcaatgcaggtatgatcttatacgagtggagattggcaacaaagatataaagcttgaatacttagtggaggcatttacaacttcaaatgagtaacattccttgatctgaaatgtgtacaataatcctgatgaactactaaaacacttgccttaatctgaaatgagtacaataaaacatatataaggaaactcaaataagtaaagtcttgcttgtccctcacaccataacatgactgatgaactactaaaacacctgcgaggtctgtcagcgtagcctcctcgacaccttctgcttctgctaactccggtgcaaggtagatccttgctatacttgacaaactaaaggaggaaagggagcaacaagaaggaaaatatggggaggaagatgtggatggttcatgtatatcagaagaagaagatggtgactgggatgtagatgagccagatgaggaggacatcatttacgtaaaatagcccattgtcttctaggaacttggtcatcattcatccagaacacagcaggtgtgcttctactgatcgaaaatacatcttccaaataactatgaggacttaaccaagcaccattcaatcttcatttgcttctatagtttgggttgcgttctgcatacataatattgcctatcaaggtagatttgccagagcagacttcgatcttcttaatctacctgacagtttcttaccatcatttgattttattgatggacatgttaagcctgttctagggagaaagattaactggatgaagacagggatcgttgagagtgatctggttctaacagttagtccacattatgttaaggaactcacttatggcccagataaaggtgttgagttggatggtgtccttcgcacaaagcctcttgaaattggaattgtaaatggcatggatgtttatgaatgggatccttcaacagataagtacaccagcgtgaaatatgatgcaacaacgcaaaggctctcaataaagagaggttgcaagctgaagttggattgcctgtggactcgagcatccctgttatagtttttgtcgggcgtcttgaagaacagaaagggtctgacatactcattgcagccattccagagttcgtgggcgagaatgttcagataatcgttcttggcacgggaaagaagaaaatggaggaggaattaatgcagctggaagtgaaatatccaaacattgctagaggcatagcgaaattcaatgttccattggcacatatgatgtttgctgggtctgacttcattattgtcccaagtaggtttgagccatgtggtctcattcagttgcaagggatgagagtttctagctcgctttgttacagttcagatttgagtgcgcattcccatctgttcatcacctggaggacttgttgacacggttgaggaggggtgtcaccggattccacatgggttctttcaatgtcgagtgtgaaactgtagacctagctgacgtgacggcagtagcgtcaaccatcacacgggcctagaacagtacggcaccccggcgttccaagaaatggttcagaactgcatggcgcaaaacctatcctggaaggggcctgcgaagaagtgggaggaggtgcttctgggccttggagtcgaggggagtcaagctggcatcgacgacgcagaggagatcgctccacttgccaaggaaaacgtagctactccatgacgcttggtgcctcggaaacacgcgttggtgataggaagcatcttctaggatcctcctggccttgtggctggagtgagttgttcagtcagacacagtttcgcctctacaacatcttcctcctcctggtggtggtccgaactccgaagcaaattccagtgataaaggatgaactaagaggtccatgtttctattgctagaccttttgcctcctaaatagacgatgtactgcgcttgtaacaagaacctcactttcgtgtcaagtaatatcaacaggtttcataatggtagtgaactgcactggaaaaacctgtaaacaatgcaaacaggattcaaaactaaaacaaatctgctattaaaagctgttattcaaaattgaaaaaaacaaaacctgttaattcagtattataactcagcaaacataaataaaaaaaaca

SEQ ID NO: 6073 - DNA, 3604 bp, Zea Mays
cgcgatgcgctcgcacgtgccaccgccccccggcccgcgataccgtgcctccgctcgacgcctgcccccgatccctgcgattccagcgccgtcgccgcgcgcgatgcccgtgcacgcacccccaccccaatccccgcctcagcgccgctcccccgcccccacccccgtcctcgccgccccgctccacgctcgcgtggcgtcgtcatcgctgcgctctgcgcccgctccgcccccacccccacacgcgcacacacacctcaccccgcgtcgtcatccacagcccctgcatcgccaccatggactcggggttgaactggtagcccgagggcgcgggaggtgccgccggcggcggaggatgaggcaggcagggcgagggcggcgacgccggaagctcctggaaatggctgcgcgcgcggtggtggtgagaccgctggtccgtgccgggaagcgagaggctgagcaaggtgagcgggtcctcctcctgcggacggctcatggcagtctgccggctcgaacccgccggagcgcgccacggggcggtaaatctggccggacccggagccggcgccgtggctgctgaggtcgctacggtgtatggttggaccccgaccacgaccccgataggctgtcgggcgagaggctcatcatcagcttgcccgggcgcgcctcggtctcggtggcgtcagtgggaaccggcgaaccggacacgacggcccaccgcctccctctgcttcctcccgtcgaagccctccacctctgacacggcgaccgaccactcctccgactccgactttgccaccacgaacagcaacgaggacactgccatcctcggcatgacgggcgacggggcattcgcaatctccttcgccgatcgcttcaccgccagcgccagcgcagcattgttcgtagagaagaggatggttcatggtagcaaaagtatggcggtaccagaacaagggattccccctaatgttgttgaggatggggaacccttcaggcacaccagtgtgggcacttacagaggagcagatgttctttagaggcatgttgtgttgtactcttccacccactctctgccagtctctacacaggttgtggtggaaaacactcgtgtgggatctagctggctcttgtgcaattggtatgccacagctgctcttctcaccgtgtgaggacgagcacagtaaaagctaagcatttcttgattcatcctcccagcttcgttaattactatcaatgatgttgctgcatatttctttggcatcttctttgggaaaacaccgctgatcaagctctctccaaagaaaacgtgggaaggctttatagttaactatcttctgaagcatttccctatgtttagctactcctgctgaaaatgtactaaccacaccttccatggtggagtgcagggcctccctgttggggcacgagatcgcccacccgtcgtctacaccagattatttctatcataccatcagatagtggatggacaaccaagcgtgcaccgtttcatcatttctgattctttcttagatgactaagataagtgtgaggtctgtactcatattctttccttttcttttcaatgcaggtatgatcttatacgagtggagattggcaacaaagatataaagcttgaatacttagtggaggcatttacaacttcaaatgacgtagcctcctcgacaccttctgcttctgctaactccggtgcaagatccttgctatacttgacaaactaaaggaggaaagggagcaacaagaaggaaaatatggggaggaagatgtggatggttcatgtatatcagaagaagaagatggtgactgggatgtagatgagccagatgaggaggacatcatttacgtaaaatagcccattgtcttctaggaacttggtcatcattcatccagaacacagcaggtgtgcttctactgatcgaaaatacatcttccaaataactatgaggacttaaccaagcaccattcaatcttcatttgcttctatagtttgggttgcgttctgcatacataatattgcctatcaaggtagatttgccagagcagacttcgatcttcttaatctacctgacagtttcttaccatcatttgattttattgatggacatgttaagcctgttctagggagaaagattaactggatgaagacagggatcgttgagagtgatctggttctaacagttagtccacattatgttaaggaactcacttatggcccagataaaggtgttgagttggatggtgtccttcgcacaaagcctcttgaaattggaattgtaaatggcatggatgtttatgaatgggatccttcaacagataagtacaccagcgtgaaatatgatgcaacaacggtaactgaagcaaaggctctcaataaagagaggttgcaagctgaagttggattgcctgtggactcgagcatccctgttatagtttttgtcgggcgtcttgaagaacagaaagggtctgacatactcattgcagccattccagagttcgtgggcgagaatgttcagataatcgttcttggcacgggaaagaagaaaatggaggaggaattaatgcagctggaagtgaaatatccaaacattgctagaggcatagcgaaattcaatgttccattggcacatatgatgtttgctgggtctgacttcattattgtcccaagtaggtttgagccatgtggtctcattcagttgcaagggatgagagtttctagctcgctttgttacagttcagatttgagtgcgcgtaagataaacattagcagccatcttttcttatcatgttacatcttgattcctgtaaaacaaaagattcccatctgttcatcacctggaggacttgttgacacggttgaggaggggtgtcaccggattccacatgggttctttcaatgtcgagtgtgaaactgtagacctagctgacgtgacggcagtagcgtcaaccatcacacgggcctagaacagtacggcaccccggcgttccaagaaatggttcagaactgcatggcgcaaaacctatcctggaaggggcctgcgaagaagtgggaggaggtgcttctgggccttggagtcgaggggagtcaagctggcatcgacgacgcagaggagatcgctccacttgccaaggaaaacgtagctactccatgacgcttggtgcctcggaaacacgcgttggtgataggaagcatcttctaggatcctcctggccttgtggctggagtgagttgttcagtcagacacagtttcgcctctacaacatcttcctcctcctggtggtggtccgaactccgaagcaaattccagtgataaaggatgaactaagaggtccatgtttctattgctagaccttttgcctcctaaatagacgatgtactgcgcttgtaacaagaacctcactttcgtgtcaagtaatatcaacaggtttcataatggtagtgaactgcactggaaaaacctgtaaacaatgcaaacaggattcaaaactaaaacaaatctgctattaaaagctgttattcaaaattgaaaaaaacaaaacctgttaattcagtattataactcagcaaacataaataaaaaaaaca

SEQ ID NO: 6074 - DNA, 3723 bp, Zea Mays
cgcgatgcgctcgcacgtgccaccgccccccggcccgcgataccgtgcctccgctcgacgcctgcccccgatccctgcgattccagcgccgtcgccgcgcgcgatgcccgtgcacgcacccccaccccaatccccgcctcagcgccgctcccccgcccccacccccgtcctcgccgccccgctccacgctcgcgtggcgtcgtcatcgctgcgctctgcgcccgctccgcccccacccccacacgcgcacacacacctcaccccgcgtcgtcatccacagcccctgcatcgccaccatggactcggggttgaactggtagcccgagggcgcgggaggtgccgccggcggcggaggatgaggcaggcagggcgagggcggcgacgccggaagctcctggaaatggctgcgcgcgcggtggtggtgagaccgctggtccgtgccgggaagcgagaggctgagcaaggtgagcgggtcctcctcctgcggacggctcatggcagtctgccggctcgaacccgccggagcgcgccacggggcggtaaatctggccggacccggagccggcgccgtggctgctgaggtcgctacggtgtatggttggaccccgaccacgaccccgataggctgtcgggcgagaggctcatcatcagcttgcccgggcgcgcctcggtctcggtggcgtcagtgggaaccggcgaaccggacacgacggcccaccgcctccctctgcttcctcccgtcgaagccctccacctctgacacggcgaccgaccactcctccgactccgactttgccaccacgaacagcaacgaggacactgccatcctcggcatgacgggcgacggggcattcgcaatctccttcgccgatcgcttcaccgccagcgccagcgcagcattgttcgtagagaagaggatggttcatggtagcaaaagtatggcggtaccagaacaagggattccccctaatgttgttgaggatggggaacccttcaggcacaccagtgtgggcacttacagaggagcagatgttctttagaggcatgttgtgttgtactcttccacccactctctgccagtctctacacaggttgtggtggaaaacactcgtgtgggatctagctggctcttgtgcaattggtatgccacagctgctcttctcaccgtgtgaggacgagcacagtaaaagctaagcatttcttgattcatcctcccagcttcgttaattactatcaatgatgttgctgcatatttctttggcatcttctttgggaaaacaccgctgatcaagctctctccaaagaaaacgtgggaaggctttataggtgcatcaatgacaacattgctttctgcatttgtgctactcctgctgaaaatgtactaaccacaccttccatggtggagtgcagggcctccctgttggggcacgagatcgcccacccgtcgtctacaccagattatttctatcataccatcagatagtggatggacaaccaagcgtgcaccgtttcatcatttctgattctttcttagatgactaagataagtgtgaggtctgtactcatattctttccttttcttttcaatgcaggtatgatcttatacgagtggagattggcaacaaagatataaagcttgaatacttagtggaggcatttacaacttcaaatgagtaacattccttgatctgaaatgtgtacaataatcctgatgaactactaaaacacttgccttaatctgaaatgagtacaataaaacatatataaggaaactcaaataagtaaagtcttgcttgtccctcacaccataacatgactgatgaactactaaaacacctgcgaggtctgtcagcgtagcctcctcgacaccttctgcttctgctaactccggtgcaaggtagatccttgctatacttgacaaactaaaggaggaaagggagcaacaagaaggaaaatatggggaggaagatgtggatggttcatgtatatcagaagaagaagatggtgactgggatgtagatgagccagatgaggaggacatcatttacgtaaaatagcccattgtcttctaggaacttggtcatcattcatccagaacacagcaggtgtgcttctactgatcgaaaatacatcttccaaataactatgaggacttaaccaagcaccattcaatcttcatttgcttctatagtttgggttgcgttctgcatacataatattgcctatcaaggtagatttgccagagcagacttcgatcttcttaatctacctgacagtttcttaccatcatttgattttattgatggacatgttaagcctgttctagggagaaagattaactggatgaagacagggatcgttgagagtgatctggttctaacagttagtccacattatgttaaggaactcacttatggcccagataaaggtgttgagttggatggtgtccttcgcacaaagcctcttgaaattggaattgtaaatggcatggatgtttatgaatgggatccttcaacagataagtacaccagcgtgaaatatgatgcaacaacggtaactgaagcaaaggctctcaataaagagaggttgcaagctgaagttggattgcctgtggactcgagcatccctgttatagtttttgtcgggcgtcttgaagaacagaaagggtctgacatactcattgcagccattccagagttcgtgggcgagaatgttcagataatcgttcttggcacgggaaagaagaaaatggaggaggaattaatgcagctggaagtgaaatatccaaacattgctagaggcatagcgaaattcaatgttccattggcacatatgatgtttgctgggtctgacttcattattgtcccaagtaggtttgagccatgtggtctcattcagttgcaagggatgagagtttctagctcgctttgttacagttcagatttgagtgcgcattcccatctgttcatcacctggaggacttgttgacacggttgaggaggggtgtcaccggattccacatgggttctttcaatgtcgagtgtgaaactgtagacctagctgacgtgacggcagtagcgtcaaccatcacacgggcctagaacagtacggcaccccggcgttccaagaaatggttcagaactgcatggcgcaaaacctatcctggaaggggcctgcgaagaagtgggaggaggtgcttctgggccttggagtcgaggggagtcaagctggcatcgacgacgcagaggagatcgctccacttgccaaggaaaacgtagctactccatgacgcttggtgcctcggaaacacgcgttggtgataggaagcatcttctaggatcctcctggccttgtggctggagtgagttgttcagtcagacacagtttcgcctctacaacatcttcctcctcctggtggtggtccgaactccgaagcaaattccagtgataaaggatgaactaagaggtccatgtttctattgctagaccttttgcctcctaaatagacgatgtactgcgcttgtaacaagaacctcactttcgtgtcaagtaatatcaacaggtttcataatggtagtgaactgcactggaaaaacctgtaaacaatgcaaacaggattcaaaactaaaacaaatctgctattaaaagctgttattcaaaattgaaaaaaacaaaacctgttaattcagtattataactcagcaaacataaataaaaaaaaca

SEQ ID NO: 6075 - DNA, 3432 bp, Zea Mays
cgcgatgcgctcgcacgtgccaccgccccccggcccgcgataccgtgcctccgctcgacgcctgcccccgatccctgcgattccagcgccgtcgccgcgcgcgatgcccgtgcacgcacccccaccccaatccccgcctcagcgccgctcccccgcccccacccccgtcctcgccgccccgctccacgctcgcgtggcgtcgtcatcgctgcgctctgcgcccgctccgcccccacccccacacgcgcacacacacctcaccccgcgtcgtcatccacagcccctgcatcgccaccatggactcggggttgaactggtagcccgagggcgcgggaggtgccgccggcggcggaggatgaggcaggcagggcgagggcggcgacgccggaagctcctggaaatggctgcgcgcgcggtggtggtgagaccgctggtccgtgccgggaagcgagaggctgagcaaggtgagcgggtcctcctcctgcggacggctcatggcagtctgccggctcgaacccgccggagcgcgccacggggcggtaaatctggccggacccggagccggcgccgtggctgctgaggtcgctacggtgtatggttggaccccgaccacgaccccgataggctgtcgggcgagaggctcatcatcagcttgcccgggcgcgcctcggtctcggtggcgtcagtgggaaccggcgaaccggacacgacggcccaccgcctccctctgcttcctcccgtcgaagccctccacctctgacacggcgaccgaccactcctccgactccgactttgccaccacgaacagcaacgaggacactgccatcctcggcatgacgggcgacggggcattcgcaatctccttcgccgatcgcttcaccgccagcgccagcgcagcattgttcgtagagaagaggatggttcatggtagcaaaagtatggcggtaccagaacaagggattccccctaatgttgttgaggatggggaacccttcaggcacaccagtgtgggcacttacagaggagcagatgttctttagaggcatgttgtgttgtactcttccacccactctctgccagtctctacacaggttgtggtggaaaacactcgtgtgggatctagctggctcttgtgcaattggtatgccacagctgctcttctcaccgtgtgaggacgagcacagtaaaagctaagcatttcttgattcatcctcccagcttcgttaattactatcaatgatgttgctgcatatttctttggcatcttctttgggaaaacaccgctgatcaagctctctccaaagaaaacgtgggaaggctttatagttaactatcttctgaagcatttccctatgtttagctactcctgctgaaaatgtactaaccacaccttccatggtggagtgcagggcctccctgttggggcacgagatcgcccacccgtcgtctacaccagattatttctatcataccatcagatagtggatggacaaccaagtatgatcttatacgagtggagattggcaacaaagatataaagcttgaatacttagtggaggcatttacaacttcaaatgagtaacattccttgatctgaaatgtgtacaataatcctgatgaactactaaaacacttgccttaatctgaaatgagtacaataaaacatatataaggaaactcaaataagtaaagtcttgcttgtccctcacaccataacatgactgatgaactactaaaacacctgcgaggtctgtcagcgtagcctcctcgacaccttctgcttctgctaactccggtgcaagatccttgctatacttgacaaactaaaggaggaaagggagcaacaagaaggaaaatatggggaggaagatgtggatggttcatgtatatcagaagaagaagatggtgactgggatgtagatgagccagatgaggaggacatcatttacgtaaaatagcccattgtcttctaggaacttggtcatcattcatccagaacacagcaggttgcgttctgcatacataatattgcctatcaagcctgttctagggagaaagattaactggatgaagacagggatcgttgagagtgatctggttctaacagttagtccacattatgttaaggaactcacttatggcccagataaaggtgttgagttggatggtgtccttcgcacaaagcctcttgaaattggaattgtaaatggcatggatgtttatgaatgggatccttcaacagataagtacaccagcgtgaaatatgatgcaacaacggctctcaataaagagaggttgcaagctgaagttggattgcctgtggactcgagcatccctgttatagtttttgtcgggcgtcttgaagaacagaaagggtctgacatactcattgcagccattccagagttcgtgggcgagaatgttcagataatcgttcttggcacgggaaagaagaaaatggaggaggaattaatgcagctggaagtgaaatatccaaacattgctagaggcatagcgaaattcaatgttccattggcacatatgatgtttgctgggtctgacttcattattgtcccaagtaggtttgagccatgtggtctcattcagttgcaagggatgagagtttctagctcgctttgttacagttcagatttgagtgcgcattcccatctgttcatcacctggaggacttgttgacacggttgaggaggggtgtcaccggattccacatgggttctttcaatgtcgagtgtgaaactgtagacctagctgacgtgacggcagtagcgtcaaccatcacacgggcctagaacagtacggcaccccggcgttccaagaaatggttcagaactgcatggcgcaaaacctatcctggaaggggcctgcgaagaagtgggaggaggtgcttctgggccttggagtcgaggggagtcaagctggcatcgacgacgcagaggagatcgctccacttgccaaggaaaacgtagctactccatgacgcttggtgcctcggaaacacgcgttggtgataggaagcatcttctaggatcctcctggccttgtggctggagtgagttgttcagtcagacacagtttcgcctctacaacatcttcctcctcctggtggtggtccgaactccgaagcaaattccagtgataaaggatgaactaagaggtccatgtttctattgctagaccttttgcctcctaaatagacgatgtactgcgcttgtaacaagaacctcactttcgtgtcaagtaatatcaacaggtttcataatggtagtgaactgcactggaaaaacctgtaaacaatgcaaacaggattcaaaactaaaacaaatctgctattaaaagctgttattcaaaattgaaaaaaacaaaacctgttaattcagtattataactcagcaaacataaataaaaaaaaca

SEQ ID NO: 6076 - DNA, 3524 bp, Zea Mays
cgcgatgcgctcgcacgtgccaccgccccccggcccgcgataccgtgcctccgctcgacgcctgcccccgatccctgcgattccagcgccgtcgccgcgcgcgatgcccgtgcacgcacccccaccccaatccccgcctcagcgccgctcccccgcccccacccccgtcctcgccgccccgctccacgctcgcgtggcgtcgtcatcgctgcgctctgcgcccgctccgcccccacccccacacgcgcacacacacctcaccccgcgtcgtcatccacagcccctgcatcgccaccatggactcggggttgaactggtagcccgagggcgcgggaggtgccgccggcggcggaggatgaggcaggcagggcgagggcggcgacgccggaagctcctggaaatggctgcgcgcgcggtggtggtgagaccgctggtccgtgccgggaagcgagaggctgagcaaggtgagcgggtcctcctcctgcggacggctcatggcagtctgccggctcgaacccgccggagcgcgccacggggcggtaaatctggccggacccggagccggcgccgtggctgctgaggtcgctacggtgtatggttggaccccgaccacgaccccgataggctgtcgggcgagaggctcatcatcagcttgcccgggcgcgcctcggtctcggtggcgtcagtgggaaccggcgaaccggacacgacggcccaccgcctccctctgcttcctcccgtcgaagccctccacctctgacacggcgaccgaccactcctccgactccgactttgccaccacgaacagcaacgaggacactgccatcctcggcatgacgggcgacggggcattcgcaatctccttcgccgatcgcttcaccgccagcgccagcgcagcattgttcgtagagaagaggatggttcatggtagcaaaagtatggcggtaccagaacaagggattccccctaatgttgttgaggatggggaacccttcaggcacaccagtgtgggcacttacagaggagcagatgttctttagaggcatgttgtgttgtactcttccacccactctctgccaggttgtggtggaaaacactcgtgtgggatctagctggctcttgtgcaattggtatgccacagctgctcttctcaccgtgtgaggacgagcacagtaaaagctaagcatttcttgattcatcctcccagcttcgttaattactatcaatgatgttgctgcatatttctttggcatcttctttgggaaaacaccgctgatcaagctctctccaaagaaaacgtgggaaggctttatagttaactatcttctgaagcatttccctatgtttagctactcctgctgaaaatgtactaaccacaccttccatggtggagtgcagggcctccctgttggggcacgagatcgcccacccgtcgtctacaccagattatttctatcataccatcagatagtggatggacaaccaagcgtgcaccgtttcatcatttctgattctttcttagatgactaagataagtgtgaggtctgtactcatattctttccttttcttttcaatgcaggtatgatcttatacgagtggagattggcaacaaagatataaagcttgaatacttagtggaggcatttacaacttcaaatgagtaacattccttgatctgaaatgtgtacaataatcctgatgaactactaaaacacttgccttaatctgaaatgagtacaataaaacatatataaggaaactcaaataagtaaagtcttgcttgtccctcacaccataacatgactgatgaactactaaaacacctgcgaggtctgtcagcgtagcctcctcgacaccttctgcttctgctaactccggtgcaaggtagatccttgctatacttgacaaactaaaggaggaaagggagcaacaagaaggaaaatatggggaggaagatgtggatggttcatgtatatcagaagaagaagatggtgactgggatgtagatgagccagatgaggaggacatcatttacgtaaaatagcccattgtcttctaggaacttggtcatcattcatccagaacacagcaggttgcgttctgcatacataatattgcctatcaagggagaaagattaactggatgaagacagggatcgttgagagtgatctggttctaacagttagtccacattatgttaaggaactcacttatggcccagataaaggtgttgagttggatggtgtccttcgcacaaagcctcttgaaattggaattgtaaatggcatggatgtttatgaatgggatccttcaacagataagtacaccagcgtgaaatatgatgcaacaacggtaactgaagcaaaggctctcaataaagagaggttgcaagctgaagttggattgcctgtggactcgagcatccctgttatagtttttgtcgggcgtcttgaagaacagaaagggtctgacatactcattgcagccattccagagttcgtgggcgagaatgttcagataatcgttcttggcacgggaaagaagaaaatggaggaggaattaatgcagctggaagtgaaatatccaaacattgctagaggcatagcgaaattcaatgttccattggcacatatgatgtttgctgggtctgacttcattattgtcccaagtaggtttgagccatgtggtctcattcagttgcaagggatgagagtttctagctcgctttgttacagttcagatttgagtgcgcattcccatctgttcatcacctggaggacttgttgacacggttgaggaggggtgtcaccggattccacatgggttctttcaatgtcgagtgtgaaactgtagacctagctgacgtgacggcagtagcgtcaaccatcacacgggcctagaacagtacggcaccccggcgttccaagaaatggttcagaactgcatggcgcaaaacctatcctggaaggggcctgcgaagaagtgggaggaggtgcttctgggccttggagtcgaggggagtcaagctggcatcgacgacgcagaggagatcgctccacttgccaaggaaaacgtagctactccatgacgcttggtgcctcggaaacacgcgttggtgataggaagcatcttctaggatcctcctggccttgtggctggagtgagttgttcagtcagacacagtttcgcctctacaacatcttcctcctcctggtggtggtccgaactccgaagcaaattccagtgataaaggatgaactaagaggtccatgtttctattgctagaccttttgcctcctaaatagacgatgtactgcgcttgtaacaagaacctcactttcgtgtcaagtaatatcaacaggtttcataatggtagtgaactgcactggaaaaacctgtaaacaatgcaaacaggattcaaaactaaaacaaatctgctattaaaagctgttattcaaaattgaaaaaaacaaaacctgttaattcagtattataactcagcaaacataaataaaaaaaaca

SEQ ID NO: 6077 - DNA, 3624 bp, Zea Mays
cgcgatgcgctcgcacgtgccaccgccccccggcccgcgataccgtgcctccgctcgacgcctgcccccgatccctgcgattccagcgccgtcgccgcgcgcgatgcccgtgcacgcacccccaccccaatccccgcctcagcgccgctcccccgcccccacccccgtcctcgccgccccgctccacgctcgcgtggcgtcgtcatcgctgcgctctgcgcccgctccgcccccacccccacacgcgcacacacacctcaccccgcgtcgtcatccacagcccctgcatcgccaccatggactcggggttgaactggtagcccgagggcgcgggaggtgccgccggcggcggaggatgaggcaggcagggcgagggcggcgacgccggaagctcctggaaatggctgcgcgcgcggtggtggtgagaccgctggtccgtgccgggaagcgagaggctgagcaaggtgagcgggtcctcctcctgcggacggctcatggcagtctgccggctcgaacccgccggagcgcgccacggggcggtaaatctggccggacccggagccggcgccgtggctgctgaggtcgctacggtgtatggttggaccccgaccacgaccccgataggctgtcgggcgagaggctcatcatcagcttgcccgggcgcgcctcggtctcggtggcgtcagtgggaaccggcgaaccggacacgacggcccaccgcctccctctgcttcctcccgtcgaagccctccacctctgacacggcgaccgaccactcctccgactccgactttgccaccacgaacagcaacgaggacactgccatcctcggcatgacgggcgacggggcattcgcaatctccttcgccgatcgcttcaccgccagcgccagcgcagcattgttcgtagagaagaggatggttcatggtagcaaaagtatggcggtaccagaacaagggattccccctaatgttgttgaggatggggaacccttcaggcacaccagtgtgggcacttacagaggagcagatgttctttagaggcatgttgtgttgtactcttccacccactctctgccagtctctacacaggttgtggtggaaaacactcgtgtgggatctagctggctcttgtgcaattggtatgccacagctgctcttctcaccgtgtgaggacgagcacagtaaaagctaagcatttcttgattcatcctcccagcttcgttaattactatcaatgatgttgctgcatatttctttggcatcttctttgggaaaacaccgctgatcaagctctctccaaagaaaacgtgggaaggctttatagttaactatcttctgaagcatttccctatgtttagctactcctgctgaaaatgtactaaccacaccttccatggtggagtgcagggcctccctgttggggcacgagatcgcccacccgtcgtctacaccagattatttctatcataccatcagatagtggatggacaaccaagtatgatcttatacgagtggagattggcaacaaagatataaagcttgaatacttagtggaggcatttacaacttcaaatgagtaacattccttgatctgaaatgtgtacaataatcctgatgaactactaaaacacttgccttaatctgaaatgagtacaataaaacatatataaggaaactcaaataagtaaagtcttgcttgtccctcacaccataacatgactgatgaactactaaaacacctgcgaggtctgtcagcgtagcctcctcgacaccttctgcttctgctaactccggtgcaagatccttgctatacttgacaaactaaaggaggaaagggagcaacaagaaggaaaatatggggaggaagatgtggatggttcatgtatatcagaagaagaagatggtgactgggatgtagatgagccagatgaggaggacatcatttacgtaaaatagcccattgtcttctaggaacttggtcatcattcatccagaacacagcaggtgtgcttctactgatcgaaaatacatcttccaaataactatgaggacttaaccaagcaccattcaatcttcatttgcttctatagtttgggttgcgttctgcatacataatattgcctatcaaggtagatttgccagagcagacttcgatcttcttaatctacctgacagtttcttaccatcatttgattttattgatggacatgttaagcctgttctagggagaaagattaactggatgaagacagggatcgttgagagtgatctggttctaacagttagtccacattatgttaaggaactcacttatggcccagataaaggtgttgagttggatggtgtccttcgcacaaagcctcttgaaattggaattgtaaatggcatggatgtttatgaatgggatccttcaacagataagtacaccagcgtgaaatatgatgcaacaacggtaactgaagcaaaggctctcaataaagagaggttgcaagctgaagttggattgcctgtggactcgagcatccctgttatagtttttgtcgggcgtcttgaagaacagaaagggtctgacatactcattgcagccattccagagttcgtgggcgagaatgttcagataatcgttcttggcacgggaaagaagaaaatggaggaggaattaatgcagctggaagtgaaatatccaaacattgctagaggcatagcgaaattcaatgttccattggcacatatgatgtttgctgggtctgacttcattattgtcccaagtaggtttgagccatgtggtctcattcagttgcaagggatgagagtttctagctcgctttgttacagttcagatttgagtgcgcattcccatctgttcatcacctggaggacttgttgacacggttgaggaggggtgtcaccggattccacatgggttctttcaatgtcgagtgtgaaactgtagacctagctgacgtgacggcagtagcgtcaaccatcacacgggcctagaacagtacggcaccccggcgttccaagaaatggttcagaactgcatggcgcaaaacctatcctggaaggggcctgcgaagaagtgggaggaggtgcttctgggccttggagtcgaggggagtcaagctggcatcgacgacgcagaggagatcgctccacttgccaaggaaaacgtagctactccatgacgcttggtgcctcggaaacacgcgttggtgataggaagcatcttctaggatcctcctggccttgtggctggagtgagttgttcagtcagacacagtttcgcctctacaacatcttcctcctcctggtggtggtccgaactccgaagcaaattccagtgataaaggatgaactaagaggtccatgtttctattgctagaccttttgcctcctaaatagacgatgtactgcgcttgtaacaagaacctcactttcgtgtcaagtaatatcaacaggtttcataatggtagtgaactgcactggaaaaacctgtaaacaatgcaaacaggattcaaaactaaaacaaatctgctattaaaagctgttattcaaaattgaaaaaaacaaaacctgttaattcagtattataactcagcaaacataaataaaaaaaaca

SEQ ID NO: 6078 - DNA, 4182 bp, Zea Mays
cgcgatgcgctcgcacgtgccaccgccccccggcccgcgataccgtgcctccgctcgacgcctgcccccgatccctgcgattccagcgccgtcgccgcgcgcgatgcccgtgcacgcacccccaccccaatccccgcctcagcgccgctcccccgcccccacccccgtcctcgccgccccgctccacgctcgcgtggcgtcgtcatcgctgcgctctgcgcccgctccgcccccacccccacacgcgcacacacacctcaccccgcgtcgtcatccacagcccctgcatcgccaccatggactcggggttgaactggtagcccgagggcgcgggaggtgccgccggcggcggaggatgaggcaggcagggcgagggcggcgacgccggaagctcctggaaatggctgcgcgcgcggtggtggtgagaccgctggtccgtgccgggaagcgagaggctgagcaaggtgagcgggtcctcctcctgcggacggctcatggcagtctgccggctcgaacccgccggagcgcgccacggggcggtaaatctggccggacccggagccggcgccgtggctgctgaggtcgctacggtgtatggttggaccccgaccacgaccccgataggctgtcgggcgagaggctcatcatcagcttgcccgggcgcgcctcggtctcggtggcgtcagtgggaaccggcgaaccggacacgacggcccaccgcctccctctgcttcctcccgtcgaagccctccacctctgacacggcgaccgaccactcctccgactccgactttgccaccacgaacagcaacgaggacactgccatcctcggcatgacgggcgacggggcattcgcaatctccttcgccgatcgcttcaccgccagcgccagcgcagcattgttcgtagagaagaggatggttcatggtagcaaaagtatggcggtaccagaacaagggattccccctaatgttgttgaggatggggaacccttcaggcacaccagtgtgggcacttacagaggagcagatgttctttagaggcatgttgtgttgtactcttccacccactctctgccagtctctacacaggttgtggtggaaaacactcgtgtgggatctagctggctcttgtgcaattggtatgccacagctgctcttctcaccgtgtgaggacgagcacagtaaaagctaagcatttcttgattcatcctcccagcttcgttaattactatcaatgatgttgctgcatatttctttggcatcttctttgggaaaacaccgctgatcaagctctctccaaagaaaacgtgggaaggctttataggtgcatcaatgacaacattgctttctgcatttgtgctactcctgctgaaaatgtactaaccacaccttccatggtggagtgcagggcctccctgttggggcacgagatcgcccacccgtcgtctacaccagattatttctatcataccatcagatagtggatggacaaccaagcgtgcaccgtttcatcatttctgattctttcttagatgactaagataagtgtgaggtctgtactcatattctttccttttcttttcaatgcaggtatgatcttatacgagtggagattggcaacaaagatataaagcttgaatacttagtggaggcatttacaacttcaaatgagtaacattccttgatctgaaatgtgtacaataatcctgatgaactactaaaacacttgccttaatctgaaatgagtacaataaaacatatataaggaaactcaaataagtaaagtcttgcttgtccctcacaccataacatgactgatgaactactaaaacacctgcgaggtctgtcagcgtagcctcctcgacaccttctgcttctgctaactccggtgcaaggtacgccgctgccatcccaatccctacccccaggcaagctttgttgattgctttctggttgttgatttctgagctagctatttagaagtcaaaaattgggtgaaatctgattaaccaaactacctggttagaaatcaaattggatgaaatctaattaattttgatatgtgtctcctgagttcaaggatgtcttctacaataattcagccaagaacaagaagcgctaattggaatccaaattgtttgatgtggtgatatgatctggaacttggaccatctttatgctttatggggctaagaagcataagacctgtccgaggcaattgtatctcaacataatcagtttgatgggctccaggagttatatcatcagaaatgtttttttagtatttctatgtaccagcaaaatattgactgaatatttctaaccaggtagatccttgctatacttgacaaactaaaggaggaaagggagcaacaagaaggaaaatatggggaggaagatgtggatggttcatgtatatcagaagaagaagatggtgactgggatgtagatgagccagatgaggaggacatcatttacgtaaaatagcccattgtcttctaggaacttggtcatcattcatccagaacacagcaggtgtgcttctactgatcgaaaatacatcttccaaataactatgaggacttaaccaagcaccattcaatcttcatttgcttctatagtttggaaatgatcagtggaagatgttgtcttcgtagccaatgattggcacactgctattttgccatgttatctaaagagcatgtataagtcaaatggaatttataaaaatgctaaggttgcgttctgcatacataatattgcctatcaaggtagatttgccagagcagacttcgatcttcttaatctacctgacagtttcttaccatcatttgattttattgatggacatgttaagcctgttctagggagaaagattaactggatgaagacagggatcgttgagagtgatctggttctaacagttagtccacattatgttaaggaactcacttatggcccagataaaggtgttgagttggatggtgtccttcgcacaaagcctcttgaaattggaattgtaaatggcatggatgtttatgaatgggatccttcaacagataagtacaccagcgtgaaatatgatgcaacaacggtaactgaagcaaaggctctcaataaagagaggttgcaagctgaagttggattgcctgtggactcgagcatccctgttatagtttttgtcgggcgtcttgaagaacagaaagggtctgacatactcattgcagccattccagagttcgtgggcgagaatgttcagataatcgttcttggcacgggaaagaagaaaatggaggaggaattaatgcagctggaagtgaaatatccaaacattgctagaggcatagcgaaattcaatgttccattggcacatatgatgtttgctgggtctgacttcattattgtcccaaattcccatctgttcatcacctggaggacttgttgacacggttgaggaggggtgtcaccggattccacatgggttctttcaatgtcgagtgtgaaactgtagacctagctgacgtgacggcagtagcgtcaaccatcacacgggcctagaacagtacggcaccccggcgttccaagaaatggttcagaactgcatggcgcaaaacctatcctggaaggggcctgcgaagaagtgggaggaggtgcttctgggccttggagtcgaggggagtcaagctggcatcgacgacgcagaggagatcgctccacttgccaaggaaaacgtagctactccatgacgcttggtgcctcggaaacacgcgttggtgataggaagcatcttctaggatcctcctggccttgtggctggagtgagttgttcagtcagacacagtttcgcctctacaacatcttcctcctcctggtggtggtccgaactccgaagcaaattccagtgataaaggatgaactaagaggtccatgtttctattgctagaccttttgcctcctaaatagacgatgtactgcgcttgtaacaagaacctcactttcgtgtcaagtaatatcaacaggtttcataatggtagtgaactgcactggaaaaacctgtaaacaatgcaaacaggattcaaaactaaaacaaatctgctattaaaagctgttattcaaaattgaaaaaaacaaaacctgttaattcagtattataactcagcaaacataaataaaaaaaaca

SEQ ID NO: 6079 - DNA, 3822 bp, Zea Mays
cgcgatgcgctcgcacgtgccaccgccccccggcccgcgataccgtgcctccgctcgacgcctgcccccgatccctgcgattccagcgccgtcgccgcgcgcgatgcccgtgcacgcacccccaccccaatccccgcctcagcgccgctcccccgcccccacccccgtcctcgccgccccgctccacgctcgcgtggcgtcgtcatcgctgcgctctgcgcccgctccgcccccacccccacacgcgcacacacacctcaccccgcgtcgtcatccacagcccctgcatcgccaccatggactcggggttgaactggtagcccgagggcgcgggaggtgccgccggcggcggaggatgaggcaggcagggcgagggcggcgacgccggaagctcctggaaatggctgcgcgcgcggtggtggtgagaccgctggtccgtgccgggaagcgagaggctgagcaaggtgagcgggtcctcctcctgcggacggctcatggcagtctgccggctcgaacccgccggagcgcgccacggggcggtaaatctggccggacccggagccggcgccgtggctgctgaggtcgctacggtgtatggttggaccccgaccacgaccccgataggctgtcgggcgagaggctcatcatcagcttgcccgggcgcgcctcggtctcggtggcgtcagtgggaaccggcgaaccggacacgacggcccaccgcctccctctgcttcctcccgtcgaagccctccacctctgacacggcgaccgaccactcctccgactccgactttgccaccacgaacagcaacgaggacactgccatcctcggcatgacgggcgacggggcattcgcaatctccttcgccgatcgcttcaccgccagcgccagcgcagcattgttcgtagagaagaggatggttcatggtagcaaaagtatggcggtaccagaacaagggattccccctaatgttgttgaggatggggaacccttcaggcacaccagtgtgggcacttacagaggagcagatgttctttagaggcatgttgtgttgtactcttccacccactctctgccaggttgtggtggaaaacactcgtgtgggatctagctggctcttgtgcaattggtatgccacagctgctcttctcaccgtgtgaggacgagcacagtaaaagctaagcatttcttgattcatcctcccagcttcgttaattactatcaatgatgttgctgcatatttctttggcatcttctttgggaaaacaccgctgatcaagctctctccaaagaaaacgtgggaaggctttatagttaactatcttctgaagcatttccctatgtttagctactcctgctgaaaatgtactaaccacaccttccatggtggagtgcagggcctccctgttggggcacgagatcgcccacccgtcgtctacaccagattatttctatcataccatcagatagtggatggacaaccaagcgtgcaccgtttcatcatttctgattctttcttagatgactaagataagtgtgaggtctgtactcatattctttccttttcttttcaatgcaggtatgatcttatacgagtggagattggcaacaaagatataaagcttgaatacttagtggaggcatttacaacttcaaatgagtaacattccttgatctgaaatgtgtacaataatcctgatgaactactaaaacacttgccttaatctgaaatgagtacaataaaacatatataaggaaactcaaataagtaaagtcttgcttgtccctcacaccataacatgactgatgaactactaaaacacctgcgaggtctgtcagcgtagcctcctcgacaccttctgcttctgctaactccggtgcaaggtagatccttgctatacttgacaaactaaaggaggaaagggagcaacaagaaggaaaatatggggaggaagatgtggatggttcatgtatatcagaagaagaagatggtgactgggatgtagatgagccagatgaggaggacatcatttacgtaaaatagcccattgtcttctaggaacttggtcatcattcatccagaacacagcaggtgtgcttctactgatcgaaaatacatcttccaaataactatgaggacttaaccaagcaccattcaatcttcatttgcttctatagtttggaaatgatcagtggaagatgttgtcttcgtagccaatgattggcacactgctattttgccatgttatctaaagagcatgtataagtcaaatggaatttataaaaatgctaaggttgcgttctgcatacataatattgcctatcaaggtagatttgccagagcagacttcgatcttcttaatctacctgacagtttcttaccatcatttgattttattgatggacatgttaagcctgttctagggagaaagattaactggatgaagacagggatcgttgagagtgatctggttctaacagttagtccacattatgttaaggaactcacttatggcccagataaaggtgttgagttggatggtgtccttcgcacaaagcctcttgaaattggaattgtaaatggcatggatgtttatgaatgggatccttcaacagataagtacaccagcgtgaaatatgatgcaacaacggtaactgaagcaaaggctctcaataaagagaggttgcaagctgaagttggattgcctgtggactcgagcatccctgttatagtttttgtcgggcgtcttgaagaacagaaagggtctgacatactcattgcagccattccagagttcgtgggcgagaatgttcagataatcgttcttggcacgggaaagaagaaaatggaggaggaattaatgcagctggaagtgaaatatccaaacattgctagaggcatagcgaaattcaatgttccattggcacatatgatgtttgctgggtctgacttcattattgtcccaagtaggtttgagccatgtggtctcattcagttgcaagggatgagagtttctagctcgctttgttacagttcagatttgagtgcgcattcccatctgttcatcacctggaggacttgttgacacggttgaggaggggtgtcaccggattccacatgggttctttcaatgtcgagtgtgaaactgtagacctagctgacgtgacggcagtagcgtcaaccatcacacgggcctagaacagtacggcaccccggcgttccaagaaatggttcagaactgcatggcgcaaaacctatcctggaaggggcctgcgaagaagtgggaggaggtgcttctgggccttggagtcgaggggagtcaagctggcatcgacgacgcagaggagatcgctccacttgccaaggaaaacgtagctactccatgacgcttggtgcctcggaaacacgcgttggtgataggaagcatcttctaggatcctcctggccttgtggctggagtgagttgttcagtcagacacagtttcgcctctacaacatcttcctcctcctggtggtggtccgaactccgaagcaaattccagtgataaaggatgaactaagaggtccatgtttctattgctagaccttttgcctcctaaatagacgatgtactgcgcttgtaacaagaacctcactttcgtgtcaagtaatatcaacaggtttcataatggtagtgaactgcactggaaaaacctgtaaacaatgcaaacaggattcaaaactaaaacaaatctgctattaaaagctgttattcaaaattgaaaaaaacaaaacctgttaattcagtattataactcagcaaacataaataaaaaaaaca

SEQ ID NO: 6080 - DNA, 3763 bp, Zea Mays
cgcgatgcgctcgcacgtgccaccgccccccggcccgcgataccgtgcctccgctcgacgcctgcccccgatccctgcgattccagcgccgtcgccgcgcgcgatgcccgtgcacgcacccccaccccaatccccgcctcagcgccgctcccccgcccccacccccgtcctcgccgccccgctccacgctcgcgtggcgtcgtcatcgctgcgctctgcgcccgctccgcccccacccccacacgcgcacacacacctcaccccgcgtcgtcatccacagcccctgcatcgccaccatggactcggggttgaactggtagcccgagggcgcgggaggtgccgccggcggcggaggatgaggcaggcagggcgagggcggcgacgccggaagctcctggaaatggctgcgcgcgcggtggtggtgagaccgctggtccgtgccgggaagcgagaggctgagcaaggtgagcgggtcctcctcctgcggacggctcatggcagtctgccggctcgaacccgccggagcgcgccacggggcggtaaatctggccggacccggagccggcgccgtggctgctgaggtcgctacggtgtatggttggaccccgaccacgaccccgataggctgtcgggcgagaggctcatcatcagcttgcccgggcgcgcctcggtctcggtggcgtcagtgggaaccggcgaaccggacacgacggcccaccgcctccctctgcttcctcccgtcgaagccctccacctctgacacggcgaccgaccactcctccgactccgactttgccaccacgaacagcaacgaggacactgccatcctcggcatgacgggcgacggggcattcgcaatctccttcgccgatcgcttcaccgccagcgccagcgcagcattgttcgtagagaagaggatggttcatggtagcaaaagtatggcggtaccagaacaagggattccccctaatgttgttgaggatggggaacccttcaggcacaccagtgtgggcacttacagaggagcagatgttctttagaggcatgttgtgttgtactcttccacccactctctgccaggttgtggtggaaaacactcgtgtgggatctagctggctcttgtgcaattggtatgccacagctgctcttctcaccgtgtgaggacgagcacagtaaaagctaagcatttcttgattcatcctcccagcttcgttaattactatcaatgatgttgctgcatatttctttggcatcttctttgggaaaacaccgctgatcaagctctctccaaagaaaacttaactatcttctgaagcatttccctatgtttagctactcctgctgaaaatgtactaaccacaccttccatggtggagtgcagggcctccctgttggggcacgagatcgcccacccgtcgtctacaccagattatttctatcataccatcagatagtggatggacaaccaagtatgatcttatacgagtggagattggcaacaaagatataaagcttgaatacttagtggaggcatttacaacttcaaatgagtaacattccttgatctgaaatgtgtacaataatcctgatgaactactaaaacacttgccttaatctgaaatgagtacaataaaacatatataaggaaactcaaataagtaaagtcttgcttgtccctcacaccataacatgactgatgaactactaaaacacctgcgaggtctgtcagcgtagcctcctcgacaccttctgcttctgctaactccggtgcaaggatgtcttctacaataattcagccaagaacaagaagcgctaattggaatccaaattgtttgatgtggtgatatgatctggaacttggaccatctttatgctttatggggctaagaagcataagacctgtccgaggcaattgtatctcaacataatcagtttgatgggctccaggagttatatcatcagaaatgtttttttagtatttctatgtaccagcaaaatattgactgaatatttctaaccaggtagatccttgctatacttgacaaactaaaggaggaaagggagcaacaagaaggaaaatatggggaggaagatgtggatggttcatgtatatcagaagaagaagatggtgactgggatgtagatgagccagatgaggaggacatcatttacgtaaaatagcccattgtcttctaggaacttggtcatcattcatccagaacacagcaggtgtgcttctactgatcgaaaatacatcttccaaataactatgaggacttaaccaagcaccattcaatcttcatttgcttctatagtttgggttgcgttctgcatacataatattgcctatcaaggtagatttgccagagcagacttcgatcttcttaatctacctgacagtttcttaccatcatttgattttattgatggacatgttaagcctgttctagggagaaagattaactggatgaagacagggatcgttgagagtgatctggttctaacagttagtccacattatgttaaggaactcacttatggcccagataaaggtgttgagttggatggtgtccttcgcacaaagcctcttgaaattggaattgtaaatggcatggatgtttatgaatgggatccttcaacagataagtacaccagcgtgaaatatgatgcaacaacggtaactgaagcaaaggctctcaataaagagaggttgcaagctgaagttggattgcctgtggactcgagcatccctgttatagtttttgtcgggcgtcttgaagaacagaaagggtctgacatactcattgcagccattccagagttcgtgggcgagaatgttcagataatcgttcttggcacgggaaagaagaaaatggaggaggaattaatgcagctggaagtgaaatatccaaacattgctagaggcatagcgaaattcaatgttccattggcacatatgatgtttgctgggtctgacttcattattgtcccaaattcccatctgttcatcacctggaggacttgttgacacggttgaggaggggtgtcaccggattccacatgggttctttcaatgtcgagtgtgaaactgtagacctagctgacgtgacggcagtagcgtcaaccatcacacgggcctagaacagtacggcaccccggcgttccaagaaatggttcagaactgcatggcgcaaaacctatcctggaaggggcctgcgaagaagtgggaggaggtgcttctgggccttggagtcgaggggagtcaagctggcatcgacgacgcagaggagatcgctccacttgccaaggaaaacgtagctactccatgacgcttggtgcctcggaaacacgcgttggtgataggaagcatcttctaggatcctcctggccttgtggctggagtgagttgttcagtcagacacagtttcgcctctacaacatcttcctcctcctggtggtggtccgaactccgaagcaaattccagtgataaaggatgaactaagaggtccatgtttctattgctagaccttttgcctcctaaatagacgatgtactgcgcttgtaacaagaacctcactttcgtgtcaagtaatatcaacaggtttcataatggtagtgaactgcactggaaaaacctgtaaacaatgcaaacaggattcaaaactaaaacaaatctgctattaaaagctgttattcaaaattgaaaaaaacaaaacctgttaattcagtattataactcagcaaacataaataaaaaaaaca

SEQ ID NO: 6081 - DNA, 573 bp, Zea Mays
atggaaacaggggcagggcgagctccatggcatgtggccgagcagaaagtgtcagttgagggagatgaagacatggctgggggcaacaacttgatccatgcgctagggagaaggactcgacgaccagcgagctgggagaggcaccgagttgcaggagggagtagggagggcgcagcatggctggataggagctcggctgggaactgctcggcgcagtggagcaggggcagacgagcgcgcccgggagagagcgccgcggccagccgaagaagcagggactccacggcgatgctcaggtcgaggtggagacgacgaccaccaaagctgggcgagctgggagccgagcgcgaggacaaccggcgctgcacaaggaaacagcgacagcgtagaggagagaggaaaacaaaggcgccggtggccggacagagagagccgccatgggagatgggcacagggaggagcagagccgaaccaggggctggggcgcgacacaggaggaacgagctgagggagctcctctgcgcggcgaccagggagctaaaggctggagcagcgcgcgttggtggaagatga

SEQ ID NO: 6082 - DNA, 2316 bp, Zea Mays
tgcccttgcccctttcgggtaaggtagtcttccactagctgtggcagaaccttccaagttattgggcccacatgcacctgtccttgtctcaaagacctcagactgctatgcatgtgcaccagataacttaataggatccattcgattgccccaaggacatcggataaaccacttacaaccagaaccgcaggattaagtaaacacaaatcacacacatcgacagtttgcagcggaaatcttattaccaaattttacaagttacatcaagttttatatgtacatgattggagtgattacaaaaagtgattcaaaggaataactttgaactttataaattgtttataagtttgaaacatatgctagattaagtgaccatcctcaataagaagtatagaagagttacttagacttataagaaggctgagcccaccggcacttaacaccataaacaacaacacaaagttaaaacctgaaaaacaacagggaataaaaccctgagtatggaattactcagcaagtcttacccgactaaagaaaagactctcaagggtatgctggatttgggaatcaaggagaggctttaacaagaatcaacttagatacttttgcagaaatagcttactaaagtgagtccttactttcaatattttaacgccaaattaaatattaatagacctgtttgcatatggtctactttcaccatctcatcaatacaacatcatttttattcatgagattcacatcctgacttaggttgcaggtcagtgatcaagtctccactctccggggatataacaacgatccgaattgatttactcagctgaggatctctaaccacacgacatatgtagcacttaacccttgcatatgtcaaccgttcccacagatcctccacaacgtgaaccggtccgcgctacccgggagcacagtactcctccatccagcctctagccaggagggcacacgctactcccaccatctcccacgcccagtgcgcggttgtcttttcacgtatggaatagccgggttcaagcttaccctgtcccatttccagggcatgtggccagttaagatagtccttgatctatcaggcctacatacgcatccaatccttaattgacccgggcggagcatcacctgttcctagcccaagtcccgatttaagtacttccacccttaggattgtttgtattccttaggatgaaaagagcatcaaagggaactttgtagtaagatcccaccacgctctcaatgaaaatattcttgtaggtagaagtcatctttcctcaggataacccctgagctaggccgtaatgcaaaagacaacctctatccacaagatctgagcagggctaagcatttttgtaaatcatgttttgatacttcaccagaagtatctataaaggtatggatatcaaggaaggcaatgcatcaaagggtttccaaacaactcctataaacctaatgcacattcactagacttaaagtgtgtaaaaataatttaaaaacacaaggaaggggttgtatgcaccggggcttgcctgggtaacactaggttagtgttgttaggtgacgtccacttgacgatcatccttggcctagcacttgatcagattatccatcttccggttcatccatccgcattatcctgcggattagcccgcgcttggggtcgacttggcttgtcttccgcatcacgcgattaattaacgtacctgaatggaatgcattatgcacatgaatgcatataagcaggaataacacaaatctaaatagtgctacgcgatagcgaattaaacacctagtggcgaggcgttgtactattttatccgaaaacactagttatcgacgtacgactgagtgcaataattacgcttctctagattaaccgaatctaacgcaaacatcactaaacaacaaacaatacatatttaatataattagcctaaacacaacttatcaattaattaattagaacactaaacctatcctactcatcacctacacatctcatatgtatatatatgtataaaccaatacactatatatgatgaagcattttaataaacaattaatacaaccacaacacacggttactaccgtccggagaactgacgcaactaatataactaattaatccaagctttgaactaataataaaaactagcgaatccagtgtactattactagttgatacaaaattcatgagaacgacgatgattcccgttcggactatccatcaaacattaagcatgcgattgaacaatgtccttcccgtcatcgctcaacagctagaattccacttctatcatcgac

SEQ ID NO: 6083 - DNA, 2834 bp, Zea Mays
gttcccttgatgaaggcctcgatggtgggagatgcaattcctaggttcaccattgattaaaattctggtagaggatgtgaacaacaacaaactgatcagattacaccatctgcgaccaaaaccaaggatgctggagatttttctcagcgccactgtcaccacggcgtactctggtgcgctgcgggccttcccgcgtgccgcaccagcgcctgcgacttgtgcggcttgtcttctatgatgtcctcgacagcttcctcgaccacagcaaccctacgcatggcacctcgacgacggctcgacgcccttgcacttagctacctcaacattatcggcacaaagggctatcatctgcatgggctactccagtagcagcattcgcaccggcattctgactatggggggatatctccattattctccagtctgtccgttcgttttgctaacgctacgagtgcggggggatgttagagtatattaggtatgttagagtatattaggcaactcctgatatggttggtttaggattgattgtaatctcgagataaccttccttatatctaggataacctttcttatctctagaatacgcttcttgccctccaagtcatgtactcctatatattctccctagaggctcaatgcaatacatcccacacattataccaattctctcattccttcaacaaggacagttgtactgatccaatatatcaacaaaataaaagatcacaagtatagcaataaatttggctcgaactaccctggacttgctccaatttttttgttaacaaaataaagaatcacaaacaaattgaccacctcctacactgcacatgaagctacaacacagaaaactacagcagcacatcagactgccatgaacccatgtccgaccactgaaacagaatgcaacgaatccgtagcaggcagagaactaacctgtagctccacagcgttgtgttaccccgaacgggacaatgggagcagaagcggtgtcttgactcacgtaccgatagctccaagatcttcaagaaacaatggaaatctgggtgaaaccctagcgtatcgagaaattactgttggggaagggaatgcaggcggaggaggattgacctccagagacggatggtgaagcgatgacagtggaggagcaaggtggcagtggtcggggtgagttgcctatgtgatttctagagatcgacatggagcagtggatttcgggagcaacgtgatcgccgagcgctgggagatgtgtcaccgaccgtcgggaaaggcgcgccgctagtcaccagccactgggtatgcgctgaccacaggatactagggtgacagcggcagcagccttgcgattcacaagctgcatgagcatgaacaagccgagcgctaggactaggagatgtgtcacctaccataggaaaaggtgcgccgctagtcaccagccactgggtatgcgctgaccacgggatactagggtgacagtggcagcagccttgcgactcacatgccgtgtgagcatgaacaagtcgacgggggttagggaagccctcccgcctcttgactcgcagttttcttccgcgtggaaaaggaatggaagcgagtttcgatccctgagtttgtgggcttccgtccaaatggcacaaaaaattggcccatgggagattggcaccgggtttcttggcccagggaatttgcgggccccccagggatctgggctcccaaagtagccctaaggcacatgcgtatctactaacgctgtaccggtcgtcttgtttcttcttctctacaaaattaagtcacagcttctacagctaaggatctgcgatcagcatgctcgtgctttatgtggccattctgccgaaatcctgtttcaggagcatgaggtctcaaatgcaattgatgaactcttgtcaaagattcccgctggtctaactgaggatgggcttcaacttgtgaaaactagggtgctggagagtgccgggggcttcttcgatacaacatttacttccagcaaagtcaaagtatataaatgccctgagctggttgcggagcttcatatgccaatgggttgtcgagttcgccaatggatctttagaaataccacatctgtggcaatcttttgtatcctgtttgcagcactgctttggatactgtggatcatttacaagaggcggacattatctaatagagctgagcaaatatacgagcagggatcacctgttggttcctcaagagagaaagaatgctttcctgtggaagaaggtcgaagaactcatacgagaagattctcgaatagatcaatatccaaaggtgattaaaggggagtcgaaagttgtttacgagtggcaagcaagtggctcgcttagtgcaaagattaaaaaggtgcaaggtgcaagggccaagtcaaggactggtgtaggtgtcataaaatttggggaagaaatgagtgcttcctccttgggtgaggtgagggagcagggctcgtgtgatttaacacgcgaagaaagaagtaaggacaaggtcacgtgcagtgattaggttatcaatcaatctatctacatgtatgcctctggtctttagaggaaccagcacgtgagcttggcaagagttactgatcttttgtaaattttgatgataggagccgagccgtcacagtgtgttgttgctgttacagttgagtttgttggcatgtcatgagattgtctggtacagtttcaacaactgatgaatgaacatggtcactggaagatgctgctgacggagcagtcgtcgtgcacacgccagatggtctcaccgaggaggttagcgacggagagcacggtgagctgtgcaccggc

SEQ ID NO: 6084 - DNA, 2745 bp, Zea Mays
gttcccttgatgaaggcctcgatggtgggagatgcaattcctaggttcaccattgattaaaattctggtagaggatgtgaacaacaacaaactgatcagattacaccatctgcgaccaaaaccaaggatgctggagatttttctcagcgccactgtcaccacggcgtactctggtgcgctgcgggccttcccgcgtgccgcaccagcgcctgcgacttgtgcggcttgtcttctatgatgtcctcgacagcttcctcgaccacagcaaccctacgcatggcacctcgacgacggctcgacgcccttgcacttagctacctcaacattatcggcacaaagggctatcatctgcatgggctactccagtagcagcattcgcaccggcattctgactatggggggatatctccattattctccagtctgtccgttcgttttgctaacgctacgagtgcggggggatgttagagtatattaggtatgttagagtatattaggcaactcctgatatggttggtttaggattgattgtaatctcgagataaccttccttatatctaggataacctttcttatctctagaatacgcttcttgccctccaagtcatgtactcctatatattctccctagaggctcaatgcaatacatcccacacattataccaattctctcattccttcaacaaggacagttgtactgatccaatatatcaacaaaataaaagatcacaagtatagcaataaatttggctcgaactaccctggacttgctccaatttttttgttaacaaaataaagaatcacaaacaaattgaccacctcctacactgcacatgaagctacaacacagaaaactacagcagcacatcagactgccatgaacccatgtccgaccactgaaacagaatgcaacgaatccgtagcaggcagagaactaacctgtagctccacagcgttgtgttaccccgaacgggacaatgggagcagaagcggtgtcttgactcacgtaccgatagctccaagatcttcaagaaacaatggaaatctgggtgaaaccctagcgtatcgagaaattactgttggggaagggaatgcaggcggaggaggattgacctccagagacggatggtgaagcgatgacagtggaggagcaaggtggcagtggtcggggtgagttgcctatgtgatttctagagatcgacatggagcagtggatttcgggagcaacgtgatcgccgagcgctgggagatgtgtcaccgaccgtcgggaaaggcgcgccgctagtcaccagccactgggtatgcgctgaccacaggatactagggtgacagcggcagcagccttgcgattcacaagctgcatgagcatgaacaagccgagcgctaggactaggagatgtgtcacctaccataggaaaaggtgcgccgctagtcaccagccactgggtatgcgctgaccacgggatactagggtgacagtggcagcagccttgcgactcacatgccgtgtgagcatgaacaagtcgacgggggttagggaagccctcccgcctcttgactcgcagttttcttccgcgtggaaaaggaatggaagcgagtttcgatccctgagtttgtgggcttccgtccaaatggcacaaaaaattggcccatgggagattggcaccgggtttcttggcccagggaatttgcgggccccccagggatctgggctcccaaagtagccctaaggcacatgcgtatctactaacgctgtaccggtcgtcttgtttcttcttctctacaaaattaagtcacagcttctacagctaaggatctgcgatcagcatgctcgtgctttatgtggccattctgccgaaatcctgtttcaggagcatgaggtctcaaatgcaattgatgaactcttgtcaaagattcccgctggtctaactgaggatgggcttcaacttgtgaaaactagggtgctggagagtgccgggggcttcttcgatacaacatttacttccagcaagcagctcagtgatgatggaacccaagtttgcagcactgctttggatactgtggatcatttacaagaggcggacattatctaatagagctgagcaaatatacgagcagggatcacctgttggttcctcaagagagaaagaatgctttcctgtggaagaaggtcgaagaactcatacgagaagattctcgaatagatcaatatccaaaggtgattaaaggggagtcgaaagttgtttacgagtggcaagcaagtggctcgcttagtgcaaagattaaaaaggtgcaaggtgcaagggccaagtcaaggactggtgtaggtgtcataaaatttggggaagaaatgagtgcttcctccttgggtgaggtgagggagcagggctcgtgtgatttaacacgcgaagaaagaagtaaggacaaggtcacgtgcagtgattaggttatcaatcaatctatctacatgtatgcctctggtctttagaggaaccagcacgtgagcttggcaagagttactgatcttttgtaaattttgatgataggagccgagccgtcacagtgtgttgttgctgttacagttgagtttgttggcatgtcatgagattgtctggtacagtttcaacaactgatgaatgaacatggtcactggaagatgctgctgacggagcagtcgtcgtgcacacgccagatggtctcaccgaggaggttagcgacggagagcacggtgagctgtgcaccggc

SEQ ID NO: 6085 - DNA, 2827 bp, Zea Mays
gttcccttgatgaaggcctcgatggtgggagatgcaattcctaggttcaccattgattaaaattctggtagaggatgtgaacaacaacaaactgatcagattacaccatctgcgaccaaaaccaaggatgctggagatttttctcagcgccactgtcaccacggcgtactctggtgcgctgcgggccttcccgcgtgccgcaccagcgcctgcgacttgtgcggcttgtcttctatgatgtcctcgacagcttcctcgaccacagcaaccctacgcatggcacctcgacgacggctcgacgcccttgcacttagctacctcaacattatcggcacaaagggctatcatctgcatgggctactccagtagcagcattcgcaccggcattctgactatggggggatatctccattattctccagtctgtccgttcgttttgctaacgctacgagtgcggggggatgttagagtatattaggtatgttagagtatattaggcaactcctgatatggttggtttaggattgattgtaatctcgagataaccttccttatatctaggataacctttcttatctctagaatacgcttcttgccctccaagtcatgtactcctatatattctccctagaggctcaatgcaatacatcccacacattataccaattctctcattccttcaacaaggacagttgtactgatccaatatatcaacaaaataaaagatcacaagtatagcaataaatttggctcgaactaccctggacttgctccaatttttttgttaacaaaataaagaatcacaaacaaattgaccacctcctacactgcacatgaagctacaacacagaaaactacagcagcacatcagactgccatgaacccatgtccgaccactgaaacagaatgcaacgaatccgtagcaggcagagaactaacctgtagctccacagcgttgtgttaccccgaacgggacaatgggagcagaagcggtgtcttgactcacgtaccgatagctccaagatcttcaagaaacaatggaaatctgggtgaaaccctagcgtatcgagaaattactgttggggaagggaatgcaggcggaggaggattgacctccagagacggatggtgaagcgatgacagtggaggagcaaggtggcagtggtcggggtgagttgcctatgtgatttctagagatcgacatggagcagtggatttcgggagcaacgtgatcgccgagcgctgggagatgtgtcaccgaccgtcgggaaaggcgcgccgctagtcaccagccactgggtatgcgctgaccacaggatactagggtgacagcggcagcagccttgcgattcacaagctgcatgagcatgaacaagccgagcgctaggactaggagatgtgtcacctaccataggaaaaggtgcgccgctagtcaccagccactgggtatgcgctgaccacgggatactagggtgacagtggcagcagccttgcgactcacatgccgtgtgagcatgaacaagtcgacgggggttagggaagccctcccgcctcttgactcgcagttttcttccgcgtggaaaaggaatggaagcgagtttcgatccctgagtttgtgggcttccgtccaaatggcacaaaaaattggcccatgggagattggcaccgggtttcttggcccagggaatttgcgggccccccagggatctgggctcccaaagtagccctaaggcacatgcgtatctactaacgctgtaccggtcgtcttgtttcttcttctctacaaaattaagtcacagcttctacagctaaggatctgcgatcagcatgctcgtgctttatgtggccattctgccgaaatcctgtttcaggagcatgaggtctcaaatgcaattgatgaactcttgtcaaagattcccgctggtctaactgaggatgggcttcaacttgtgaaaactagggtgctggagagtgccgggggcttcttcgatacaacatttacttccagcaaagtcaaagtatataaatgccctgagctggttgcggagcttcatatgccaatgggttgtcgagttcgccaatggatctttagaaataccacatctgtggcaatcttttgtatcctgcactgctttggatactgtggatcatttacaagaggcggacattatctaatagagctgagcaaatatacgagcagggatcacctgttggttcctcaagagagaaagaatgctttcctgtggaagaaggtcgaagaactcatacgagaagattctcgaatagatcaatatccaaaggtgattaaaggggagtcgaaagttgtttacgagtggcaagcaagtggctcgcttagtgcaaagattaaaaaggtgcaaggtgcaagggccaagtcaaggactggtgtaggtgtcataaaatttggggaagaaatgagtgcttcctccttgggtgaggtgagggagcagggctcgtgtgatttaacacgcgaagaaagaagtaaggacaaggtcacgtgcagtgattaggttatcaatcaatctatctacatgtatgcctctggtctttagaggaaccagcacgtgagcttggcaagagttactgatcttttgtaaattttgatgataggagccgagccgtcacagtgtgttgttgctgttacagttgagtttgttggcatgtcatgagattgtctggtacagtttcaacaactgatgaatgaacatggtcactggaagatgctgctgacggagcagtcgtcgtgcacacgccagatggtctcaccgaggaggttagcgacggagagcacggtgagctgtgcaccggc

SEQ ID NO: 6086 - DNA, 1313 bp, Zea Mays
aaaaaaatcctttgcataagcttctcagataggaactgcagctgcgtttttcttctcaaatcatacaatgcttccagcaagagctctctctacaagtaaacacaaggtaagataatgaggactatgggcatcttacggcaccgagaaccaaattatattattcaggtcgaatttttttttgaacgtcgcaggagagctgctagtcatttcattaagaggagaaaacaaaaacaaacggcgcgactggaaagataacgccgtgtacaaggcagtcacagcttctacagctaaggatctgcgatcagcatgctcgtgctttatgtggccattctgccgaaatcctgtttcaggagcatgaggtctcaaatgcaattgatgaactcttgtcaaagattcccgctggtctaactgaggatgggcttcaacttgtgaaaactagggtgctggagagtgccgggggcttcttcgatacaacatttacttccagcaaagtcaaagtatataaatgccctgagctggttgcggagcttcatatgccaatgggttgtcgagttcgccaatggatctttagaaataccacatctgtggcaatcttttgtatcctgtttgcagcactgctttggatactgtggatcatttacaagaggcggacattatctaatagagctgagcaaatatacgagcagggatcacctgttggttcctcaagagagaaagaatgctttcctgtggaagaaggtcgaagaactcatacgagaagattctcgaatagatcaatatccaaaggtgattaaaggggagtcgaaagttgtttacgagtggcaagcaagtggctcgcttagtgcaaagattaaaaaggtgcaaggtgcaagggccaagtcaaggactggtgtaggtgtcataaaatttggggaagaaatgagtgcttcctccttgggtgaggtgagggagcagggctcgtgtgatttaacacgcgaagaaagaagtaaggacaaggtcacgtgcagtgattaggttatcaatcaatctatctacatgtatgcctctggtctttagaggaaccagcacgtgagcttggcaagagttactgatcttttgtaaattttgatgataggagccgagccgtcacagtgtgttgttgctgttacagttgagtttgttggcatgtcatgagattgtctggtacagtttcaacaactgatgaatgaacatggtcactggaagatgctgctgacggagcagtcgtcgtgcacacgccagatggtctcaccgaggaggttagcgacggagagcacggtgagctgtgcaccggc

SEQ ID NO: 6087 - DNA, 973 bp, Zea Mays
gacgtttcaggagcatgaggtctcaaatgcaattgatgaactcttgtcaaagattcccgctggtctaactgaggatgggcttcaacttgtgaaaactagggtgctggagagtgccgggggcttcttcgatacaacatttacttccagcaaagtcaaagtatataaatgccctgagctggttgcggagcttcatatgccaatgggttgtcgagttcgccaatggatctttagaaataccacatctgtggcaatcttttgtatcctgtttgcagcactgctttggatactgtggatcatttacaagaggcggacattatctaatagagctgagcaaatatacgagcagggatcacctgttggttcctcaagagagaaagaatgctttcctgtggaagaaggtcgaagaactcatacgagaagattctcgaatagatcaatatccaaaggtgattaaaggggagtcgaaagttgtttacgagtggcaagcaagtggctcgcttagtgcaaagattaaaaaggtgcaaggtgcaagggccaagtcaaggactggtgtaggtgtcataaaatttggggaagaaatgagtgcttcctccttgggtgaggtgagggagcagggctcgtgtgatttaacacgcgaagaaagaagtaaggacaaggtcacgtgcagtgattaggttatcaatcaatctatctacatgtatgcctctggtctttagaggaaccagcacgtgagcttggcaagagttactgatcttttgtaaattttgatgataggagccgagccgtcacagtgtgttgttgctgttacagttgagtttgttggcatgtcatgagattgtctggtacagtttcaacaactgatgaatgaacatggtcactggaagatgctgctgacggagcagtcgtcgtgcacacgccagatggtctcaccgaggaggttagcgacggagagcacggtgagctgtgcaccggc

SEQ ID NO: 6088 - DNA, 1369 bp, Zea Mays
aaaggaagttcgtcctctctctcacggtctcacctctcacgtccagagagagagagagaggatgccgtcgcgttcgccgcggcagtcggcccgaccccccctcccgaccgccgccgagccccctcccggcctcttcccggccagggaggacctcgtccgcttgctcgccgtcatattcatcgcagcggccgccgccgcggcctgtagcgtcctcaaccgccgccctgagcccttctgcgactctccccagtggcccgatgactacgccgacgattcgtgtcaaccttgccctccgaacgggcgatgtgtggacggcgagttggagtgcgtccaggggttcaagaggcacggcaaagcatgcatagaggatggactgctcattcaaagagctaacaagatttttcaggagcatgaggtctcaaatgcaattgatgaactcttgtcaaagattcccgctggtctaactgaggatgggcttcaacttgtgaaaactagggtgctggagagtgccgggggcttcttcgatacaacatttacttccagcaaagtcaaagtatataaatgccctgagctggttgcggagcttcatatgccaatgggttgtcgagttcgccaatggatctttagaaataccacatctgtggcaatcttttgtatcctgtttgcagcactgctttggatactgtggatcatttacaagaggcggacattatctaatagagctgagcaaatatacgagcagggatcacctgttggttcctcaagagagaaagaatgctttcctgtggaagaaggtcgaagaactcatacgagaagattctcgaatagatcaatatccaaaggtgattaaaggggagtcgaaagttgtttacgagtggcaagcaagtggctcgcttagtgcaaagattaaaaaggtgcaaggtgcaagggccaagtcaaggactggtgtaggtgtcataaaatttggggaagaaatgagtgcttcctccttgggtgaggtgagggagcagggctcgtgtgatttaacacgcgaagaaagaagtaaggacaaggtcacgtgcagtgattaggttatcaatcaatctatctacatgtatgcctctggtctttagaggaaccagcacgtgagcttggcaagagttactgatcttttgtaaattttgatgataggagccgagccgtcacagtgtgttgttgctgttacagttgagtttgttggcatgtcatgagattgtctggtacagtttcaacaactgatgaatgaacatggtcactggaagatgctgctgacggagcagtcgtcgtgcacacgccagatggtctcaccgaggaggttagcgacggagagcacggtgagctgtgcaccggc

SEQ ID NO: 6089 - DNA, 1386 bp, Zea Mays
aaaggaagttcgtcctctctctcacggtctcacctctcacgtccagagagagagagagaggatgccgtcgcgttcgccgcggcagtcggcccgaccccccctcccgaccgccgccgagccccctcccggcctcttcccggccagggaggacctcgtccgcttgctcgccgtcatattcatcgcagcggccgccgccgcggcctgtagcgtcctcaaccgccgccctgagcccttctgcgactctccccagtggcccgatgactacgccgacgcttctacagctaaggatctgcgatcagcatgctcgtgctttatgtggccattctgccgaaatcctgtttcaggagcatgaggtctcaaatgcaattgatgaactcttgtcaaagattcccgctggtctaactgaggatgggcttcaacttgtgaaaactagggtgctggagagtgccgggggcttcttcgatacaacatttacttccagcaaagtcaaagtatataaatgccctgagctggttgcggagcttcatatgccaatgggttgtcgagttcgccaatggatctttagaaataccacatctgtggcaatcttttgtatcctgcactgctttggatactgtggatcatttacaagaggcggacattatctaatagagctgagcaaatatacgagcaggtatgtgaaatccttgaagataatgctgtaaacgccgagattgacaactccaattctgaggtttgggtggttacctcctggctcagggatcacctgttggttcctcaagagagaaagaatgctttcctgtggaagaaggtcgaagaactcatacgagaagattctcgaatagatcaatatccaaaggtgattaaaggggagtcgaaagttgtttacgagtggcaagcaagtggctcgcttagtgcaaagattaaaaaggtgcaaggtgcaagggccaagtcaaggactggtgtaggtgtcataaaatttggggaagaaatgagtgcttcctccttgggtgaggtgagggagcagggctcgtgtgatttaacacgcgaagaaagaagtaaggacaaggtcacgtgcagtgattaggttatcaatcaatctatctacatgtatgcctctggtctttagaggaaccagcacgtgagcttggcaagagttactgatcttttgtaaattttgatgataggagccgagccgtcacagtgtgttgttgctgttacagttgagtttgttggcatgtcatgagattgtctggtacagtttcaacaactgatgaatgaacatggtcactggaagatgctgctgacggagcagtcgtcgtgcacacgccagatggtctcaccgaggaggttagcgacggagagcacggtgagctgtgcaccggc

SEQ ID NO: 6090 - DNA, 1502 bp, Zea Mays
aaaggaagttcgtcctctctctcacggtctcacctctcacgtccagagagagagagagaggatgccgtcgcgttcgccgcggcagtcggcccgaccccccctcccgaccgccgccgagccccctcccggcctcttcccggccagggaggacctcgtccgcttgctcgccgtcatattcatcgcagcggccgccgccgcggcctgtagcgtcctcaaccgccgccctgagcccttctgcgactctccccagtggcccgatgactacgccgacgattcgtgtcaaccttgccctccgaacgggcgatgtgtggacggcgagttggagtgcgtccaggggttcaagaggcacggcaaagcatgcatagaggatggactgctcattcaaagagctaacaagatttcacagcttctacagctaaggatctgcgatcagcatgctcgtgctttatgtggccattctgccgaaatcctgtttcaggagcatgaggtctcaaatgcaattgatgaactcttgtcaaagattcccgctggtctaactgaggatgggcttcaacttgtgaaaactagggtgctggagagtgccgggggcttcttcgatacaacatttacttccagcaaagtcaaagtatataaatgccctgagctggttgcggagcttcatatgccaatgggttgtcgagttcgccaatggatctttagaaataccacatctgtggcaatcttttgtatcctgcactgctttggatactgtggatcatttacaagaggcggacattatctaatagagctgagcaaatatacgagcagtttttcttttgcagtaactccttttggaccttctggcatttgtgcctttgtctgttgtcattcagtagggatcacctgttggttcctcaagagagaaagaatgctttcctgtggaagaaggtcgaagaactcatacgagaagattctcgaatagatcaatatccaaaggtgattaaaggggagtcgaaagttgtttacgagtggcaagcaagtggctcgcttagtgcaaagattaaaaaggtgcaaggtgcaagggccaagtcaaggactggtgtaggtgtcataaaatttggggaagaaatgagtgcttcctccttgggtgaggtgagggagcagggctcgtgtgatttaacacgcgaagaaagaagtaaggacaaggtcacgtgcagtgattaggttatcaatcaatctatctacatgtatgcctctggtctttagaggaaccagcacgtgagcttggcaagagttactgatcttttgtaaattttgatgataggagccgagccgtcacagtgtgttgttgctgttacagttgagtttgttggcatgtcatgagattgtctggtacagtttcaacaactgatgaatgaacatggtcactggaagatgctgctgacggagcagtcgtcgtgcacacgccagatggtctcaccgaggaggttagcgacggagagcacggtgagctgtgcaccggc

SEQ ID NO: 6091 - DNA, 1434 bp, Zea Mays
aaaggaagttcgtcctctctctcacggtctcacctctcacgtccagagagagagagagaggatgccgtcgcgttcgccgcggcagtcggcccgaccccccctcccgaccgccgccgagccccctcccggcctcttcccggccagggaggacctcgtccgcttgctcgccgtcatattcatcgcagcggccgccgccgcggcctgtagcgtcctcaaccgccgccctgagcccttctgcgactctccccagtggcccgatgactacgccgacgattcgtgtcaaccttgccctccgaacgggcgatgtgtggacggcgagttggagtgcgtccaggggttcaagaggcacggcaaagcatgcatagaggatggactgctcattcaaagagctaacaagatttcacagcttctacagctaaggatctgcgatcagcatgctcgtgctttatgtggccattctgccgaaatcctgtttcaggagcatgaggtctcaaatgcaattgatgaactcttgtcaaagattcccgctggtctaactgaggatgggcttcaacttgtgaaaactagggtgctggagagtgccgggggcttcttcgatacaacatttacttccagcaaagtcaaagtatataaatgccctgagctggttgcggagcttcatatgccaatgggttgtcgagttcgccaatggatctttagaaataccacatctgtggcaatcttttgtatcctgcactgctttggatactgtggatcatttacaagaggcggacattatctaatagagctgagcaaatatacgagcagggatcacctgttggttcctcaagagagaaagaatgctttcctgtggaagaaggtcgaagaactcatacgagaagattctcgaatagatcaatatccaaaggtgattaaaggggagtcgaaagttgtttacgagtggcaagcaagtggctcgcttagtgcaaagattaaaaaggtgcaaggtgcaagggccaagtcaaggactggtgtaggtgtcataaaatttggggaagaaatgagtgcttcctccttgggtgaggtgagggagcagggctcgtgtgatttaacacgcgaagaaagaagtaaggacaaggtcacgtgcagtgattaggttatcaatcaatctatctacatgtatgcctctggtctttagaggaaccagcacgtgagcttggcaagagttactgatcttttgtaaattttgatgataggagccgagccgtcacagtgtgttgttgctgttacagttgagtttgttggcatgtcatgagattgtctggtacagtttcaacaactgatgaatgaacatggtcactggaagatgctgctgacggagcagtcgtcgtgcacacgccagatggtctcaccgaggaggttagcgacggagagcacggtgagctgtgcaccggc

SEQ ID NO: 6092 - DNA, 1441 bp, Zea Mays
aaaggaagttcgtcctctctctcacggtctcacctctcacgtccagagagagagagagaggatgccgtcgcgttcgccgcggcagtcggcccgaccccccctcccgaccgccgccgagccccctcccggcctcttcccggccagggaggacctcgtccgcttgctcgccgtcatattcatcgcagcggccgccgccgcggcctgtagcgtcctcaaccgccgccctgagcccttctgcgactctccccagtggcccgatgactacgccgacgattcgtgtcaaccttgccctccgaacgggcgatgtgtggacggcgagttggagtgcgtccaggggttcaagaggcacggcaaagcatgcatagaggatggactgctcattcaaagagctaacaagatttcacagcttctacagctaaggatctgcgatcagcatgctcgtgctttatgtggccattctgccgaaatcctgtttcaggagcatgaggtctcaaatgcaattgatgaactcttgtcaaagattcccgctggtctaactgaggatgggcttcaacttgtgaaaactagggtgctggagagtgccgggggcttcttcgatacaacatttacttccagcaaagtcaaagtatataaatgccctgagctggttgcggagcttcatatgccaatgggttgtcgagttcgccaatggatctttagaaataccacatctgtggcaatcttttgtatcctgtttgcagcactgctttggatactgtggatcatttacaagaggcggacattatctaatagagctgagcaaatatacgagcagggatcacctgttggttcctcaagagagaaagaatgctttcctgtggaagaaggtcgaagaactcatacgagaagattctcgaatagatcaatatccaaaggtgattaaaggggagtcgaaagttgtttacgagtggcaagcaagtggctcgcttagtgcaaagattaaaaaggtgcaaggtgcaagggccaagtcaaggactggtgtaggtgtcataaaatttggggaagaaatgagtgcttcctccttgggtgaggtgagggagcagggctcgtgtgatttaacacgcgaagaaagaagtaaggacaaggtcacgtgcagtgattaggttatcaatcaatctatctacatgtatgcctctggtctttagaggaaccagcacgtgagcttggcaagagttactgatcttttgtaaattttgatgataggagccgagccgtcacagtgtgttgttgctgttacagttgagtttgttggcatgtcatgagattgtctggtacagtttcaacaactgatgaatgaacatggtcactggaagatgctgctgacggagcagtcgtcgtgcacacgccagatggtctcaccgaggaggttagcgacggagagcacggtgagctgtgcaccggc

SEQ ID NO: 6093 - DNA, 1352 bp, Zea Mays
aaaggaagttcgtcctctctctcacggtctcacctctcacgtccagagagagagagagaggatgccgtcgcgttcgccgcggcagtcggcccgaccccccctcccgaccgccgccgagccccctcccggcctcttcccggccagggaggacctcgtccgcttgctcgccgtcatattcatcgcagcggccgccgccgcggcctgtagcgtcctcaaccgccgccctgagcccttctgcgactctccccagtggcccgatgactacgccgacgattcgtgtcaaccttgccctccgaacgggcgatgtgtggacggcgagttggagtgcgtccaggggttcaagaggcacggcaaagcatgcatagaggatggactgctcattcaaagagctaacaagatttcacagcttctacagctaaggatctgcgatcagcatgctcgtgctttatgtggccattctgccgaaatcctgtttcaggagcatgaggtctcaaatgcaattgatgaactcttgtcaaagattcccgctggtctaactgaggatgggcttcaacttgtgaaaactagggtgctggagagtgccgggggcttcttcgatacaacatttacttccagcaagcagctcagtgatgatggaacccaagtttgcagcactgctttggatactgtggatcatttacaagaggcggacattatctaatagagctgagcaaatatacgagcagggatcacctgttggttcctcaagagagaaagaatgctttcctgtggaagaaggtcgaagaactcatacgagaagattctcgaatagatcaatatccaaaggtgattaaaggggagtcgaaagttgtttacgagtggcaagcaagtggctcgcttagtgcaaagattaaaaaggtgcaaggtgcaagggccaagtcaaggactggtgtaggtgtcataaaatttggggaagaaatgagtgcttcctccttgggtgaggtgagggagcagggctcgtgtgatttaacacgcgaagaaagaagtaaggacaaggtcacgtgcagtgattaggttatcaatcaatctatctacatgtatgcctctggtctttagaggaaccagcacgtgagcttggcaagagttactgatcttttgtaaattttgatgataggagccgagccgtcacagtgtgttgttgctgttacagttgagtttgttggcatgtcatgagattgtctggtacagtttcaacaactgatgaatgaacatggtcactggaagatgctgctgacggagcagtcgtcgtgcacacgccagatggtctcaccgaggaggttagcgacggagagcacggtgagctgtgcaccggc

SEQ ID NO: 6094 - DNA, 981 bp, Zea Mays
aaaggaagttcgtcctctctctcacggtctcacctctcacgtccagagagagagagagaggatgccgtcgcgttcgccgcggcagtcggcccgaccccccctcccgaccgccgccgagccccctcccggcctcttcccggccagggaggacctcgtccgcttgctcgccgtcatattcatcgcagcggccgccgccgcggcctgtagcgtcctcaaccgccgccctgagcccttctgcgactctccccagtggcccgatgactacgccgacgattcgtgtcaaccttgccctccgaacgggcgatgtgtggacggcgagttggagtgcgtccaggggttcaagaggcacggcaaagcatgcatagaggatggactgctcattcaaagagctaacaagatttcacagcttctacagctaaggatctgcgatcagcatgctcgtgctttatgtggccattctgccgaaatcctgtttcaggagcatgaggtctcaaatgcaattgatgaactcttgtcaaagattcccgctggtctaactgaggatgggcttcaacttgtgaaaactagggtgctggagagtgccgggggcttcttcgatacaacatttacttccagcaaagtcaaagtatataaatgccctgagctggttgcggagcttcatatgccaatgggttgtcgagttcgccaatggatctttagaaataccacatctgtggcaatcttttgtatcctggtatgcttctacaactgctacttaggcacacggcttgtttataggcagctcagtgatgatggaacccaagtttgcagcactgctttggatactgtggatcatttacaagaggcggacattatctaatagagctgagcaaatatacgagcagctcctttgcttctcaagtgtgagggagatggaaaagggtgacactttctgcgtttcatagagctcttcattcagtgtgttatttacgtcgtttggtg

SEQ ID NO: 6095 - DNA, 2713 bp, Zea Mays
atagtgctgcctgaggtttatgttttctgtccagcgtcttgttttcgacagctagtgtggtactattgtgctgaaccttttggatatttttgtgcattttaacttggacctgcaatgggcccgatccaagtgaacagcaaagatctttcaaaagaactctacaagaaatatagcagtgtacataggcgtaaagttcgtgtgtggcaaatgatatgtgttctatcacactatgtagaagatgatattgttggagaagtgacatctagcattcacatctgtctttatagaaataatttgccagctgtccggcagtacttggagacgtttgctatactcttatacttaaaatttccaaccttggcagaggagcaacttattcctatttttcatgacaaagggatgcgacaacaggcactatcttcatatgtttttatagcagcaaacgtcatacttcactcaagacagtccgtccagatataccacctgaatcaattgcttcctccaatactgccgtttttaacatcccatcatcacagtttacgtggttttactcagcttcttgtccattcagtgctatcgaggttgtggcctactctgcatcccgaaacttcagaagatgcagtctttgagaggaggtgctttcaagaattgaaagattatttggcagaaaattctgactgtgttaggcttagagtttcaatcgaaggtttccttgatgtctttgatcccaatgcatctgggaccccccctggaatatttagcgcccgtcctgaggtgtctgacttcgaatgtgttccggtgtcagtgatggagcgtgtgattgagttcctgaacgatgtgagggaggacttgagacaagctatagcaaatgatacagtaacaatcaagaatgaggatctcgcggtgggagagcatcacaagagtgacgagagcgtgtctgagatggtaaaaactggtcaagaggtacttgatttccagaagaaaataacaccccataggggggactccgagcaagcattgaacttgaacaccagaggtcattcaggcgttggtgacgaatacatttcaagaataatttcagagatggaggaagatgaccaagttttcgacctagcgctagaagcaagattgcatgctgcggaaacgatcaagcagagccggcaagaactgatcgtggttgcgtcattggtggaacgcataccaaatcttgcggggctgacgagaacgtgcgaggtcttcagagcagccggtctggttgttgccgacaagagcgttcttcaggataagcagttccggctgatcagtgtgaccgctgagaaatggctgcctgtgacggaggtccccgtggacagcgtgaaggcttacttggagaggaagcggggcgatggttactcggtgattgggctggagcagacggccaacagcatgcctctggaccggttcgggttcccggaccggacggttctggtgctggggcgggagaaggaaggcatccccgtcgacatcatccacattctggacgcgtgcgtggagatcccgcagctggggcgtggtgaggtcgctcaatgtccatgtcagcggcgccatagccgtctgggagtacacgcgtcaacaacgcaatcagcgttagcttgttgcttgtttttgctccattgaccattgacgacgaagactactactactacctgggagggagagtagaaatcaacatgcagcactcacaggaaggagagaaagacctgggctgggctgggccgacagtaatgaacgctagcccaccttcctttcccaccaccaagacgtacaagtcagactatattacttcatttatttgtgctaatatcgtaacgttttattgtgtaagcaatttggtacttgaagcctgcctgcatttggatttggagcggcatcagaagttttttaaagtatttattcgtagaggggtcgatcgagctcgcccttttattgctgcaaatatataatacacattattactgctgcaaacataagattacgttacattacattaaatgaaaagctatattacctcccgttctcgttatcccgctagttcatttttaacgaaacagtgacaaatatgaactaaacagcaacaaataaaaagaaacggaggggtactacgcttttttttatttcagtgcgcgcgtgtctgctccagacggtgctgctgcgcccagtccttgacgatgtgcggctgctgacccgacgacgaggtcgtggtctgaaggtagcggtacacccacgccagcacagccaccgcagccacgccgaaccctcccgacgaaacgatgcctaccgtgagcagcgccaccgtgatggccgccggcaccagcacggggctgaagatcaccatcaatggcgtcgccacgatgagcgccagcaccgtgcccgtcaccgccagccccgacaacaacaacatggagaaggctgccgtggctgtggctaacgccttggccaccgccatgggcgcgggcggcggccgctgctgctgctggtgaccgtagtgggtggcgttgtagtcatcgtcgccgtagaggcccctcatgtagttctctccgacggcctcgcttcttctccctgcacgatggtcatccgcatgatgagcagtggccatacaagctctggctagctagctagctagtatacaatgattcaaaagaaatagatgagtggagcagctagtaggttcttg

SEQ ID NO: 6096 - DNA, 3075 bp, Zea Mays
atgaccttgttcctccccggctccaccattgctcgaagacgacgatgcggcctcgtgaggacggaggagtttgagatgatgatgcaattagcaaagtcttcctggatcttgcaccttaactgcaacaaacgccgagtggctcccattgctgcactactatctgcagtattgcacccagcaatattttgtaatttggaaatgcaccagacaaatgaaaaagggccaggccctttaaaatggtggcattcgacgaagattttgaagctgaactctctgaaaaccatgaagcaagatttgaggtttccatgctagcacaaagtcctgatcgtgaattcacagaggtgttcattaatacagaattatatgctcgtgtttcggttgctgttctctttcatcagctttggaaacaaatcaaagaacatagtatattggaaactgaagaagctcttgaatgcggcaaactatttctactagaacttctggactcagcggtgaacagcaaagatctttcaaaagaactctacaagaaatatagcagtgtacataggcgtaaagttcgtgtgtggcaaatgatatgtgttctatcacactatgtagaagatgatattgttggagaagtgacatctagcattcacatctgtctttatagaaataatttgccagctgtccggcagtacttggagacgtttgctatactcttatacttaaaatttccaaccttggcagaggagcaacttattcctatttttcatgacaaagggatgcgacaacaggcactatcttcatatgtttttatagcagcaaacgtcatacttcactcaagacagtccgtccagatataccacctgaatcaattgcttcctccaatactgccgtttttaacatcccatcatcacagtttacgtggttttactcagcttcttgtccattcagtgctatcgaggttgtggcctactctgcatcccgaaacttcagaagatgcagtctttgagaggaggtgctttcaagaattgaaagattatttggcagaaaattctgactgtgttaggcttagagtttcaatcgaaggtttccttgatgtctttgatcccaatgcatctgggaccccccctggaatatttagcgcccgtcctgaggtgtctgacttcgaatgtgttccggtgtcagtgatggagcgtgtgattgagttcctgaacgatgtgagggaggacttgagacaagctatagcaaatgatacagtaacaatcaagaatgaggatctcgcggtgggagagcatcacaagagtgacgagagcgtgtctgagatggtaaaaactggtcaagaggtacttgatttccagaagaaaataacaccccataggggggactccgagcaagcattgaacttgaacaccagaggtcattcaggcgttggtgacgaatacatttcaagaataatttcagagatggaggaagatgaccaagttttcgacctagcgctagaagcaagattgcatgctgcggaaacgatcaagcagagccggcaagaactgatcgtggttgcgtcattggtggaacgcataccaaatcttgcggggctgacgagaacgtgcgaggtcttcagagcagccggtctggttgttgccgacaagagcgttcttcaggataagcagttccggctgatcagtgtgaccgctgagaaatggctgcctgtgacggaggtccccgtggacagcgtgaaggcttacttggagaggaagcggggcgatggttactcggtgattgggctggagcagacggccaacagcatgcctctggaccggttcgggttcccggaccggacggttctggtgctggggcgggagaaggaaggcatccccgtcgacatcatccacattctggacgcgtgcgtggagatcccgcagctggggcgtggtgaggtcgctcaatgtccatgtcagcggcgccatagccgtctgggagtacacgcgtcaacaacgcaatcagcgttagcttgttgcttgtttttgctccattgaccattgacgacgaagactactactactacctgggagggagagtagaaatcaacatgcagcactcacaggaaggagagaaagacctgggctgggctgggccgacagtaatgaacgctagcccaccttcctttcccaccaccaagacgtacaagtcagactatattacttcatttatttgtgctaatatcgtaacgttttattgtgtaagcaatttggtacttgaagcctgcctgcatttggatttggagcggcatcagaagttttttaaagtatttattcgtagaggggtcgatcgagctcgcccttttattgctgcaaatatataatacacattattactgctgcaaacataagattacgttacattacattaaatgaaaagctatattacctcccgttctcgttatcccgctagttcatttttaacgaaacagtgacaaatatgaactaaacagcaacaaataaaaagaaacggaggggtactacgcttttttttatttcagtgcgcgcgtgtctgctccagacggtgctgctgcgcccagtccttgacgatgtgcggctgctgacccgacgacgaggtcgtggtctgaaggtagcggtacacccacgccagcacagccaccgcagccacgccgaaccctcccgacgaaacgatgcctaccgtgagcagcgccaccgtgatggccgccggcaccagcacggggctgaagatcaccatcaatggcgtcgccacgatgagcgccagcaccgtgcccgtcaccgccagccccgacaacaacaacatggagaaggctgccgtggctgtggctaacgccttggccaccgccatgggcgcgggcggcggccgctgctgctgctggtgaccgtagtgggtggcgttgtagtcatcgtcgccgtagaggcccctcatgtagttctctccgacggcctcgcttcttctccctgcacgatggtcatccgcatgatgagcagtggccatacaagctctggctagctagctagctagtatacaatgattcaaaagaaatagatgagtggagcagctagtaggttcttg

SEQ ID NO: 6097 - DNA, 6623 bp, Zea Mays
cgcttcgctgccgccatggcgtctcctcccgagcgtgaggtcgccgcactcgagagctgcttccgtgccctctccgcggctgacgccgtcccagcggttgtcgactgcgtcctcgcttcctccgcctcgtcctccccttcccaactcttccacgcgctcctccgttcctttcctccctcccagtctgaccgtcatgccgccatctgccacgccgcggcgctccgccatttgctcgcgcaactcgacagcccccctaaggttagggaggctctgcgcttgctgctgtggagggtcttcctgcccttgctccaggatatcattgaacccactcatcctgcccactttgacctggtaatcgagatgatgtgcaatgcagtctctgacactggatgctgggacctgcttggagctacaatagtatcattctgcattcggtcatctgttgttgccatgggtttgtccgccgcagacgccaactctatactttaccaaagtataatggaagcggattttcctgcggagactctctcatgcctactaccgctctccaattcaagcagtgtgttagcatcattgctggtggacatgctggagaggcgaaggactatacctacctcccaggaaggtgctgctgatctagctgcattggttcagaatttgacatgggaccttgccaagttggtactcaagatgtttacacatgctcaagagtatcggtcttgtgccactcgggtccttcttcagcctgtactcatatcgcttacagatgtttcttctgtcactgtatcgtttggtgcagtccagcataagctatcgaggtttggtttcctagaatgtatatggaattcctgtatttctctatttcctttggggcctggtgagcggcttgatgcatacagaatactctctgtatacttctcaacactgaaatcaggacatcaagccgctgtcttgggagttggcattgtccaggaatttgaccttaagaatgtcagtgaattctgggatgaactgcgcaggggactggttgacaaggattctttagtaaggaaacaggccttctatgtcttgacaatatcacttagcatctttacctcttcatctggaaatgatagctgccagcatttttccagtaggagcccagctgctttgcctgctcaaatcaaagcaaatgctggggaaacaaaaagggaaaggtgggctaacaaagaagccaagtcccttggtgttggagagatggaccaatcaggtgaaaattgctcaaatggtcaagatcggtggaaggtctttttgttactctatgagatgctccaggagtatggcacacatttagttgaagcagcttggacacaccatgtagtgcggctgtttgagtgtacgctacaaaatgactatctaaatcacacctcctgtggagcctttcatgctcagatggaatcttgggaaagaattttgtactggatggcagttttgtgggagcgtgggttcagtcatgagaatcctcaagtgagatgcctggttatgcaatcctttttggatattgcatgggaacgctacaaggtttgcactcatataattccaaggggttttgtgctcggccctctgatacgtggtttgaatgatgtggttcatcataaggattttggcattgggggtgcttatagttcgaaaaccataaaagatgctcagagatttttcagaacttatacccacaacttggcgagatgatcactgctacatgtacgactacaatggtagactcaagtacgactaaggtcatctaatggctcatcattcattagttcagaataagaggcaacaacatctatagattacgttggtcgtactccagtcgtacggtgaccgcatacatctggtttggagtctggcttctgcggctaagcaagattcatttggccgagcaggattgatgactcttgcatcctgtgttgcttcatgcacacgtcagtcagagacaaatgatgtgccatgtgctatatctgggaaagcagtgaccaaatgtgatggatgtgtacctacagaagttaggccaacagatttgttagatgtcttatggattctcagtgagaggagtaaacaacactttaatccaaagtatcgtctgaaagtttgtgaacaggttatccaagttgcaacatcactgataaatgccactgaaattccacttaaccagcttctgcatttcattgccacaattcctcgagagttcactgattatattggaccattgagagtagtagttcaaaaatggttttttcagaaggaagaatgttctcctggtgacactttgttgagtaagctgatcgatttctctgccaccttcgtaagtcaaaaacggaatgaaggttcgaatgtttttgatgacgaggatgtggatgcatgggaagctgaagcaaggaggtgggctagaacccttcttcttgtaaccgaggaggaggaacatttgaaacgaatcttcaggtttttggaggcatatggctacaagctctctgagcaatgtcccagtggagatttcatacccataaaattttttatcattgttttaagcttcattgaggaacttgagctgagacagagaaagcttgtttgccggagtaatacaatcttaagaggttcagatacattaaatggattagtgctcgatgatctcaacaaaatgttcacagaatcacttttgctaattttggaaaatatggtggcattcagtaaactgtcttgctccattttctggttagatgtggacaacaaggatttacccccttctatcaaaggaaagcttggaggcccaagccagcgtcgtttggctacctccattacttcttcagtattacagggtatttggtcaatgcgatgtgttagttctgttgcctcatggtgtaatccttacaactccgatgattctgtttcttctgcattttccgtgctatgggacttctatttgaatgttacccatcactccactattgccaatgagatcggagctgaacttcacctggcagcttatgaagctcttgcctatgttctggcagttctatctactgcttccagtactcagtttttggattttgtggaagcgaagcagacagatcaagcccacaagttttcattggacattttggtcaccactttccttgacaacatcaaccatcttcttacagagggaactctgacgcgaagcagaagagctgttttgatgacttggaagtggctttgtatggattctcttctatctatttcaagctgctatagtgacaatgaatctcaaatgaagaggttggaacctttattttctgattcaaccctccgatgcatttttcttgatattatcgaaagccttgaaaacactggtgaaaattctgtcttatctatcttgagatgtgtgagatctgttttgagattgctacacctgaatgagggcaacacaattttttcctctttaggcatcagctatgagatgatgatgcaattagcaaagtcttcctggatcttgcaccttaactgcaacaaacgccgagtggctcccattgctgcactactatctgcagtattgcacccagcaatattttgtaatttggaaatgcaccagacaaatgaaaaagggccaggccctttaaaatggtttgttgagaatcttcttaatgaaggctcaaaaagtcctcgaactattcgcctagcagctttgcatttaagtggtctatggttgatgtacccaaaaactcttagattttatatggaggaactgaagctgctctcgttatacggatctgtggcattcgacgaagattttgaagctgaactctctgaaaaccatgaagcaagatttgaggtttccatgctagcacaaagtcctgatcgtgaattcacagaggtgttcattaatacagaattatatgctcgtgtttcggttgctgttctctttcatcagctttggaaacaaatcaaagaacatagtatattggaaactgaagaagctcttgaatgcggcaaactatttctactagaacttctggactcagcggtgaacagcaaagatctttcaaaagaactctacaagaaatatagcagtgtacataggcgtaaagttcgtgtgtggcaaatgatatgtgttctatcacactatgtagaagatgatattgttggagaagtgacatctagcattcacatctgtctttatagaaataatttgccagctgtccggcagtacttggagacgtttgctatactcttatacttaaaatttccaaccttggcagaggagcaacttattcctatttttcatgacaaagggatgcgacaacaggcactatcttcatatgtttttatagcagcaaacgtcatacttcactcaagacagtccgtccagatataccacctgaatcaattgcttcctccaatactgccgtttttaacatcccatcatcacagtttacgtggttttactcagcttcttgtccattcagtgctatcgaggttgtggcctactctgcatcccgaaacttcagaagatgcagtctttgagaggaggtgctttcaagaattgaaagattatttggcagaaaattctgactgtgttaggcttagagtttcaatcgaaggtttccttgatgtctttgatcccaatgcatctgggaccccccctggaatatttagcgcccgtcctgaggtgtctgacttcgaatgtgttccggtgtcagtgatggagcgtgtgattgagttcctgaacgatgtgagggaggacttgagacaagctatagcaaatgatacagtaacaatcaagaatgaggatctcgcggtgggagagcatcacaagagtgacgagagcgtgtctgagatggtaaaaactggtcaagaggtacttgatttccagaagaaaataacaccccataggggggactccgagcaagcattgaacttgaacaccagaggtcattcaggcgttggtgacgaatacatttcaagaataatttcagagatggaggaagatgaccaagttttcgacctagcgctagaagcaagattgcatgctgcggaaacgatcaagcagagccggcaagaactgatcgtggttgcgtcattggtggaacgcataccaaatcttgcggggctgacgagaacgtgcgaggtcttcagagcagccggtctggttgttgccgacaagagcgttcttcaggataagcagttccggctgatcagtgtgaccgctgagaaatggctgcctgtgacggaggtccccgtggacagcgtgaaggcttacttggagaggaagcggggcgatggttactcggtgattgggctggagcagacggccaacagcatgcctctggaccggttcgggttcccggaccggacggttctggtgctggggcgggagaaggaaggcatccccgtcgacatcatccacattctggacgcgtgcgtggagatcccgcagctggggcgtggtgaggtcgctcaatgtccatgtcagcggcgccatagccgtctgggagtacacgcgtcaacaacgcaatcagcgttagcttgttgcttgtttttgctccattgaccattgacgacgaagactactactactacctgggagggagagtagaaatcaacatgcagcactcacaggaaggagagaaagacctgggctgggctgggccgacagtaatgaacgctagcccaccttcctttcccaccaccaagacgtacaagtcagactatattacttcatttatttgtgctaatatcgtaacgttttattgtgtaagcaatttggtacttgaagcctgcctgcatttggatttggagcggcatcagaagttttttaaagtatttattcgtagaggggtcgatcgagctcgcccttttattgctgcaaatatataatacacattattactgctgcaaacataagattacgttacattacattaaatgaaaagctatattacctcccgttctcgttatcccgctagttcatttttaacgaaacagtgacaaatatgaactaaacagcaacaaataaaaagaaacggaggggtactacgcttttttttatttcagtgcgcgcgtgtctgctccagacggtgctgctgcgcccagtccttgacgatgtgcggctgctgacccgacgacgaggtcgtggtctgaaggtagcggtacacccacgccagcacagccaccgcagccacgccgaaccctcccgacgaaacgatgcctaccgtgagcagcgccaccgtgatggccgccggcaccagcacggggctgaagatcaccatcaatggcgtcgccacgatgagcgccagcaccgtgcccgtcaccgccagccccgacaacaacaacatggagaaggctgccgtggctgtggctaacgccttggccaccgccatgggcgcgggcggcggccgctgctgctgctggtgaccgtagtgggtggcgttgtagtcatcgtcgccgtagaggcccctcatgtagttctctccgacggcctcgcttcttctccctgcacgatggtcatccgcatgatgagcagtggccatacaagctctggctagctagctagctagtatacaatgattcaaaagaaatagatgagtggagcagctagtaggttcttg

SEQ ID NO: 6098 - DNA, 6498 bp, Zea Mays
cttcgcttcgctgccgccatggcgtctcctcccgagcgtgaggtcgccgcactcgagagctgcttccgtgccctctccgcggctgacgccgtcccagcggttgtcgactgcgtcctcgcttcctccgcctcgtcctccccttcccaactcttccacgcgctcctccgttcctttcctccctcccagtctgaccgtcatgccgccatctgccacgccgcggcgctccgccatttgctcgcgcaactcgacagcccccctaaggttagggaggctctgcgcttgctgctgtggagggtcttcctgcccttgctccaggatatcattgaacccactcatcctgcccactttgacctggtaatcgagatgatgtgcaatgcagtctctgacactggatgctgggacctgcttggagctacaatagtatcattctgcattcggtcatctgttgttgccatgggtttgtccgccgcagacgccaactctatactttaccaaagtataatggaagcggattttcctgcggagactctctcatgcctactaccgctctccaattcaagcagtgtgttagcatcattgctggtggacatgctggagaggcgaaggactatacctacctcccaggaaggtgctgctgatctagctgcattggttcagaatttgacatgggaccttgccaagttggtactcaagatgtttacacatgctcaagagtatcggtcttgtgccactcgggtccttcttcagcctgtactcatatcgcttacagatgtttcttctgtcactgtatcgtttggtgcagtccagcataagctatcgaggtttggtttcctagaatgtatatggaattcctgtatttctctatttcctttggggcctggtgagcggcttgatgcatacagaatactctctgtatacttctcaacactgaaatcaggacatcaagccgctgtcttgggagttggcattgtccaggaatttgaccttaagaatgtcagtgaattctgggatgaactgcgcaggggactggttgacaaggattctttagtaaggaaacaggccttctatgtcttgacaatatcacttagcatctttacctcttcatctggaaatgatagctgccagcatttttccagtaggagcccagctgctttgcctgctcaaatcaaagcaaatgctggggaaacaaaaagggaaaggtgggctaacaaagaagccaagtcccttggtgttggagagatggaccaatcaggtgaaaattgctcaaatggtcaagatcggtggaaggtctttttgttactctatgagatgctccaggagtatggcacacatttagttgaagcagcttggacacaccatgtagtgcggctgtttgagtgtacgctacaaaatgactatctaaatcacacctcctgtggagcctttcatgctcagatggaatcttgggaaagaattttgtactggatggcagttttgtgggagcgtgggttcagtcatgagaatcctcaagtgagatgcctggttatgcaatcctttttggatattgcatgggaacgctacaaggtttgcactcatataattccaaggggttttgtgctcggccctctgatacgtggtttgaatgatgtggttcatcataaggattttggcattgggggtgcttatagttcgaaaaccataaaagatgctcagagatttttcagaacttatacccacaacttggcgagatgtgaccgcatacatctggtttggagtctggcttctgcggctaagcaagattcatttggccgagcaggattgatgactcttgcatcctgtgttgcttcatgcacacgtcagtcagagacaaatgatgtgccatgtgctatatctgggaaagcagtgaccaaatgtgatggatgtgtacctacagaagttaggccaacagatttgttagatgtcttatggattctcagtgagaggagtaaacaacactttaatccaaagtatcgtctgaaagtgcagtttgtgaacaggttatccaagttgcaacatcactgataaatgccactgaaattccacttaaccagcttctgcatttcattgccacaattcctcgagagttcactgattatattggaccattgagagtagtagttcaaaaatggttttttcagaaggaagaatgttctcctggtgacactttgttgagtaagctgatcgatttctctgccaccttcgtaagtcaaaaacggaatgaaggttcgaatgtttttgatgacgaggatgtggatgcatgggaagctgaagcaaggaggtgggctagaacccttcttcttgtaaccgaggaggaggaacatttgaaacgaatcttcaggtttttggaggcatatggctacaagctctctgagcaatgtcccagtggagatttcatacccataaaattttttatcattgttttaagcttcattgaggaacttgagctgagacagagaaagcttgtttgccggagtaatacaatcttaagaggttcagatacattaaatggattagtgctcgatgatctcaacaaaatgttcacagaatcacttttgctaattttggaaaatatggtggcattcagtaaactgtcttgctccattttctggttagatgtggacaacaaggatttacccccttctatcaaaggaaagcttggaggcccaagccagcgtcgtttggctacctccattacttcttcagtattacagggtatttggtcaatgcgatgtgttagttctgttgcctcatggtgtaatccttacaactccgatgattctgtttcttctgcattttccgtgctatgggacttctatttgaatgttacccatcactccactattgccaatgagatcggagctgaacttcacctggcagcttatgaagctcttgcctatgttctggcagttctatctactgcttccagtactcagtttttggattttgtggaagcgaagcagacagatcaagcccacaagttttcattggacattttggtcaccactttccttgacaacatcaaccatcttcttacagagggaactctgacgcgaagcagaagagctgttttgatgacttggaagtggctttgtatggattctcttctatctatttcaagctgctatagtgacaatgaatctcaaatgaagaggttggaacctttattttctgattcaaccctccgatgcatttttcttgatattatcgaaagccttgaaaacactggtgaaaattctgtcttatctatcttgagatgtgtgagatctgttttgagattgctacacctgaatgagggcaacacaattttttcctctttaggcatcagctatgagatgatgatgcaattagcaaagtcttcctggatcttgcaccttaactgcaacaaacgccgagtggctcccattgctgcactactatctgcagtattgcacccagcaatattttgtaatttggaaatgcaccagacaaatgaaaaagggccaggccctttaaaatggtttgttgagaatcttcttaatgaaggctcaaaaagtcctcgaactattcgcctagcagctttgcatttaagtggtctatggttgatgtacccaaaaactcttagattttatatggaggaactgaagctgctctcgttatacggatctgtggcattcgacgaagattttgaagctgaactctctgaaaaccatgaagcaagatttgaggtttccatgctagcacaaagtcctgatcgtgaattcacagaggtgttcattaatacagaattatatgctcgtgtttcggttgctgttctctttcatcagctttggaaacaaatcaaagaacatagtatattggaaactgaagaagctcttgaatgcggcaaactatttctactagaacttctggactcagcggtgaacagcaaagatctttcaaaagaactctacaagaaatatagcagtgtacataggcgtaaagttcgtgtgtggcaaatgatatgtgttctatcacactatgtagaagatgatattgttggagaagtgacatctagcattcacatctgtctttatagaaataatttgccagctgtccggcagtacttggagacgtttgctatactcttatacttaaaatttccaaccttggcagaggagcaacttattcctatttttcatgacaaagggatgcgacaacaggcactatcttcatatgtttttatagcagcaaacgtcatacttcactcaagacagtccgtccagatataccacctgaatcaattgcttcctccaatactgccgtttttaacatcccatcatcacagtttacgtggttttactcagcttcttgtccattcagtgctatcgaggttgtggcctactctgcatcccgaaacttcagaagatgcagtctttgagaggaggtgctttcaagaattgaaagattatttggcagaaaattctgactgtgttaggcttagagtttcaatcgaaggtttccttgatgtctttgatcccaatgcatctgggaccccccctggaatatttagcgcccgtcctgaggtgtctgacttcgaatgtgttccggtgtcagtgatggagcgtgtgattgagttcctgaacgatgtgagggaggacttgagacaagctatagcaaatgatacagtaacaatcaagaatgaggatctcgcggtgggagagcatcacaagagtgacgagagcgtgtctgagatggtaaaaactggtcaagaggtacttgatttccagaagaaaataacaccccataggggggactccgagcaagcattgaacttgaacaccagaggtcattcaggcgttggtgacgaatacatttcaagaataatttcagagatggaggaagatgaccaagttttcgacctagcgctagaagcaagattgcatgctgcggaaacgatcaagcagagccggcaagaactgatcgtggttgcgtcattggtggaacgcataccaaatcttgcggggctgacgagaacgtgcgaggtcttcagagcagccggtctggttgttgccgacaagagcgttcttcaggataagcagttccggctgatcagtgtgaccgctgagaaatggctgcctgtgacggaggtccccgtggacagcgtgaaggcttacttggagaggaagcggggcgatggttactcggtgattgggctggagcagacggccaacagcatgcctctggaccggttcgggttcccggaccggacggttctggtgctggggcgggagaaggaaggcatccccgtcgacatcatccacattctggacgcgtgcgtggagatcccgcagctggggcgtggtgaggtcgctcaatgtccatgtcagcggcgccatagccgtctgggagtacacgcgtcaacaacgcaatcagcgttagcttgttgcttgtttttgctccattgaccattgacgacgaagactactactactacctgggagggagagtagaaatcaacatgcagcactcacaggaaggagagaaagacctgggctgggctgggccgacagtaatgaacgctagcccaccttcctttcccaccaccaagacgtacaagtcagactatattacttcatttatttgtgctaatatcgtaacgttttattgtgtaagcaatttggtacttgaagcctgcctgcatttggatttggagcggcatcagaagttttttaaagtatttattcgtagaggggtcgatcgagctcgcccttttattgctgcaaatatataatacacattattactgctgcaaacataagattacgttacattacattaaatgaaaagctatattacctcccgttctcgttatcccgctagttcatttttaacgaaacagtgacaaatatgaactaaacagcaacaaataaaaagaaacggaggggtactacgcttttttttatttcagtgcgcgcgtgtctgctccagacggtgctgctgcgcccagtccttgacgatgtgcggctgctgacccgacgacgaggtcgtggtctgaaggtagcggtacacccacgccagcacagccaccgcagccacgccgaaccctcccgacgaaacgatgcctaccgtgagcagcgccaccgtgatggccgccggcaccagcacggggctgaagatcaccatcaatggcgtcgccacgatgagcgccagcaccgtgcccgtcaccgccagccccgacaacaacaacatggagaaggctgccgtggctgtggctaacgccttggccaccgccatgggcgcgggcggcggccgctgctgctgctggtgaccgtagtgggtggcgttgtagtcatcgtcgccgtagaggcccctcatgtagttctctccgacggcctcgcttcttctccctgcacgatggtcatccgcatgatgagcagtggccatacaagctctggctagctagctagctagtatacaatgattcaaaagaaatagatgagtggagcagctagtaggttcttg

SEQ ID NO: 6099 - DNA, 6480 bp, Zea Mays
gtcttcgcttcgctgccgccatggcgtctcctcccgagcgtgaggtcgccgcactcgagagctgcttccgtgccctctccgcggctgacgccgtcccagcggttgtcgactgcgtcctcgcttcctccgcctcgtcctccccttcccaactcttccacgcgctcctccgttcctttcctccctcccagtctgaccgtcatgccgccatctgccacgccgcggcgctccgccatttgctcgcgcaactcgacagcccccctaaggttagggaggctctgcgcttgctgctgtggagggtcttcctgcccttgctccaggatatcattgaacccactcatcctgcccactttgacctggtaatcgagatgatgtgcaatgcagtctctgacactggatgctgggacctgcttggagctacaatagtatcattctgcattcggtcatctgttgttgccatgggtttgtccgccgcagacgccaactctatactttaccaaagtataatggaagcggattttcctgcggagactctctcatgcctactaccgctctccaattcaagcagtgtgttagcatcattgctggtggacatgctggagaggcgaaggactatacctacctcccaggaaggtgctgctgatctagctgcattggttcagaatttgacatgggaccttgccaagttggtactcaagatgtttacacatgctcaagagtatcggtcttgtgccactcgggtccttcttcagcctgtactcatatcgcttacagatgtttcttctgtcactgtatcgtttggtgcagtccagcataagctatcgaggtttggtttcctagaatgtatatggaattcctgtatttctctatttcctttggggcctggtgagcggcttgatgcatacagaatactctctgtatacttctcaacactgaaatcaggacatcaagccgctgtcttgggagttggcattgtccaggaatttgaccttaagaatgtcagtgaattctgggatgaactgcgcaggggactggttgacaaggattctttagtaaggaaacaggccttctatgtcttgacaatatcacttagcatctttacctcttcatctggaaatgatagctgccagcatttttccagtaggagcccagctgctttgcctgctcaaatcaaagcaaatgctggggaaacaaaaagggaaaggtgggctaacaaagaagccaagtcccttggtgttggagagatggaccaatcaggtgaaaattgctcaaatggtcaagatcggtggaaggtctttttgttactctatgagatgctccaggagtatggcacacatttagttgaagcagcttggacacaccatgtagtgcggctgtttgagtgtacgctacaaaatgactatctaaatcacacctcctgtggagcctttcatgctcagatggaatcttgggaaagaattttgtactggatggcagttttgtgggagcgtgggttcagtcatgagaatcctcaagtgagatgcctggttatgcaatcctttttggatattgcatgggaacgctacaaggtttgcactcatataattccaaggggttttgtgctcggccctctgatacgtggtttgaatgatgtggttcatcataaggattttggcattgggggtgcttatagttcgaaaaccataaaagatgctcagagatttttcagaacttatacccacaacttggcgagatgtgaccgcatacatctggtttggagtctggcttctgcggctaagcaagattcatttggccgagcaggattgatgactcttgcatcctgtgttgcttcatgcacacgtcagtcagagacaaatgatgtgccatgtgctatatctgggaaagcagtgaccaaatgtgatggatgtgtacctacagaagttaggccaacagatttgttagatgtcttatggattctcagtgagaggagtaaacaacactttaatccaaagtatcgtctgaaagtttgtgaacaggttatccaagttgcaacatcactgataaatgccactgaaattccacttaaccagcttctgcatttcattgccacaattcctcgagagttcactgattatattggaccattgagagtagtagttcaaaaatggttttttcagaaggaagaatgttctcctggtgacactttgttgagtaagctgatcgatttctctgccaccttcgtaagtcaaaaacggaatgaaggttcgaatgtttttgatgacgaggatgtggatgcatgggaagctgaagcaaggaggtgggctagaacccttcttcttgtaaccgaggaggaggaacatttgaaacgaatcttcaggtttttggaggcatatggctacaagctctctgagcaatgtcccagtggagatttcatacccataaaattttttatcattgttttaagcttcattgaggaacttgagctgagacagagaaagcttgtttgccggagtaatacaatcttaagaggttcagatacattaaatggattagtgctcgatgatctcaacaaaatgttcacagaatcacttttgctaattttggaaaatatggtggcattcagtaaactgtcttgctccattttctggttagatgtggacaacaaggatttacccccttctatcaaaggaaagcttggaggcccaagccagcgtcgtttggctacctccattacttcttcagtattacagggtatttggtcaatgcgatgtgttagttctgttgcctcatggtgtaatccttacaactccgatgattctgtttcttctgcattttccgtgctatgggacttctatttgaatgttacccatcactccactattgccaatgagatcggagctgaacttcacctggcagcttatgaagctcttgcctatgttctggcagttctatctactgcttccagtactcagtttttggattttgtggaagcgaagcagacagatcaagcccacaagttttcattggacattttggtcaccactttccttgacaacatcaaccatcttcttacagagggaactctgacgcgaagcagaagagctgttttgatgacttggaagtggctttgtatggattctcttctatctatttcaagctgctatagtgacaatgaatctcaaatgaagaggttggaacctttattttctgattcaaccctccgatgcatttttcttgatattatcgaaagccttgaaaacactggtgaaaattctgtcttatctatcttgagatgtgtgagatctgttttgagattgctacacctgaatgagggcaacacaattttttcctctttaggcatcagctatgagatgatgatgcaattagcaaagtcttcctggatcttgcaccttaactgcaacaaacgccgagtggctcccattgctgcactactatctgcagtattgcacccagcaatattttgtaatttggaaatgcaccagacaaatgaaaaagggccaggccctttaaaatggtttgttgagaatcttcttaatgaaggctcaaaaagtcctcgaactattcgcctagcagctttgcatttaagtggtctatggttgatgtacccaaaaactcttagattttatatggaggaactgaagctgctctcgttatacggatctgattttgaagctgaactctctgaaaaccatgaagcaagatttgaggtttccatgctagcacaaagtcctgatcgtgaattcacagaggtgttcattaatacagaattatatgctcgtgtttcggttgctgttctctttcatcagctttggaaacaaatcaaagaacatagtatattggaaactgaagaagctcttgaatgcggcaaactatttctactagaacttctggactcagcggtgaacagcaaagatctttcaaaagaactctacaagaaatatagcagtgtacataggcgtaaagttcgtgtgtggcaaatgatatgtgttctatcacactatgtagaagatgatattgttggagaagtgacatctagcattcacatctgtctttatagaaataatttgccagctgtccggcagtacttggagacgtttgctatactcttatacttaaaatttccaaccttggcagaggagcaacttattcctatttttcatgacaaagggatgcgacaacaggcactatcttcatatgtttttatagcagcaaacgtcatacttcactcaagacagtccgtccagatataccacctgaatcaattgcttcctccaatactgccgtttttaacatcccatcatcacagtttacgtggttttactcagcttcttgtccattcagtgctatcgaggttgtggcctactctgcatcccgaaacttcagaagatgcagtctttgagaggaggtgctttcaagaattgaaagattatttggcagaaaattctgactgtgttaggcttagagtttcaatcgaaggtttccttgatgtctttgatcccaatgcatctgggaccccccctggaatatttagcgcccgtcctgaggtgtctgacttcgaatgtgttccggtgtcagtgatggagcgtgtgattgagttcctgaacgatgtgagggaggacttgagacaagctatagcaaatgatacagtaacaatcaagaatgaggatctcgcggtgggagagcatcacaagagtgacgagagcgtgtctgagatggtaaaaactggtcaagaggtacttgatttccagaagaaaataacaccccataggggggactccgagcaagcattgaacttgaacaccagaggtcattcaggcgttggtgacgaatacatttcaagaataatttcagagatggaggaagatgaccaagttttcgacctagcgctagaagcaagattgcatgctgcggaaacgatcaagcagagccggcaagaactgatcgtggttgcgtcattggtggaacgcataccaaatcttgcggggctgacgagaacgtgcgaggtcttcagagcagccggtctggttgttgccgacaagagcgttcttcaggataagcagttccggctgatcagtgtgaccgctgagaaatggctgcctgtgacggaggtccccgtggacagcgtgaaggcttacttggagaggaagcggggcgatggttactcggtgattgggctggagcagacggccaacagcatgcctctggaccggttcgggttcccggaccggacggttctggtgctggggcgggagaaggaaggcatccccgtcgacatcatccacattctggacgcgtgcgtggagatcccgcagctggggcgtggtgaggtcgctcaatgtccatgtcagcggcgccatagccgtctgggagtacacgcgtcaacaacgcaatcagcgttagcttgttgcttgtttttgctccattgaccattgacgacgaagactactactactacctgggagggagagtagaaatcaacatgcagcactcacaggaaggagagaaagacctgggctgggctgggccgacagtaatgaacgctagcccaccttcctttcccaccaccaagacgtacaagtcagactatattacttcatttatttgtgctaatatcgtaacgttttattgtgtaagcaatttggtacttgaagcctgcctgcatttggatttggagcggcatcagaagttttttaaagtatttattcgtagaggggtcgatcgagctcgcccttttattgctgcaaatatataatacacattattactgctgcaaacataagattacgttacattacattaaatgaaaagctatattacctcccgttctcgttatcccgctagttcatttttaacgaaacagtgacaaatatgaactaaacagcaacaaataaaaagaaacggaggggtactacgcttttttttatttcagtgcgcgcgtgtctgctccagacggtgctgctgcgcccagtccttgacgatgtgcggctgctgacccgacgacgaggtcgtggtctgaaggtagcggtacacccacgccagcacagccaccgcagccacgccgaaccctcccgacgaaacgatgcctaccgtgagcagcgccaccgtgatggccgccggcaccagcacggggctgaagatcaccatcaatggcgtcgccacgatgagcgccagcaccgtgcccgtcaccgccagccccgacaacaacaacatggagaaggctgccgtggctgtggctaacgccttggccaccgccatgggcgcgggcggcggccgctgctgctgctggtgaccgtagtgggtggcgttgtagtcatcgtcgccgtagaggcccctcatgtagttctctccgacggcctcgcttcttctccctgcacgatggtcatccgcatgatgagcagtggccatacaagctctggctagctagctagctagtatacaatgattcaaaagaaatagatgagtggagcagctagtaggttcttg

SEQ ID NO: 6100 - DNA, 6660 bp, Zea Mays
ccggtcttcgcttcgctgccgccatggcgtctcctcccgagcgtgaggtcgccgcactcgagagctgcttccgtgccctctccgcggctgacgccgtcccagcggttgtcgactgcgtcctcgcttcctccgcctcgtcctccccttcccaactcttccacgcgctcctccgttcctttcctccctcccagcgggagcagggtctccaagcccagtctgaccgtcatgccgccatctgccacgccgcggcgctccgccatttgctcgcgcaactcgacagcccccctaaggttagggaggctctgcgcttgctgctgtggagggtcttcctgcccttgctccaggatatcattgaacccactcatcctgcccactttgacctggtaatcgagatgatgtgcaatgcagtctctgacactggatgctgggacctgcttggagctacaatagtatcattctgcattcggtcatctgttgttgccatgggtttgtccgccgcagacgccaactctatactttaccaaagtataatggaagcggattttcctgcggagactctctcatgcctactaccgctctccaattcaagcagtgtgttagcatcattgctggtggacatgctggagaggcgaaggactatacctacctcccaggaaggtgctgctgatctagctgcattggttcagaatttgacatgggaccttgccaagttggtactcaagatgtttacacatgctcaagagtatcggtcttgtgccactcgggtccttcttcagcctgtactcatatcgcttacagatgtttcttctgtcactgtatcgtttggtgcagtccagcataagctatcgaggtttggtttcctagaatgtatatggaattcctgtatttctctatttcctttggggcctggtgagcggcttgatgcatacagaatactctctgtatacttctcaacactgaaatcaggacatcaagccgctgtcttgggagttggcattgtccaggaatttgaccttaagaatgtcagtgaattctgggatgaactgcgcaggggactggttgacaaggattctttagtaaggaaacaggccttctatgtcttgacaatatcacttagcatctttacctcttcatctggaaatgatagctgccagcatttttccagtaggagcccagctgctttgcctgctcaaatcaaagcaaatgctggggaaacaaaaagggaaaggtgggctaacaaagaagccaagtcccttggtgttggagagatggaccaatcaggtgaaaattgctcaaatggtcaagatcggtggaaggtctttttgttactctatgagatgctccaggagtatggcacacatttagttgaagcagcttggacacaccatgtagtgcggctgtttgagtgtacgctacaaaatgactatctaaatcacacctcctgtggagcctttcatgctcagatggaatcttgggaaagaattttgtactggatggcagttttgtgggagcgtgggttcagtcatgagaatcctcaagtgagatgcctggttatgcaatcctttttggatattgcatgggaacgctacaaggtttgcactcatataattccaaggggttttgtgctcggccctctgatacgtggtttgaatgatgtggttcatcataaggattttggcattgggggtgcttatagttcgaaaaccataaaagatgctcagagatttttcagaacttatacccacaacttggcgagatgatcactgctacatgtacgactacaatggtagactcaagtacgactaaggtcatctaatggctcatcattcattagttcagaataagaggcaacaacatctatagattacgttggtcgtactccagtcgtacggtgaccgcatacatctggtttggagtctggcttctgcggctaagcaagattcatttggccgagcaggattgatgactcttgcatcctgtgttgcttcatgcacacgtcagtcagagacaaatgatgtgccatgtgctatatctgggaaagcagtgaccaaatgtgatggatgtgtacctacagaagttaggccaacagatttgttagatgtcttatggattctcagtgagaggagtaaacaacactttaatccaaagtatcgtctgaaagtgcagtttgtgaacaggttatccaagttgcaacatcactgataaatgccactgaaattccacttaaccagcttctgcatttcattgccacaattcctcgagagttcactgattatattggaccattgagagtagtagttcaaaaatggttttttcagaaggaagaatgttctcctggtgacactttgttgagtaagctgatcgatttctctgccaccttcgtaagtcaaaaacggaatgaaggttcgaatgtttttgatgacgaggatgtggatgcatgggaagctgaagcaaggaggtgggctagaacccttcttcttgtaaccgaggaggaggaacatttgaaacgaatcttcaggtttttggaggcatatggctacaagctctctgagcaatgtcccagtggagatttcatacccataaaattttttatcattgttttaagcttcattgaggaacttgagctgagacagagaaagcttgtttgccggagtaatacaatcttaagaggttcagatacattaaatggattagtgctcgatgatctcaacaaaatgttcacagaatcacttttgctaattttggaaaatatggtggcattcagtaaactgtcttgctccattttctggttagatgtggacaacaaggatttacccccttctatcaaaggaaagcttggaggcccaagccagcgtcgtttggctacctccattacttcttcagtattacagggtatttggtcaatgcgatgtgttagttctgttgcctcatggtgtaatccttacaactccgatgattctgtttcttctgcattttccgtgctatgggacttctatttgaatgttacccatcactccactattgccaatgagatcggagctgaacttcacctggcagcttatgaagctcttgcctatgttctggcagttctatctactgcttccagtactcagtttttggattttgtggaagcgaagcagacagatcaagcccacaagttttcattggacattttggtcaccactttccttgacaacatcaaccatcttcttacagagggaactctgacgcgaagcagaagagctgttttgatgacttggaagtggctttgtatggattctcttctatctatttcaagctgctatagtgacaatgaatctcaaatgaagaggttggaacctttattttctgattcaaccctccgatgcatttttcttgatattatcgaaagccttgaaaacactggtgaaaattctgtcttatctatcttgagatgtgtgagatctgttttgagattgctacacctgaatgagggcaacacaattttttcctctttaggcatcagctatgagatgatgatgcaattagcaaagtcttcctggatcttgcaccttaactgcaacaaacgccgagtggctcccattgctgcactactatctgcagtattgcacccagcaatattttgtaatttggaaatgcaccagacaaatgaaaaagggccaggccctttaaaatggtttgttgagaatcttcttaatgaaggctcaaaaagtcctcgaactattcgcctagcagctttgcatttaagtggtctatggttgatgtacccaaaaactcttagattttatatggaggaactgaagctgctctcgttatacggatctgtggcattcgacgaagattttgaagctgaactctctgaaaaccatgaagcaagatttgaggtttccatgctagcacaaagtcctgatcgtgaattcacagaggtgttcattaatacagaattatatgctcgtgtttcggttgctgttctctttcatcagctttggaaacaaatcaaagaacatagtatattggaaactgaagaagctcttgaatgcggcaaactatttctactagaacttctggactcagcggtgaacagcaaagatctttcaaaagaactctacaagaaatatagcagtgtacataggcgtaaagttcgtgtgtggcaaatgatatgtgttctatcacactatgtagaagatgatattgttggagaagtgacatctagcattcacatctgtctttatagaaataatttgccagctgtccggcagtacttggagacgtttgctatactcttatacttaaaatttccaaccttggcagaggagcaacttattcctatttttcatgacaaagggatgcgacaacaggcactatcttcatatgtttttatagcagcaaacgtcatacttcactcaagacagtccgtccagatataccacctgaatcaattgcttcctccaatactgccgtttttaacatcccatcatcacagtttacgtggttttactcagcttcttgtccattcagtgctatcgaggttgtggcctactctgcatcccgaaacttcagaagatgcagtctttgagaggaggtgctttcaagaattgaaagattatttggcagaaaattctgactgtgttaggcttagagtttcaatcgaaggtttccttgatgtctttgatcccaatgcatctgggaccccccctggaatatttagcgcccgtcctgaggtgtctgacttcgaatgtgttccggtgtcagtgatggagcgtgtgattgagttcctgaacgatgtgagggaggacttgagacaagctatagcaaatgatacagtaacaatcaagaatgaggatctcgcggtgggagagcatcacaagagtgacgagagcgtgtctgagatggtaaaaactggtcaagaggtacttgatttccagaagaaaataacaccccataggggggactccgagcaagcattgaacttgaacaccagaggtcattcaggcgttggtgacgaatacatttcaagaataatttcagagatggaggaagatgaccaagttttcgacctagcgctagaagcaagattgcatgctgcggaaacgatcaagcagagccggcaagaactgatcgtggttgcgtcattggtggaacgcataccaaatcttgcggggctgacgagaacgtgcgaggtcttcagagcagccggtctggttgttgccgacaagagcgttcttcaggataagcagttccggctgatcagtgtgaccgctgagaaatggctgcctgtgacggaggtccccgtggacagcgtgaaggcttacttggagaggaagcggggcgatggttactcggtgattgggctggagcagacggccaacagcatgcctctggaccggttcgggttcccggaccggacggttctggtgctggggcgggagaaggaaggcatccccgtcgacatcatccacattctggacgcgtgcgtggagatcccgcagctggggcgtggtgaggtcgctcaatgtccatgtcagcggcgccatagccgtctgggagtacacgcgtcaacaacgcaatcagcgttagcttgttgcttgtttttgctccattgaccattgacgacgaagactactactactacctgggagggagagtagaaatcaacatgcagcactcacaggaaggagagaaagacctgggctgggctgggccgacagtaatgaacgctagcccaccttcctttcccaccaccaagacgtacaagtcagactatattacttcatttatttgtgctaatatcgtaacgttttattgtgtaagcaatttggtacttgaagcctgcctgcatttggatttggagcggcatcagaagttttttaaagtatttattcgtagaggggtcgatcgagctcgcccttttattgctgcaaatatataatacacattattactgctgcaaacataagattacgttacattacattaaatgaaaagctatattacctcccgttctcgttatcccgctagttcatttttaacgaaacagtgacaaatatgaactaaacagcaacaaataaaaagaaacggaggggtactacgcttttttttatttcagtgcgcgcgtgtctgctccagacggtgctgctgcgcccagtccttgacgatgtgcggctgctgacccgacgacgaggtcgtggtctgaaggtagcggtacacccacgccagcacagccaccgcagccacgccgaaccctcccgacgaaacgatgcctaccgtgagcagcgccaccgtgatggccgccggcaccagcacggggctgaagatcaccatcaatggcgtcgccacgatgagcgccagcaccgtgcccgtcaccgccagccccgacaacaacaacatggagaaggctgccgtggctgtggctaacgccttggccaccgccatgggcgcgggcggcggccgctgctgctgctggtgaccgtagtgggtggcgttgtagtcatcgtcgccgtagaggcccctcatgtagttctctccgacggcctcgcttcttctccctgcacgatggtcatccgcatgatgagcagtggccatacaagctctggctagctagctagctagtatacaatgattcaaaagaaatagatgagtggagcagctagtaggttcttg

SEQ ID NO: 6101 - DNA, 6516 bp, Zea Mays
cgccggtcttcgcttcgctgccgccatggcgtctcctcccgagcgtgaggtcgccgcactcgagagctgcttccgtgccctctccgcggctgacgccgtcccagcggttgtcgactgcgtcctcgcttcctccgcctcgtcctccccttcccaactcttccacgcgctcctccgttcctttcctccctcccagcgggagcagggtctccaagcccagtctgaccgtcatgccgccatctgccacgccgcggcgctccgccatttgctcgcgcaactcgacagcccccctaaggttagggaggctctgcgcttgctgctgtggagggtcttcctgcccttgctccaggatatcattgaacccactcatcctgcccactttgacctggtaatcgagatgatgtgcaatgcagtctctgacactggatgctgggacctgcttggagctacaatagtatcattctgcattcggtcatctgttgttgccatgggtttgtccgccgcagacgccaactctatactttaccaaagtataatggaagcggattttcctgcggagactctctcatgcctactaccgctctccaattcaagcagtgtgttagcatcattgctggtggacatgctggagaggcgaaggactatacctacctcccaggaaggtgctgctgatctagctgcattggttcagaatttgacatgggaccttgccaagttggtactcaagatgtttacacatgctcaagagtatcggtcttgtgccactcgggtccttcttcagcctgtactcatatcgcttacagatgtttcttctgtcactgtatcgtttggtgcagtccagcataagctatcgaggtttggtttcctagaatgtatatggaattcctgtatttctctatttcctttggggcctggtgagcggcttgatgcatacagaatactctctgtatacttctcaacactgaaatcaggacatcaagccgctgtcttgggagttggcattgtccaggaatttgaccttaagaatgtcagtgaattctgggatgaactgcgcaggggactggttgacaaggattctttagtaaggaaacaggccttctatgtcttgacaatatcacttagcatctttacctcttcatctggaaatgatagctgccagcatttttccagtaggagcccagctgctttgcctgctcaaatcaaagcaaatgctggggaaacaaaaagggaaaggtgggctaacaaagaagccaagtcccttggtgttggagagatggaccaatcaggtgaaaattgctcaaatggtcaagatcggtggaaggtctttttgttactctatgagatgctccaggagtatggcacacatttagttgaagcagcttggacacaccatgtagtgcggctgtttgagtgtacgctacaaaatgactatctaaatcacacctcctgtggagcctttcatgctcagatggaatcttgggaaagaattttgtactggatggcagttttgtgggagcgtgggttcagtcatgagaatcctcaagtgagatgcctggttatgcaatcctttttggatattgcatgggaacgctacaaggtttgcactcatataattccaaggggttttgtgctcggccctctgatacgtggtttgaatgatgtggttcatcataaggattttggcattgggggtgcttatagttcgaaaaccataaaagatgctcagagatttttcagaacttatacccacaacttggcgagatgtgaccgcatacatctggtttggagtctggcttctgcggctaagcaagattcatttggccgagcaggattgatgactcttgcatcctgtgttgcttcatgcacacgtcagtcagagacaaatgatgtgccatgtgctatatctgggaaagcagtgaccaaatgtgatggatgtgtacctacagaagttaggccaacagatttgttagatgtcttatggattctcagtgagaggagtaaacaacactttaatccaaagtatcgtctgaaagtttgtgaacaggttatccaagttgcaacatcactgataaatgccactgaaattccacttaaccagcttctgcatttcattgccacaattcctcgagagttcactgattatattggaccattgagagtagtagttcaaaaatggttttttcagaaggaagaatgttctcctggtgacactttgttgagtaagctgatcgatttctctgccaccttcgtaagtcaaaaacggaatgaaggttcgaatgtttttgatgacgaggatgtggatgcatgggaagctgaagcaaggaggtgggctagaacccttcttcttgtaaccgaggaggaggaacatttgaaacgaatcttcaggtttttggaggcatatggctacaagctctctgagcaatgtcccagtggagatttcatacccataaaattttttatcattgttttaagcttcattgaggaacttgagctgagacagagaaagcttgtttgccggagtaatacaatcttaagaggttcagatacattaaatggattagtgctcgatgatctcaacaaaatgttcacagaatcacttttgctaattttggaaaatatggtggcattcagtaaactgtcttgctccattttctggttagatgtggacaacaaggatttacccccttctatcaaaggaaagcttggaggcccaagccagcgtcgtttggctacctccattacttcttcagtattacagggtatttggtcaatgcgatgtgttagttctgttgcctcatggtgtaatccttacaactccgatgattctgtttcttctgcattttccgtgctatgggacttctatttgaatgttacccatcactccactattgccaatgagatcggagctgaacttcacctggcagcttatgaagctcttgcctatgttctggcagttctatctactgcttccagtactcagtttttggattttgtggaagcgaagcagacagatcaagcccacaagttttcattggacattttggtcaccactttccttgacaacatcaaccatcttcttacagagggaactctgacgcgaagcagaagagctgttttgatgacttggaagtggctttgtatggattctcttctatctatttcaagctgctatagtgacaatgaatctcaaatgaagaggttggaacctttattttctgattcaaccctccgatgcatttttcttgatattatcgaaagccttgaaaacactggtgaaaattctgtcttatctatcttgagatgtgtgagatctgttttgagattgctacacctgaatgagggcaacacaattttttcctctttaggcatcagctatgagatgatgatgcaattagcaaagtcttcctggatcttgcaccttaactgcaacaaacgccgagtggctcccattgctgcactactatctgcagtattgcacccagcaatattttgtaatttggaaatgcaccagacaaatgaaaaagggccaggccctttaaaatggtttgttgagaatcttcttaatgaaggctcaaaaagtcctcgaactattcgcctagcagctttgcatttaagtggtctatggttgatgtacccaaaaactcttagattttatatggaggaactgaagctgctctcgttatacggatctgtggcattcgacgaagattttgaagctgaactctctgaaaaccatgaagcaagatttgaggtttccatgctagcacaaagtcctgatcgtgaattcacagaggtgttcattaatacagaattatatgctcgtgtttcggttgctgttctctttcatcagctttggaaacaaatcaaagaacatagtatattggaaactgaagaagctcttgaatgcggcaaactatttctactagaacttctggactcagcggtgaacagcaaagatctttcaaaagaactctacaagaaatatagcagtgcgtaaagttcgtgtgtggcaaatgatatgtgttctatcacactatgtagaagatgatattgttggagaagtgacatctagcattcacatctgtctttatagaaataatttgccagctgtccggcagtacttggagacgtttgctatactcttatacttaaaatttccaaccttggcagaggagcaacttattcctatttttcatgacaaagggatgcgacaacaggcactatcttcatatgtttttatagcagcaaacgtcatacttcactcaagacagtccgtccagatataccacctgaatcaattgcttcctccaatactgccgtttttaacatcccatcatcacagtttacgtggttttactcagcttcttgtccattcagtgctatcgaggttgtggcctactctgcatcccgaaacttcagaagatgcagtctttgagaggaggtgctttcaagaattgaaagattatttggcagaaaattctgactgtgttaggcttagagtttcaatcgaaggtttccttgatgtctttgatcccaatgcatctgggaccccccctggaatatttagcgcccgtcctgaggtgtctgacttcgaatgtgttccggtgtcagtgatggagcgtgtgattgagttcctgaacgatgtgagggaggacttgagacaagctatagcaaatgatacagtaacaatcaagaatgaggatctcgcggtgggagagcatcacaagagtgacgagagcgtgtctgagatggtaaaaactggtcaagaggtacttgatttccagaagaaaataacaccccataggggggactccgagcaagcattgaacttgaacaccagaggtcattcaggcgttggtgacgaatacatttcaagaataatttcagagatggaggaagatgaccaagttttcgacctagcgctagaagcaagattgcatgctgcggaaacgatcaagcagagccggcaagaactgatcgtggttgcgtcattggtggaacgcataccaaatcttgcggggctgacgagaacgtgcgaggtcttcagagcagccggtctggttgttgccgacaagagcgttcttcaggataagcagttccggctgatcagtgtgaccgctgagaaatggctgcctgtgacggaggtccccgtggacagcgtgaaggcttacttggagaggaagcggggcgatggttactcggtgattgggctggagcagacggccaacagcatgcctctggaccggttcgggttcccggaccggacggttctggtgctggggcgggagaaggaaggcatccccgtcgacatcatccacattctggacgcgtgcgtggagatcccgcagctggggcgtggtgaggtcgctcaatgtccatgtcagcggcgccatagccgtctgggagtacacgcgtcaacaacgcaatcagcgttagcttgttgcttgtttttgctccattgaccattgacgacgaagactactactactacctgggagggagagtagaaatcaacatgcagcactcacaggaaggagagaaagacctgggctgggctgggccgacagtaatgaacgctagcccaccttcctttcccaccaccaagacgtacaagtcagactatattacttcatttatttgtgctaatatcgtaacgttttattgtgtaagcaatttggtacttgaagcctgcctgcatttggatttggagcggcatcagaagttttttaaagtatttattcgtagaggggtcgatcgagctcgcccttttattgctgcaaatatataatacacattattactgctgcaaacataagattacgttacattacattaaatgaaaagctatattacctcccgttctcgttatcccgctagttcatttttaacgaaacagtgacaaatatgaactaaacagcaacaaataaaaagaaacggaggggtactacgcttttttttatttcagtgcgcgcgtgtctgctccagacggtgctgctgcgcccagtccttgacgatgtgcggctgctgacccgacgacgaggtcgtggtctgaaggtagcggtacacccacgccagcacagccaccgcagccacgccgaaccctcccgacgaaacgatgcctaccgtgagcagcgccaccgtgatggccgccggcaccagcacggggctgaagatcaccatcaatggcgtcgccacgatgagcgccagcaccgtgcccgtcaccgccagccccgacaacaacaacatggagaaggctgccgtggctgtggctaacgccttggccaccgccatgggcgcgggcggcggccgctgctgctgctggtgaccgtagtgggtggcgttgtagtcatcgtcgccgtagaggcccctcatgtagttctctccgacggcctcgcttcttctccctgcacgatggtcatccgcatgatgagcagtggccatacaagctctggctagctagctagctagtatacaatgattcaaaagaaatagatgagtggagcagctagtaggttcttg

SEQ ID NO: 6102 - DNA, 6628 bp, Zea Mays
tttggtttcgccggtcttcgcttcgctgccgccatggcgtctcctcccgagcgtgaggtcgccgcactcgagagctgcttccgtgccctctccgcggctgacgccgtcccagcggttgtcgactgcgtcctcgcttcctccgcctcgtcctccccttcccaactcttccacgcgctcctccgttcctttcctccctcccagtctgaccgtcatgccgccatctgccacgccgcggcgctccgccatttgctcgcgcaactcgacagcccccctaaggttagggaggctctgcgcttgctgctgtggagggtcttcctgcccttgctccaggatatcattgaacccactcatcctgcccactttgacctggtaatcgagatgatgtgcaatgcagtctctgacactggatgctgggacctgcttggagctacaatagtatcattctgcattcggtcatctgttgttgccatgggtttgtccgccgcagacgccaactctatactttaccaaagtataatggaagcggattttcctgcggagactctctcatgcctactaccgctctccaattcaagcagtgtgttagcatcattgctggtggacatgctggagaggcgaaggactatacctacctcccaggaaggtgctgctgatctagctgcattggttcagaatttgacatgggaccttgccaagttggtactcaagatgtttacacatgctcaagagtatcggtcttgtgccactcgggtccttcttcagcctgtactcatatcgcttacagatgtttcttctgtcactgtatcgtttggtgcagtccagcataagctatcgaggtttggtttcctagaatgtatatggaattcctgtatttctctatttcctttggggcctggtgagcggcttgatgcatacagaatactctctgtatacttctcaacactgaaatcaggacatcaagccgctgtcttgggagttggcattgtccaggaatttgaccttaagaatgtcagtgaattctgggatgaactgcgcaggggactggttgacaaggattctttagtaaggaaacaggccttctatgtcttgacaatatcacttagcatctttacctcttcatctggaaatgatagctgccagcatttttccagtaggagcccagctgctttgcctgctcaaatcaaagcaaatgctggggaaacaaaaagggaaaggtgggctaacaaagaagccaagtcccttggtgttggagagatggaccaatcaggtgaaaattgctcaaatggtcaagatcggtggaaggtctttttgttactctatgagatgctccaggagtatggcacacatttagttgaagcagcttggacacaccatgtagtgcggctgtttgagtgtacgctacaaaatgactatctaaatcacacctcctgtggagcctttcatgctcagatggaatcttgggaaagaattttgtactggatggcagttttgtgggagcgtgggttcagtcatgagaatcctcaagtgagatgcctggttatgcaatcctttttggatattgcatgggaacgctacaaggtttgcactcatataattccaaggggttttgtgctcggccctctgatacgtggtttgaatgatgtggttcatcataaggattttggcattgggggtgcttatagttcgaaaaccataaaagatgctcagagatttttcagaacttatacccacaacttggcgagatgtgaccgcatacatctggtttggagtctggcttctgcggctaagcaagattcatttggccgagcaggattgatgactcttgcatcctgtgttgcttcatgcacacgtcagtcagagacaaatgatgtgccatgtgctatatctgggaaagcagtgaccaaatgtgatggatgtgtacctacagaagttaggccaacagatttgttagatgtcttatggattctcagtgagaggagtaaacaacactttaatccaaagtatcgtctgaaagtttgtgaacaggttatccaagttgcaacatcactgataaatgccactgaaattccacttaaccagcttctgcatttcattgccacaattcctcgagagttcactgattatattggaccattgagagtagtagttcaaaaatggttttttcagaaggaagaatgttctcctggtgacactttgttgagtaagctgatcgatttctctgccaccttcgtaagtcaaaaacggaatgaaggttcgaatgtttttgatgacgaggatgtggatgcatgggaagctgaagcaaggaggtgggctagaacccttcttcttgtaaccgaggaggaggaacatttgaaacgaatcttcaggtttttggaggcatatggctacaagctctctgagcaatgtcccagtggagatttcatacccataaaattttttatcattgttttaagcttcattgaggaacttgagctgagacagagaaagcttgtttgccggagtaatacaatcttaagaggttcagatacattaaatggattagtgctcgatgatctcaacaaaatgttcacagaatcacttttgctaattttggaaaatatggtggcattcagtaaactgtcttgctccattttctggttagatgtggacaacaaggatttacccccttctatcaaaggaaagcttggaggcccaagccagcgtcgtttggctacctccattacttcttcagtattacagggtatttggtcaatgcgatgtgttagttctgttgcctcatggtgtaatccttacaactccgatgattctgtttcttctgcattttccgtgctatgggacttctatttgaatgttacccatcactccactattgccaatgagatcggagctgaacttcacctggcagcttatgaagctcttgcctatgttctggcagttctatctactgcttccagtactcagtttttggattttgtggaagcgaagcagacagatcaagcccacaagttttcattggacattttggtcaccactttccttgacaacatcaaccatcttcttacagagggaactctgacgcgaagcagaagagctgttttgatgacttggaagtggctttgtatggattctcttctatctatttcaagctgctatagtgacaatgaatctcaaatgaagaggttggaacctttattttctgattcaaccctccgatgcatttttcttgatattatcgaaagccttgaaaacactggtgaaaattctgtcttatctatcttgagatgtgtgagatctgttttgagattgctacacctgaatgagggcaacacaattttttcctctttaggcatcagctatgagttgccattcagtatctttttatctctgttcagatgatgatgcaattagcaaagtcttcctggatcttgcaccttaactgcaacaaacgccgagtggctcccattgctgcactactatctgcagtattgcacccagcaatattttgtaatttggaaatgcaccagacaaatgaaaaagggccaggccctttaaaatggtttgttgagaatcttcttaatgaaggctcaaaaagtcctcgaactattcgcctagcagctttgcatttaagtggtctatggttgatgtacccaaaaactcttagattttatatggaggaactgaagctgctctcgttatacggatctgtggcattcgacgaagattttgaagctgaactctctgaaaaccatgaagcaagatttgaggtttccatgctagcacaaagtcctgatcgtgaattcacagaggtgttcattaatacagaattatatgctcgtgtttcggttgctgttctctttcatcagctttggaaacaaatcaaagaacatagtatattggaaactgaagaagctcttgaatgcggcaaactatttctactagaacttctggactcagcggtgaacagcaaagatctttcaaaagaactctacaagaaatatagcagtgtacataggcgtaaagttcgtgtgtggcaaatgatatgtgttctatcacactatgtagaagatgatattgttggagaagtgacatctagcattcacatctgtctttatagaaataatttgccagctgtccggcagtacttggagacgtttgctatactcttatacttaaaatttccaaccttggcagaggagcaacttattcctatttttcatgacaaagggatgcgacaacaggcactatcttcatatgtttttatagcagcaaacgtcatacttcactcaagacagtccgtccagatataccacctgaatcaattgcttcctccaatactgccgtttttaacatcccatcatcacagtttacgtggttttactcagcttcttgtccattcagtgctatcgaggttgtggcctactctgcatcccgaaacttcagaagatgcagtctttgagaggaggtgctttcaagaattgaaagattatttggcagaaaattctgactgtgttaggcttagagtttcaatcgaaggtttccttgatgtctttgatcccaatgcatctgggaccccccctggaatatttagcgcccgtcctgaggtgtctgacttcgaatgtgttccggtgtcagtgatggagcgtgtgattgagttcctgaacgatgtgagggaggacttgagacaagctatagcaaatgatacagtaacaatcaagaatgaggatctcgcggtgggagagcatcacaagagtgacgagagcgtgtctgagatggtaaaaactggtcaagaggtacttgatttccagaagaaaataacaccccataggggggactccgagcaagcattgaacttgaacaccagaggtcattcaggcgttggtgacgaatacatttcaagaataatttcaggtatccatccatgcaaatttgtttgtgtctatattgttgtggcgttttgatggcactttactcgttgatgggtctgttgcggttgcagagatggaggaagatgaccaagttttcgacctagcgctagaagcaagattgcatgctgcggaaacgatcaagcagagccggcaagaactgatcgtggttgcgtcattggtggaacgcataccaaatcttgcggggctgacgagaacgtgcgaggtcttcagagcagccggtctggttgttgccgacaagagcgttcttcaggataagcagttccggctgatcagtgtgaccgctgagaaatggctgcctgtgacggaggtccccgtggacagcgtgaaggcttacttggagaggaagcggggcgatggttactcggtgattgggctggagcagacggccaacagcatgcctctggaccggttcgggttcccggaccggacggttctggtgctggggcgggagaaggaaggcatccccgtcgacatcatccacattctggacgcgtgcgtggagatcccgcagctggggcgtggtgaggtcgctcaatgtccatgtcagcggcgccatagccgtctgggagtacacgcgtcaacaacgcaatcagcgttagcttgttgcttgtttttgctccattgaccattgacgacgaagactactactactacctgggagggagagtagaaatcaacatgcagcactcacaggaaggagagaaagacctgggctgggctgggccgacagtaatgaacgctagcccaccttcctttcccaccaccaagacgtacaagtcagactatattacttcatttatttgtgctaatatcgtaacgttttattgtgtaagcaatttggtacttgaagcctgcctgcatttggatttggagcggcatcagaagttttttaaagtatttattcgtagaggggtcgatcgagctcgcccttttattgctgcaaatatataatacacattattactgctgcaaacataagattacgttacattacattaaatgaaaagctatattacctcccgttctcgttatcccgctagttcatttttaacgaaacagtgacaaatatgaactaaacagcaacaaataaaaagaaacggaggggtactacgcttttttttatttcagtgcgcgcgtgtctgctccagacggtgctgctgcgcccagtccttgacgatgtgcggctgctgacccgacgacgaggtcgtggtctgaaggtagcggtacacccacgccagcacagccaccgcagccacgccgaaccctcccgacgaaacgatgcctaccgtgagcagcgccaccgtgatggccgccggcaccagcacggggctgaagatcaccatcaatggcgtcgccacgatgagcgccagcaccgtgcccgtcaccgccagccccgacaacaacaacatggagaaggctgccgtggctgtggctaacgccttggccaccgccatgggcgcgggcggcggccgctgctgctgctggtgaccgtagtgggtggcgttgtagtcatcgtcgccgtagaggcccctcatgtagttctctccgacggcctcgcttcttctccctgcacgatggtcatccgcatgatgagcagtggccatacaagctctggctagctagctagctagtatacaatgattcaaaagaaatagatgagtggagcagctagtaggttcttg

SEQ ID NO: 6103 - DNA, 6623 bp, Zea Mays
agggtttttggtttcgccggtcttcgcttcgctgccgccatggcgtctcctcccgagcgtgaggtcgccgcactcgagagctgcttccgtgccctctccgcggctgacgccgtcccagcggttgtcgactgcgtcctcgcttcctccgcctcgtcctccccttcccaactcttccacgcgctcctccgttcctttcctccctcccagcgggagcagggtctccaagcccagtctgaccgtcatgccgccatctgccacgccgcggcgctccgccatttgctcgcgcaactcgacagcccccctaaggttagggaggctctgcgcttgctgctgtggagggtcttcctgcccttgctccaggatatcattgaacccactcatcctgcccactttgacctggtaatcgagatgatgtgcaatgcagtctctgacactggatgctgggacctgcttggagctacaatagtatcattctgcattcggtcatctgttgttgccatgggtttgtccgccgcagacgccaactctatactttaccaaagtataatggaagcggattttcctgcggagactctctcatgcctactaccgctctccaattcaagcagtgtgttagcatcattgctggtggacatgctggagaggcgaaggactatacctacctcccaggaaggtgctgctgatctagctgcattggttcagaatttgacatgggaccttgccaagttggtactcaagatgtttacacatgctcaagagtatcggtcttgtgccactcgggtccttcttcagcctgtactcatatcgcttacagatgtttcttctgtcactgtatcgtttggtgcagtccagcataagctatcgaggtttggtttcctagaatgtatatggaattcctgtatttctctatttcctttggggcctggtgagcggcttgatgcatacagaatactctctgtatacttctcaacactgaaatcaggacatcaagccgctgtcttgggagttggcattgtccaggaatttgaccttaagaatgtcagtgaattctgggatgaactgcgcaggggactggttgacaaggattctttagtaaggaaacaggccttctatgtcttgacaatatcacttagcatctttacctcttcatctggaaatgatagctgccagcatttttccagtaggagcccagctgctttgcctgctcaaatcaaagcaaatgctggggaaacaaaaagggaaaggtgggctaacaaagaagccaagtcccttggtgttggagagatggaccaatcaggtgaaaattgctcaaatggtcaagatcggtggaaggtctttttgttactctatgagatgctccaggagtatggcacacatttagttgaagcagcttggacacaccatgtagtgcggctgtttgagtgtacgctacaaaatgactatctaaatcacacctcctgtggagcctttcatgctcagatggaatcttgggaaagaattttgtactggatggcagttttgtgggagcgtgggttcagtcatgagaatcctcaagtgagatgcctggttatgcaatcctttttggatattgcatgggaacgctacaaggtttgcactcatataattccaaggggttttgtgctcggccctctgatacgtggtttgaatgatgtggttcatcataaggattttggcattgggggtgcttatagttcgaaaaccataaaagatgctcagagatttttcagaacttatacccacaacttggcgagatgtgaccgcatacatctggtttggagtctggcttctgcggctaagcaagattcatttggccgagcaggattgatgactcttgcatcctgtgttgcttcatgcacacgtcagtcagagacaaatgatgtgccatgtgctatatctgggaaagcagtgaccaaatgtgatggatgtgtacctacagaagttaggccaacagatttgttagatgtcttatggattctcagtgagaggagtaaacaacactttaatccaaagtatcgtctgaaaggttctactcttcatctctttctcatcgagaaattttgataagtgacagttatgaatagacaacttgttaacttgaagtccagtgcagtttgtgaacaggttatccaagttgcaacatcactgataaatgccactgaaattccacttaaccagcttctgcatttcattgccacaattcctcgagagttcactgattatattggaccattgagagtagtagttcaaaaatggttttttcagaaggaagaatgttctcctggtgacactttgttgagtaagctgatcgatttctctgccaccttcgtaagtcaaaaacggaatgaaggttcgaatgtttttgatgacgaggatgtggatgcatgggaagctgaagcaaggaggtgggctagaacccttcttcttgtaaccgaggaggaggaacatttgaaacgaatcttcaggtttttggaggcatatggctacaagctctctgagcaatgtcccagtggagatttcatacccataaaattttttatcattgttttaagcttcattgaggaacttgagctgagacagagaaagcttgtttgccggagtaatacaatcttaagaggttcagatacattaaatggattagtgctcgatgatctcaacaaaatgttcacagaatcacttttgctaattttggaaaatatggtggcattcagtaaactgtcttgctccattttctggttagatgtggacaacaaggatttacccccttctatcaaaggaaagcttggaggcccaagccagcgtcgtttggctacctccattacttcttcagtattacaggatttggtcaatgcgatgtgttagttctgttgcctcatggtgtaatccttacaactccgatgattctgtttcttctgcattttccgtgctatgggacttctatttgaatgttacccatcactccactattgccaatgagatcggagctgaacttcacctggcagcttatgaagctcttgcctatgttctggcagttctatctactgcttccagtactcagtttttggattttgtggaagcgaagcagacagatcaagcccacaagttttcattggacattttggtcaccactttccttgacaacatcaaccatcttcttacagagggaactctgacgcgaagcagaagagctgttttgatgacttggaagtggctttgtatggattctcttctatctatttcaagctgctatagtgacaatgaatctcaaatgaagaggttggaacctttattttctgattcaaccctccgatgcatttttcttgatattatcgaaagccttgaaaacactggtgaaaattctgtcttatctatcttgagatgtgtgagatctgttttgagattgctacacctgaatgagggcaacacaattttttcctctttaggcatcagctatgagatgatgatgcaattagcaaagtcttcctggatcttgcaccttaactgcaacaaacgccgagtggctcccattgctgcactactatctgcagtattgcacccagcaatattttgtaatttggaaatgcaccagacaaatgaaaaagggccaggccctttaaaatggtttgttgagaatcttcttaatgaaggctcaaaaagtcctcgaactattcgcctagcagctttgcatttaagtggtctatggttgatgtacccaaaaactcttagattttatatggaggaactgaagctgctctcgttatacggatctgtggcattcgacgaagattttgaagctgaactctctgaaaaccatgaagcaagatttgaggtttccatgctagcacaaagtcctgatcgtgaattcacagaggtgttcattaatacagaattatatgctcgtgtttcggttgctgttctctttcatcagctttggaaacaaatcaaagaacatagtatattggaaactgaagaagctcttgaatgcggcaaactatttctactagaacttctggactcagcggtgaacagcaaagatctttcaaaagaactctacaagaaatatagcagtgtacataggcgtaaagttcgtgtgtggcaaatgatatgtgttctatcacactatgtagaagatgatattgttggagaagtgacatctagcattcacatctgtctttatagaaataatttgccagctgtccggcagtacttggagacgtttgctatactcttatacttaaaatttccaaccttggcagaggagcaacttattcctatttttcatgacaaagggatgcgacaacaggcactatcttcatatgtttttatagcagcaaacgtcatacttcactcaagacagtccgtccagatataccacctgaatcaattgcttcctccaatactgccgtttttaacatcccatcatcacagtttacgtggttttactcagcttcttgtccattcagtgctatcgaggttgtggcctactctgcatcccgaaacttcagaagatgcagtctttgagaggaggtgctttcaagaattgaaagattatttggcagaaaattctgactgtgttaggcttagagtttcaatcgaaggtttccttgatgtctttgatcccaatgcatctgggaccccccctggaatatttagcgcccgtcctgaggtgtctgacttcgaatgtgttccggtgtcagtgatggagcgtgtgattgagttcctgaacgatgtgagggaggacttgagacaagctatagcaaatgatacagtaacaatcaagaatgaggatctcgcggtgggagagcatcacaagagtgacgagagcgtgtctgagatggtaaaaactggtcaagaggtacttgatttccagaagaaaataacaccccataggggggactccgagcaagcattgaacttgaacaccagaggtcattcaggcgttggtgacgaatacatttcaagaataatttcagagatggaggaagatgaccaagttttcgacctagcgctagaagcaagattgcatgctgcggaaacgatcaagcagagccggcaagaactgatcgtggttgcgtcattggtggaacgcataccaaatcttgcggggctgacgagaacgtgcgaggtcttcagagcagccggtctggttgttgccgacaagagcgttcttcaggataagcagttccggctgatcagtgtgaccgctgagaaatggctgcctgtgacggaggtccccgtggacagcgtgaaggcttacttggagaggaagcggggcgatggttactcggtgattgggctggagcagacggccaacagcatgcctctggaccggttcgggttcccggaccggacggttctggtgctggggcgggagaaggaaggcatccccgtcgacatcatccacattctggacgcgtgcgtggagatcccgcagctggggcgtggtgaggtcgctcaatgtccatgtcagcggcgccatagccgtctgggagtacacgcgtcaacaacgcaatcagcgttagcttgttgcttgtttttgctccattgaccattgacgacgaagactactactactacctgggagggagagtagaaatcaacatgcagcactcacaggaaggagagaaagacctgggctgggctgggccgacagtaatgaacgctagcccaccttcctttcccaccaccaagacgtacaagtcagactatattacttcatttatttgtgctaatatcgtaacgttttattgtgtaagcaatttggtacttgaagcctgcctgcatttggatttggagcggcatcagaagttttttaaagtatttattcgtagaggggtcgatcgagctcgcccttttattgctgcaaatatataatacacattattactgctgcaaacataagattacgttacattacattaaatgaaaagctatattacctcccgttctcgttatcccgctagttcatttttaacgaaacagtgacaaatatgaactaaacagcaacaaataaaaagaaacggaggggtactacgcttttttttatttcagtgcgcgcgtgtctgctccagacggtgctgctgcgcccagtccttgacgatgtgcggctgctgacccgacgacgaggtcgtggtctgaaggtagcggtacacccacgccagcacagccaccgcagccacgccgaaccctcccgacgaaacgatgcctaccgtgagcagcgccaccgtgatggccgccggcaccagcacggggctgaagatcaccatcaatggcgtcgccacgatgagcgccagcaccgtgcccgtcaccgccagccccgacaacaacaacatggagaaggctgccgtggctgtggctaacgccttggccaccgccatgggcgcgggcggcggccgctgctgctgctggtgaccgtagtgggtggcgttgtagtcatcgtcgccgtagaggcccctcatgtagttctctccgacggcctcgcttcttctccctgcacgatggtcatccgcatgatgagcagtggccatacaagctctggctagctagctagctagtatacaatgattcaaaagaaatagatgagtggagcagctagtaggttcttg

SEQ ID NO: 6104 - DNA, 6982 bp, Zea Mays
gtagggtttttggtttcgccggtcttcgcttcgctgccgccatggcgtctcctcccgagcgtgaggtcgccgcactcgagagctgcttccgtgccctctccgcggctgacgccgtcccagcggttgtcgactgcgtcctcgcttcctccgcctcgtcctccccttcccaactcttccacgcgctcctccgttcctttcctccctcccagtctgaccgtcatgccgccatctgccacgccgcggcgctccgccatttgctcgcgcaactcgacagcccccctaaggttagggaggctctgcgcttgctgctgtggagggtcttcctgcccttgctccaggatatcattgaacccactcatcctgcccactttgacctggtaatcgagatgatgtgcaatgcagtctctgacactggatgctgggacctgcttggagctacaatagtatcattctgcattcggtcatctgttgttgccatgggtttgtccgccgcagacgccaactctatactttaccaaagtataatggaagcggattttcctgcggagactctctcatgcctactaccgctctccaattcaagcagtgtgttagcatcattgctggtggacatgctggagaggcgaaggactatacctacctcccaggaaggtgctgctgatctagctgcattggttcagaatttgacatgggaccttgccaagttggtactcaagatgtttacacatgctcaagagtatcggtcttgtgccactcgggtccttcttcagcctgtactcatatcgcttacagatgtttcttctgtcactgtatcgtttggtgcagtccagcataagctatcgaggtttggtttcctagaatgtatatggaattcctgtatttctctatttcctttggggcctggtgagcggcttgatgcatacagaatactctctgtatacttctcaacactgaaatcaggacatcaagccgctgtcttgggagttggcattgtccaggaatttgaccttaagaatgtcagtgaattctgggatgaactgcgcaggggactggttgacaaggattctttagtaaggaaacaggccttctatgtcttgacaatatcacttagcatctttacctcttcatctggaaatgatagctgccagcatttttccagtaggagcccagctgctttgcctgctcaaatcaaagcaaatgctggggaaacaaaaagggaaaggtgggctaacaaagaagccaagtcccttggtgttggagagatggaccaatcaggtgaaaattgctcaaatggtcaagatcggtggaaggtctttttgttactctatgagatgctccaggagtatggcacacatttagttgaagcagcttggacacaccatgtagtgcggctgtttgagtgtacgctacaaaatgactatctaaatcacacctcctgtggagcctttcatgctcagatggaatcttgggaaagaattttgtactggatggcagttttgtgggagcgtgggttcagtcatgagaatcctcaagtgagatgcctggttatgcaatcctttttggatattgcatgggaacgctacaaggtttgcactcatataattccaaggggttttgtgctcggccctctgatacgtggtttgaatgatgtggttcatcataaggattttggcattgggggtgcttatagttcgaaaaccataaaagatgctcagagatttttcagaacttatacccacaacttggcgagatgtgaccgcatacatctggtttggagtctggcttctgcggctaagcaagattcatttggccgagcaggattgatgactcttgcatcctgtgttgcttcatgcacacgtcagtcagagacaaatgatgtgccatgtgctatatctgggaaagcagtgaccaaatgtgatggatgtgtacctacagaagttaggccaacagatttgttagatgtcttatggattctcagtgagaggagtaaacaacactttaatccaaagtatcgtctgaaagtttgtgaacaggttatccaagttgcaacatcactgataaatgccactgaaattccacttaaccagcttctgcatttcattgccacaattcctcgagagttcactgattatattggaccattgagagtagtagttcaaaaatggttttttcagaaggaagaatgttctcctggtgacactttgttgagtaagctgatcgatttctctgccaccttcgtaagtcaaaaacggaatgaaggttcgaatgtttttgatgacgaggatgtggatgcatgggaagctgaagcaaggaggtgggctagaacccttcttcttgtaaccgaggaggaggaacatttgaaacgaatcttcaggtttttggaggcatatggctacaagctctctgagcaatgtcccagtggagatttcatacccataaaattttttatcattgttttaagcttcattgaggaacttgagctgagacagagaaagcttgtttgccggagtaatacaatcttaagaggttcagatacattaaatggattagtgctcgatgatctcaacaaaatgttcacagaatcacttttgctaattttggaaaatatggtggcattcagtaaactgtcttgctccattttctggttagatgtggacaacaaggatttacccccttctatcaaaggaaagcttggaggcccaagccagcgtcgtttggctacctccattacttcttcagtattacagggtatttggtcaatgcgatgtgttagttctgttgcctcatggtgtaatccttacaactccgatgattctgtttcttctgcattttccgtgctatgggacttctatttgaatgttacccatcactccactattgccaatgagatcggagctgaacttcacctggcagcttatgaagctcttgcctatgttctggcagttctatctactgcttccagtactcagtttttggattttgtggaagcgaagcagacagatcaagcccacaagttttcattggacattttggtcaccactttccttgacaacatcaaccatcttcttacagagggaactctgacgcgaagcagaagagctgttttgatgacttggaagtggctttgtatggattctcttctatctatttcaagctgctatagtgacaatgaatctcaaatgaagaggttggaacctttattttctgattcaaccctccgatgcatttttcttgatattatcgaaagccttgaaaacactggtgaaaattctgtcttatctatcttgagatgtgtgagatctgttttgagattgctacacctgaatgagggcaacacaattttttcctctttaggcatcagctatgagatgatgatgcaattagcaaagtcttcctggatcttgcaccttaactgcaacaaacgccgagtggctcccattgctgcactactatctgcagtattgcacccagcaatattttgtaatttggaaatgcaccagacaaatgaaaaagggccaggccctttaaaatgggtcagttgcgagttctcacattgtctttaagatattttactgttttggatgcaacaccactcttgttctttaactgagtggtcagcatacagaaatgtttagctgctgatctgctgttttgtgcgcattagtttgctagttcaggtctttctaatatgttccgatcctcaaattttatagtgtaaaatttagagcccattaccaccactagtttcaactctagcctaccccaacttgatagggactagaagacattgctactgttggtatccttgaataaggaaatcattcttctgtcttcactttttttctcgcatcgttgctacatgttcatttactgatctgcccatgaccttagtgcaattcacttagaattacaaaggtgttttagtaccaagcttttcttgataaaagtgatgcaattaactcatctatctgtcttcagtttgttgagaatcttcttaatgaaggctcaaaaagtcctcgaactattcgcctagcagctttgcatttaagtggtctatggttgatgtacccaaaaactcttagattttatatggaggaactgaagctgctctcgttatacggatctgtacttcatatatattgaatagtggcattcgacgaagattttgaagctgaactctctgaaaaccatgaagcaagatttgaggtttccatgctagcacaaagtcctgatcgtgaattcacagaggtgttcattaatacagaattatatgctcgtgtttcggttgctgttctctttcatcagctttggaaacaaatcaaagaacatagtatattggaaactgaagaagctcttgaatgcggcaaactatttctactagaacttctggactcagcggtgaacagcaaagatctttcaaaagaactctacaagaaatatagcagtgtacataggcgtaaagttcgtgtgtggcaaatgatatgtgttctatcacactatgtagaagatgatattgttggagaagtgacatctagcattcacatctgtctttatagaaataatttgccagctgtccggcagtacttggagacgtttgctatactcttatacttaaaatttccaaccttggcagaggagcaacttattcctatttttcatgacaaagggatgcgacaacaggcactatcttcatatgtttttatagcagcaaacgtcatacttcactcaagacagtccgtccagatataccacctgaatcaattgcttcctccaatactgccgtttttaacatcccatcatcacagtttacgtggttttactcagcttcttgtccattcagtgctatcgaggttgtggcctactctgcatcccgaaacttcagaagatgcagtctttgagaggaggtgctttcaagaattgaaagattatttggcagaaaattctgactgtgttaggcttagagtttcaatcgaaggtttccttgatgtctttgatcccaatgcatctgggaccccccctggaatatttagcgcccgtcctgaggtgtctgacttcgaatgtgttccggtgtcagtgatggagcgtgtgattgagttcctgaacgatgtgagggaggacttgagacaagctatagcaaatgatacagtaacaatcaagaatgaggatctcgcggtgggagagcatcacaagagtgacgagagcgtgtctgagatggtaaaaactggtcaagaggtacttgatttccagaagaaaataacaccccataggggggactccgagcaagcattgaacttgaacaccagaggtcattcaggcgttggtgacgaatacatttcaagaataatttcagagatggaggaagatgaccaagttttcgacctagcgctagaagcaagattgcatgctgcggaaacgatcaagcagagccggcaagaactgatcgtggttgcgtcattggtggaacgcataccaaatcttgcggggctgacgagaacgtgcgaggtcttcagagcagccggtctggttgttgccgacaagagcgttcttcaggataagcagttccggctgatcagtgtgaccgctgagaaatggctgcctgtgacggaggtccccgtggacagcgtgaaggcttacttggagaggaagcggggcgatggttactcggtgattgggctggagcagacggccaacagcatgcctctggaccggttcgggttcccggaccggacggttctggtgctggggcgggagaaggaaggcatccccgtcgacatcatccacattctggacgcgtgcgtggagatcccgcagctggggcgtggtgaggtcgctcaatgtccatgtcagcggcgccatagccgtctgggagtacacgcgtcaacaacgcaatcagcgttagcttgttgcttgtttttgctccattgaccattgacgacgaagactactactactacctgggagggagagtagaaatcaacatgcagcactcacaggaaggagagaaagacctgggctgggctgggccgacagtaatgaacgctagcccaccttcctttcccaccaccaagacgtacaagtcagactatattacttcatttatttgtgctaatatcgtaacgttttattgtgtaagcaatttggtacttgaagcctgcctgcatttggatttggagcggcatcagaagttttttaaagtatttattcgtagaggggtcgatcgagctcgcccttttattgctgcaaatatataatacacattattactgctgcaaacataagattacgttacattacattaaatgaaaagctatattacctcccgttctcgttatcccgctagttcatttttaacgaaacagtgacaaatatgaactaaacagcaacaaataaaaagaaacggaggggtactacgcttttttttatttcagtgcgcgcgtgtctgctccagacggtgctgctgcgcccagtccttgacgatgtgcggctgctgacccgacgacgaggtcgtggtctgaaggtagcggtacacccacgccagcacagccaccgcagccacgccgaaccctcccgacgaaacgatgcctaccgtgagcagcgccaccgtgatggccgccggcaccagcacggggctgaagatcaccatcaatggcgtcgccacgatgagcgccagcaccgtgcccgtcaccgccagccccgacaacaacaacatggagaaggctgccgtggctgtggctaacgccttggccaccgccatgggcgcgggcggcggccgctgctgctgctggtgaccgtagtgggtggcgttgtagtcatcgtcgccgtagaggcccctcatgtagttctctccgacggcctcgcttcttctccctgcacgatggtcatccgcatgatgagcagtggccatacaagctctggctagctagctagctagtatacaatgattcaaaagaaatagatgagtggagcagctagtaggttcttg

SEQ ID NO: 6105 - DNA, 7171 bp, Zea Mays
ctttgttgctgttgttgttgttgggcaaatcagtagggtttttggtttcgccggtcttcgcttcgctgccgccatggcgtctcctcccgagcgtgaggtcgccgcactcgagagctgcttccgtgccctctccgcggctgacgccgtcccagcggttgtcgactgcgtcctcgcttcctccgcctcgtcctccccttcccaactcttccacgcgctcctccgttcctttcctccctcccagcgggagcagggtctccaagcccagtctgaccgtcatgccgccatctgccacgccgcggcgctccgccatttgctcgcgcaactcgacagcccccctaaggttagggaggctctgcgcttgctgctgtggagggtcttcctgcccttgctccaggatatcattgaacccactcatcctgcccactttgacctggtaatcgagatgatgtgcaatgcagtctctgacactggatgctgggacctgcttggagctacaatagtatcattctgcattcggtcatctgttgttgccatgggtttgtccgccgcagacgccaactctatactttaccaaagtataatggaagcggattttcctgcggagactctctcatgcctactaccgctctccaattcaagcagtgtgttagcatcattgctggtggacatgctggagaggcgaaggactatacctacctcccaggaaggtgctgctgatctagctgcattggttcagaatttgacatgggaccttgccaagttggtactcaagatgtttacacatgctcaagagtatcggtcttgtgccactcgggtccttcttcagcctgtactcatatcgcttacagatgtttcttctgtcactgtatcgtttggtgcagtccagcataagctatcgaggtttggtttcctagaatgtatatggaattcctgtatttctctatttcctttggggcctggtgagcggcttgatgcatacagaatactctctgtatacttctcaacactgaaatcaggacatcaagccgctgtcttgggagttggcattgtccaggaatttgaccttaagaatgtcagtgaattctgggatgaactgcgcaggggactggttgacaaggattctttagtaaggaaacaggccttctatgtcttgacaatatcacttagcatctttacctcttcatctggaaatgatagctgccagcatttttccagtaggagcccagctgctttgcctgctcaaatcaaagcaaatgctggggaaacaaaaagggaaaggtgggctaacaaagaagccaagtcccttggtgttggagagatggaccaatcaggtgaaaattgctcaaatggtcaagatcggtggaaggtctttttgttactctatgagatgctccaggagtatggcacacatttagttgaagcagcttggacacaccatgtagtgcggctgtttgagtgtacgctacaaaatgactatctaaatcacacctcctgtggagcctttcatgctcagatggaatcttgggaaagaattttgtactggatggcagttttgtgggagcgtgggttcagtcatgagaatcctcaagtgagatgcctggttatgcaatcctttttggatattgcatgggaacgctacaaggtttgcactcatataattccaaggggttttgtgctcggccctctgatacgtggtttgaatgatgtggttcatcataaggattttggcattgggggtgcttatagttcgaaaaccataaaagatgctcagagatttttcagaacttatacccacaacttggcgagatgtgaccgcatacatctggtttggagtctggcttctgcggctaagcaagattcatttggccgagcaggattgatgactcttgcatcctgtgttgcttcatgcacacgtcagtcagagacaaatgatgtgccatgtgctatatctgggaaagcagtgaccaaatgtgatggatgtgtacctacagaagttaggccaacagatttgttagatgtcttatggattctcagtgagaggagtaaacaacactttaatccaaagtatcgtctgaaagtttgtgaacaggttatccaagttgcaacatcactgataaatgccactgaaattccacttaaccagcttctgcatttcattgccacaattcctcgagagttcactgattatattggaccattgagagtagtagttcaaaaatggttttttcagaaggaagaatgttctcctggtgacactttgttgagtaagctgatcgatttctctgccaccttcgtaagtcaaaaacggaatgaaggttcgaatgtttttgatgacgaggatgtggatgcatgggaagctgaagcaaggaggtgggctagaacccttcttcttgtaaccgaggaggaggaacatttgaaacgaatcttcaggtttttggaggcatatggctacaagctctctgagcaatgtcccagtggagatttcatacccataaaattttttatcattgttttaagcttcattgaggaacttgagctgagacagagaaagcttgtttgccggagtaatacaatcttaagaggttcagatacattaaatggattagtgctcgatgatctcaacaaaatgttcacagaatcacttttgctaattttggaaaatatggtggcattcagtaaactgtcttgctccattttctggttagatgtggacaacaaggatttacccccttctatcaaaggaaagcttggaggcccaagccagcgtcgtttggctacctccattacttcttcagtattacagggtatttggtcaatgcgatgtgttagttctgttgcctcatggtgtaatccttacaactccgatgattctgtttcttctgcattttccgtgctatgggacttctatttgaatgttacccatcactccactattgccaatgagatcggagctgaacttcacctggcagcttatgaagctcttgcctatgttctggcagttctatctactgcttccagtactcagtttttggattttgtggaagcgaagcagacagatcaagcccacaagttttcattggacattttggtcaccactttccttgacaacatcaaccatcttcttacagagggaactctgacgcgaagcagaagagctgttttgatgacttggaagtggctttgtatggattctcttctatctatttcaagctgctatagtgacaatgaatctcaaatgaagaggttggaacctttattttctgattcaaccctccgatgcatttttcttgatattatcgaaagccttgaaaacactggtgaaaattctgtcttatctatcttgagatgtgtgagatctgttttgagattgctacacctgaatgagggcaacacaattttttcctctttaggcatcagctatgagatgatgatgcaattagcaaagtcttcctggatcttgcaccttaactgcaacaaacgccgagtggctcccattgctgcactactatctgcagtattgcacccagcaatattttgtaatttggaaatgcaccagacaaatgaaaaagggccaggccctttaaaatgggtcagttgcgagttctcacattgtctttaagatattttactgttttggatgcaacaccactcttgttctttaactgagtggtcagcatacagaaatgtttagctgctgatctgctgttttgtgcgcattagtttgctagttcaggtctttctaatatgttccgatcctcaaattttatagtgtaaaatttagagcccattaccaccactagtttcaactctagcctaccccaacttgatagggactagaagacattgctactgttggtatccttgaataaggaaatcattcttctgtcttcactttttttctcgcatcgttgctacatgttcatttactgatctgcccatgaccttagtgcaattcacttagaattacaaaggtgttttagtaccaagcttttcttgataaaagtgatgcaattaactcatctatctgtcttcagtttgttgagaatcttcttaatgaaggctcaaaaagtcctcgaactattcgcctagcagctttgcatttaagtggtctatggttgatgtacccaaaaactcttagattttatatggaggaactgaagctgctctcgttatacggatctggtatactatttcaattcctttcctgctaattcctgagtattttcaccttttccaatgtgcttgttgtttcttattgtattaattagcgtttaacaatgtgcttgatgtatatcattatattcactccaatcagtacttcatatatattgaatagtggcattcgacgaagattttgaagctgaactctctgaaaaccatgaagcaagatttgaggtttccatgctagcacaaagtcctgatcgtgaattcacagaggtgttcattaatacagaattatatgctcgtgtttcggttgctgttctctttcatcagctttggaaacaaatcaaagaacatagtatattggaaactgaagaagctcttgaatgcggcaaactatttctactagaacttctggactcagcggtgaacagcaaagatctttcaaaagaactctacaagaaatatagcagtgtacataggcgtaaagttcgtgtgtggcaaatgatatgtgttctatcacactatgtagaagatgatattgttggagaagtgacatctagcattcacatctgtctttatagaaataatttgccagctgtccggcagtacttggagacgtttgctatactcttatacttaaaatttccaaccttggcagaggagcaacttattcctatttttcatgacaaagggatgcgacaacaggcactatcttcatatgtttttatagcagcaaacgtcatacttcactcaagacagtccgtccagatataccacctgaatcaattgcttcctccaatactgccgtttttaacatcccatcatcacagtttacgtggttttactcagcttcttgtccattcagtgctatcgaggttgtggcctactctgcatcccgaaacttcagaagatgcagtctttgagaggaggtgctttcaagaattgaaagattatttggcagaaaattctgactgtgttaggcttagagtttcaatcgaaggtttccttgatgtctttgatcccaatgcatctgggaccccccctggaatatttagcgcccgtcctgaggtgtctgacttcgaatgtgttccggtgtcagtgatggagcgtgtgattgagttcctgaacgatgtgagggaggacttgagacaagctatagcaaatgatacagtaacaatcaagaatgaggatctcgcggtgggagagcatcacaagagtgacgagagcgtgtctgagatggtaaaaactggtcaagaggtacttgatttccagaagaaaataacaccccataggggggactccgagcaagcattgaacttgaacaccagaggtcattcaggcgttggtgacgaatacatttcaagaataatttcagagatggaggaagatgaccaagttttcgacctagcgctagaagcaagattgcatgctgcggaaacgatcaagcagagccggcaagaactgatcgtggttgcgtcattggtggaacgcataccaaatcttgcggggctgacgagaacgtgcgaggtcttcagagcagccggtctggttgttgccgacaagagcgttcttcaggataagcagttccggctgatcagtgtgaccgctgagaaatggctgcctgtgacggaggtccccgtggacagcgtgaaggcttacttggagaggaagcggggcgatggttactcggtgattgggctggagcagacggccaacagcatgcctctggaccggttcgggttcccggaccggacggttctggtgctggggcgggagaaggaaggcatccccgtcgacatcatccacattctggacgcgtgcgtggagatcccgcagctggggcgtggtgaggtcgctcaatgtccatgtcagcggcgccatagccgtctgggagtacacgcgtcaacaacgcaatcagcgttagcttgttgcttgtttttgctccattgaccattgacgacgaagactactactactacctgggagggagagtagaaatcaacatgcagcactcacaggaaggagagaaagacctgggctgggctgggccgacagtaatgaacgctagcccaccttcctttcccaccaccaagacgtacaagtcagactatattacttcatttatttgtgctaatatcgtaacgttttattgtgtaagcaatttggtacttgaagcctgcctgcatttggatttggagcggcatcagaagttttttaaagtatttattcgtagaggggtcgatcgagctcgcccttttattgctgcaaatatataatacacattattactgctgcaaacataagattacgttacattacattaaatgaaaagctatattacctcccgttctcgttatcccgctagttcatttttaacgaaacagtgacaaatatgaactaaacagcaacaaataaaaagaaacggaggggtactacgcttttttttatttcagtgcgcgcgtgtctgctccagacggtgctgctgcgcccagtccttgacgatgtgcggctgctgacccgacgacgaggtcgtggtctgaaggtagcggtacacccacgccagcacagccaccgcagccacgccgaaccctcccgacgaaacgatgcctaccgtgagcagcgccaccgtgatggccgccggcaccagcacggggctgaagatcaccatcaatggcgtcgccacgatgagcgccagcaccgtgcccgtcaccgccagccccgacaacaacaacatggagaaggctgccgtggctgtggctaacgccttggccaccgccatgggcgcgggcggcggccgctgctgctgctggtgaccgtagtgggtggcgttgtagtcatcgtcgccgtagaggcccctcatgtagttctctccgacggcctcgcttcttctccctgcacgatggtcatccgcatgatgagcagtggccatacaagctctggctagctagctagctagtatacaatgattcaaaagaaatagatgagtggagcagctagtaggttcttg

SEQ ID NO: 6106 - DNA, 6518 bp, Zea Mays
cgctcttctttgttgctgttgttgttgttgggcaaatcagtagggtttttggtttcgccggtcttcgcttcgctgccgccatggcgtctcctcccgagcgtgaggtcgccgcactcgagagctgcttccgtgccctctccgcggctgacgccgtcccagcggttgtcgactgcgtcctcgcttcctccgcctcgtcctccccttcccaactcttccacgcgctcctccgttcctttcctccctcccagcgggagcagggtctccaagcccagtctgaccgtcatgccgccatctgccacgccgcggcgctccgccatttgctcgcgcaactcgacagcccccctaaggttagggaggctctgcgcttgctgctgtggagggtcttcctgcccttgctccaggatatcattgaacccactcatcctgcccactttgacctggtaatcgagatgatgtgcaatgcagtctctgacactggatgctgggacctgcttggagctacaatagtatcattctgcattcggtcatctgttgttgccatgggtttgtccgccgcagacgccaactctatactttaccaaagtataatggaagcggattttcctgcggagactctctcatgcctactaccgctctccaattcaagcagtgtgttagcatcattgctggtggacatgctggagaggcgaaggactatacctacctcccaggaaggtgctgctgatctagctgcattggttcagaatttgacatgggaccttgccaagttggtactcaagatgtttacacatgctcaagagtatcggtcttgtgccactcgggtccttcttcagcctgtactcatatcgcttacagatgtttcttctgtcactgtatcgtttggtgcagtccagcataagctatcgaggtttggtttcctagaatgtatatggaattcctgtatttctctatttcctttggggcctggtgagcggcttgatgcatacagaatactctctgtatacttctcaacactgaaatcaggacatcaagccgctgtcttgggagttggcattgtccaggaatttgaccttaagaatgtcagtgaattctgggatgaactgcgcaggggactggttgacaaggattctttagtaaggaaacaggccttctatgtcttgacaatatcacttagcatctttacctcttcatctggaaatgatagctgccagcatttttccagtaggagcccagctgctttgcctgctcaaatcaaagcaaatgctggggaaacaaaaagggaaaggtgggctaacaaagaagccaagtcccttggtgttggagagatggaccaatcaggtgaaaattgctcaaatggtcaagatcggtggaaggtctttttgttactctatgagatgctccaggagtatggcacacatttagttgaagcagcttggacacaccatgtagtgcggctgtttgagtgtacgctacaaaatgactatctaaatcacacctcctgtggagcctttcatgctcagatggaatcttgggaaagaattttgtactggatggcagttttgtgggagcgtgggttcagtcatgagaatcctcaagtgagatgcctggttatgcaatcctttttggatattgcatgggaacgctacaaggtttgcactcatataattccaaggggttttgtgctcggccctctgatacgtggtttgaatgatgtggttcatcataaggattttggcattgggggtgcttatagttcgaaaaccataaaagatgctcagagatttttcagaacttatacccacaacttggcgagatgtgaccgcatacatctggtttggagtctggcttctgcggctaagcaagattcatttggccgagcaggattgatgactcttgcatcctgtgttgcttcatgcacacgtcagtcagagacaaatgatgtgccatgtgctatatctgggaaagcagtgaccaaatgtgatggatgtgtacctacagaagttaggccaacagatttgttagatgtcttatggattctcagtgagaggagtaaacaacactttaatccaaagtatcgtctgaaaggttctactcttcatctctttctcatcgagaaattttgataagtgacagttatgaatagacaacttgttaacttgaagtccagtgcagtttgtgaacaggttatccaagttgcaacatcactgataaatgccactgaaattccacttaaccagcttctgcatttcattgccacaattcctcgagagttcactgattatattggaccattgagagtagtagttcaaaaatggttttttcagaaggaagaatgttctcctggtgacactttgttgagtaagctgatcgatttctctgccaccttcgtaagtcaaaaacggaatgaaggttcgaatgtttttgatgacgaggatgtggatgcatgggaagctgaagcaaggaggtgggctagaacccttcttcttgtaaccgaggaggaggaacatttgaaacgaatcttcaggtttttggaggcatatggctacaagctctctgagcaatgtcccagtggagatttcatacccataaaattttttatcattgttttaagcttcattgaggaacttgagctgagacagagaaagcttgtttgccggagtaatacaatcttaagaggttcagatacattaaatggattagtgctcgatgatctcaacaaaatgttcacagaatcacttttgctaattttggaaaatatggtggcattcagtaaactgtcttgctccattttctggttagatgtggacaacaaggatttacccccttctatcaaaggaaagcttggaggcccaagccagcgtcgtttggctacctccattacttcttcagtattacagggtatttggtcaatgcgatgtgttagttctgttgcctcatggtgtaatccttacaactccgatgattctgtttcttctgcattttccgtgctatgggacttctatttgaatgttacccatcactccactattgccaatgagatcggagctgaacttcacctggcagcttatgaagctcttgcctatgttctggcagttctatctactgcttccagtactcagtttttggattttgtggaagcgaagcagacagatcaagcccacaagttttcattggacattttggtcaccactttccttgacaacatcaaccatcttcttacagagggaactctgacgcgaagcagaagagctgttttgatgacttggaagtggctttgtatggattctcttctatctatttcaagctgctatagtgacaatgaatctcaaatgaagaggttggaacctttattttctgattcaaccctccgatgcatttttcttgatattatcgaaagccttgaaaacactggtgaaaattctgtcttatctatcttgagatgtgtgagatctgttttgagattgctacacctgaatgagggcaacacaattttttcctctttaggcatcagctatgagatgatgatgcaattagcaaagtcttcctggatcttgcaccttaactgcaacaaacgccgagtggctcccattgctgcactactatctgcagtattgcacccagcaatattttgtaatttggaaatgcaccagacaaatgaaaaagggccaggccctttaaaatggtggcattcgacgaagattttgaagctgaactctctgaaaaccatgaagcaagatttgaggtttccatgctagcacaaagtcctgatcgtgaattcacagaggtgttcattaatacagaattatatgctcgtgtttcggttgctgttctctttcatcagctttggaaacaaatcaaagaacatagtatattggaaactgaagaagctcttgaatgcggcaaactatttctactagaacttctggactcagcggtgaacagcaaagatctttcaaaagaactctacaagaaatatagcagtgtacataggcgtaaagttcgtgtgtggcaaatgatatgtgttctatcacactatgtagaagatgatattgttggagaagtgacatctagcattcacatctgtctttatagaaataatttgccagctgtccggcagtacttggagacgtttgctatactcttatacttaaaatttccaaccttggcagaggagcaacttattcctatttttcatgacaaagggatgcgacaacaggcactatcttcatatgtttttatagcagcaaacgtcatacttcactcaagacagtccgtccagatataccacctgaatcaattgcttcctccaatactgccgtttttaacatcccatcatcacagtttacgtggttttactcagcttcttgtccattcagtgctatcgaggttgtggcctactctgcatcccgaaacttcagaagatgcagtctttgagaggaggtgctttcaagaattgaaagattatttggcagaaaattctgactgtgttaggcttagagtttcaatcgaaggtttccttgatgtctttgatcccaatgcatctgggaccccccctggaatatttagcgcccgtcctgaggtgtctgacttcgaatgtgttccggtgtcagtgatggagcgtgtgattgagttcctgaacgatgtgagggaggacttgagacaagctatagcaaatgatacagtaacaatcaagaatgaggatctcgcggtgggagagcatcacaagagtgacgagagcgtgtctgagatggtaaaaactggtcaagaggtacttgatttccagaagaaaataacaccccataggggggactccgagcaagcattgaacttgaacaccagaggtcattcaggcgttggtgacgaatacatttcaagaataatttcagagatggaggaagatgaccaagttttcgacctagcgctagaagcaagattgcatgctgcggaaacgatcaagcagagccggcaagaactgatcgtggttgcgtcattggtggaacgcataccaaatcttgcggggctgacgagaacgtgcgaggtcttcagagcagccggtctggttgttgccgacaagagcgttcttcaggataagcagttccggctgatcagtgtgaccgctgagaaatggctgcctgtgacggaggtccccgtggacagcgtgaaggcttacttggagaggaagcggggcgatggttactcggtgattgggctggagcagacggccaacagcatgcctctggaccggttcgggttcccggaccggacggttctggtgctggggcgggagaaggaaggcatccccgtcgacatcatccacattctggacgcgtgcgtggagatcccgcagctggggcgtggtgaggtcgctcaatgtccatgtcagcggcgccatagccgtctgggagtacacgcgtcaacaacgcaatcagcgttagcttgttgcttgtttttgctccattgaccattgacgacgaagactactactactacctgggagggagagtagaaatcaacatgcagcactcacaggaaggagagaaagacctgggctgggctgggccgacagtaatgaacgctagcccaccttcctttcccaccaccaagacgtacaagtcagactatattacttcatttatttgtgctaatatcgtaacgttttattgtgtaagcaatttggtacttgaagcctgcctgcatttggatttggagcggcatcagaagttttttaaagtatttattcgtagaggggtcgatcgagctcgcccttttattgctgcaaatatataatacacattattactgctgcaaacataagattacgttacattacattaaatgaaaagctatattacctcccgttctcgttatcccgctagttcatttttaacgaaacagtgacaaatatgaactaaacagcaacaaataaaaagaaacggaggggtactacgcttttttttatttcagtgcgcgcgtgtctgctccagacggtgctgctgcgcccagtccttgacgatgtgcggctgctgacccgacgacgaggtcgtggtctgaaggtagcggtacacccacgccagcacagccaccgcagccacgccgaaccctcccgacgaaacgatgcctaccgtgagcagcgccaccgtgatggccgccggcaccagcacggggctgaagatcaccatcaatggcgtcgccacgatgagcgccagcaccgtgcccgtcaccgccagccccgacaacaacaacatggagaaggctgccgtggctgtggctaacgccttggccaccgccatgggcgcgggcggcggccgctgctgctgctggtgaccgtagtgggtggcgttgtagtcatcgtcgccgtagaggcccctcatgtagttctctccgacggcctcgcttcttctccctgcacgatggtcatccgcatgatgagcagtggccatacaagctctggctagctagctagctagtatacaatgattcaaaagaaatagatgagtggagcagctagtaggttcttg

SEQ ID NO: 6107 - DNA, 6826 bp, Zea Mays
tagacacctgtgatgtgcctgtgcccggtaaaatttgtggaaccgtgtgctcgttggccaaagcaaacttgcagaaaatgagcagcagattatgggctgcgcaggctctaacccggcccagaaacttccccgcctcccccgcgctcttctttgttgctgttgttgttgttgggcaaatcagtagggtttttggtttcgccggtcttcgcttcgctgccgccatggcgtctcctcccgagcgtgaggtcgccgcactcgagagctgcttccgtgccctctccgcggctgacgccgtcccagcggttgtcgactgcgtcctcgcttcctccgcctcgtcctccccttcccaactcttccacgcgctcctccgttcctttcctccctcccagcgggagcagggtctccaagcccagtctgaccgtcatgccgccatctgccacgccgcggcgctccgccatttgctcgcgcaactcgacagcccccctaaggttagggaggctctgcgcttgctgctgtggagggtcttcctgcccttgctccaggatatcattgaacccactcatcctgcccactttgacctggtaatcgagatgatgtgcaatgcagtctctgacactggatgctgggacctgcttggagctacaatagtatcattctgcattcggtcatctgttgttgccatgggtttgtccgccgcagacgccaactctatactttaccaaagtataatggaagcggattttcctgcggagactctctcatgcctactaccgctctccaattcaagcagtgtgttagcatcattgctggtggacatgctggagaggcgaaggactatacctacctcccaggaaggtgctgctgatctagctgcattggttcagaatttgacatgggaccttgccaagttggtactcaagatgtttacacatgctcaagagtatcggtcttgtgccactcgggtccttcttcagcctgtactcatatcgcttacagatgtttcttctgtcactgtatcgtttggtgcagtccagcataagctatcgaggtttggtttcctagaatgtatatggaattcctgtatttctctatttcctttggggcctggtgagcggcttgatgcatacagaatactctctgtatacttctcaacactgaaatcaggacatcaagccgctgtcttgggagttggcattgtccaggaatttgaccttaagaatgtcagtgaattctgggatgaactgcgcaggggactggttgacaaggattctttagtaaggaaacaggccttctatgtcttgacaatatcacttagcatctttacctcttcatctggaaatgatagctgccagcatttttccagtaggagcccagctgctttgcctgctcaaatcaaagcaaatgctggggaaacaaaaagggaaaggtgggctaacaaagaagccaagtcccttggtgttggagagatggaccaatcaggtgaaaattgctcaaatggtcaagatcggtggaaggtctttttgttactctatgagatgctccaggagtatggcacacatttagttgaagcagcttggacacaccatgtagtgcggctgtttgagtgtacgctacaaaatgactatctaaatcacacctcctgtggagcctttcatgctcagatggaatcttgggaaagaattttgtactggatggcagttttgtgggagcgtgggttcagtcatgagaatcctcaagtgagatgcctggttatgcaatcctttttggatattgcatgggaacgctacaaggtttgcactcatataattccaaggggttttgtgctcggccctctgatacgtggtttgaatgatgtggttcatcataaggattttggcattgggggtgcttatagttcgaaaaccataaaagatgctcagagatttttcagaacttatacccacaacttggcgagatgtgaccgcatacatctggtttggagtctggcttctgcggctaagcaagattcatttggccgagcaggattgatgactcttgcatcctgtgttgcttcatgcacacgtcagtcagagacaaatgatgtgccatgtgctatatctgggaaagcagtgaccaaatgtgatggatgtgtacctacagaagttaggccaacagatttgttagatgtcttatggattctcagtgagaggagtaaacaacactttaatccaaagtatcgtctgaaaggttctactcttcatctctttctcatcgagaaattttgataagtgacagttatgaatagacaacttgttaacttgaagtccagtgcagtttgtgaacaggttatccaagttgcaacatcactgataaatgccactgaaattccacttaaccagcttctgcatttcattgccacaattcctcgagagttcactgattatattggaccattgagagtagtagttcaaaaatggttttttcagaaggaagaatgttctcctggtgacactttgttgagtaagctgatcgatttctctgccaccttcgtaagtcaaaaacggaatgaaggttcgaatgtttttgatgacgaggatgtggatgcatgggaagctgaagcaaggaggtgggctagaacccttcttcttgtaaccgaggaggaggaacatttgaaacgaatcttcaggtttttggaggcatatggctacaagctctctgagcaatgtcccagtggagatttcatacccataaaattttttatcattgttttaagcttcattgaggaacttgagctgagacagagaaagcttgtttgccggagtaatacaatcttaagaggttcagatacattaaatggattagtgctcgatgatctcaacaaaatgttcacagaatcacttttgctaattttggaaaatatggtggcattcagtaaactgtcttgctccattttctggttagatgtggacaacaaggatttacccccttctatcaaaggaaagcttggaggcccaagccagcgtcgtttggctacctccattacttcttcagtattacaggatttggtcaatgcgatgtgttagttctgttgcctcatggtgtaatccttacaactccgatgattctgtttcttctgcattttccgtgctatgggacttctatttgaatgttacccatcactccactattgccaatgagatcggagctgaacttcacctggcagcttatgaagctcttgcctatgttctggcagttctatctactgcttccagtactcagtttttggattttgtggaagcgaagcagacagatcaagcccacaagttttcattggacattttggtcaccactttccttgacaacatcaaccatcttcttacagagggaactctgacgcgaagcagaagagctgttttgatgacttggaagtggctttgtatggattctcttctatctatttcaagctgctatagtgacaatgaatctcaaatgaagaggttggaacctttattttctgattcaaccctccgatgcatttttcttgatattatcgaaagccttgaaaacactggtgaaaattctgtcttatctatcttgagatgtgtgagatctgttttgagattgctacacctgaatgagggcaacacaattttttcctctttaggcatcagctatgagatgatgatgcaattagcaaagtcttcctggatcttgcaccttaactgcaacaaacgccgagtggctcccattgctgcactactatctgcagtattgcacccagcaatattttgtaatttggaaatgcaccagacaaatgaaaaagggccaggccctttaaaatggtttgttgagaatcttcttaatgaaggctcaaaaagtcctcgaactattcgcctagcagctttgcatttaagtggtctatggttgatgtacccaaaaactcttagattttatatggaggaactgaagctgctctcgttatacggatctgtacttcatatatattgaatagtggcattcgacgaagattttgaagctgaactctctgaaaaccatgaagcaagatttgaggtttccatgctagcacaaagtcctgatcgtgaattcacagaggtgttcattaatacagaattatatgctcgtgtttcggttgctgttctctttcatcagctttggaaacaaatcaaagaacatagtatattggaaactgaagaagctcttgaatgcggcaaactatttctactagaacttctggactcagcggtgaacagcaaagatctttcaaaagaactctacaagaaatatagcagtgtacataggcgtaaagttcgtgtgtggcaaatgatatgtgttctatcacactatgtagaagatgatattgttggagaagtgacatctagcattcacatctgtctttatagaaataatttgccagctgtccggcagtacttggagacgtttgctatactcttatacttaaaatttccaaccttggcagaggagcaacttattcctatttttcatgacaaagggatgcgacaacaggcactatcttcatatgtttttatagcagcaaacgtcatacttcactcaagacagtccgtccagatataccacctgaatcaattgcttcctccaatactgccgtttttaacatcccatcatcacagtttacgtggttttactcagcttcttgtccattcagtgctatcgaggttgtggcctactctgcatcccgaaacttcagaagatgcagtctttgagaggaggtgctttcaagaattgaaagattatttggcagaaaattctgactgtgttaggcttagagtttcaatcgaaggtttccttgatgtctttgatcccaatgcatctgggaccccccctggaatatttagcgcccgtcctgaggtgtctgacttcgaatgtgttccggtgtcagtgatggagcgtgtgattgagttcctgaacgatgtgagggaggacttgagacaagctatagcaaatgatacagtaacaatcaagaatgaggatctcgcggtgggagagcatcacaagagtgacgagagcgtgtctgagatggtaaaaactggtcaagaggtacttgatttccagaagaaaataacaccccataggggggactccgagcaagcattgaacttgaacaccagaggtcattcaggcgttggtgacgaatacatttcaagaataatttcagagatggaggaagatgaccaagttttcgacctagcgctagaagcaagattgcatgctgcggaaacgatcaagcagagccggcaagaactgatcgtggttgcgtcattggtggaacgcataccaaatcttgcggggctgacgagaacgtgcgaggtcttcagagcagccggtctggttgttgccgacaagagcgttcttcaggataagcagttccggctgatcagtgtgaccgctgagaaatggctgcctgtgacggaggtccccgtggacagcgtgaaggcttacttggagaggaagcggggcgatggttactcggtgattgggctggagcagacggccaacagcatgcctctggaccggttcgggttcccggaccggacggttctggtgctggggcgggagaaggaaggcatccccgtcgacatcatccacattctggacgcgtgcgtggagatcccgcagctggggcgtggtgaggtcgctcaatgtccatgtcagcggcgccatagccgtctgggagtacacgcgtcaacaacgcaatcagcgttagcttgttgcttgtttttgctccattgaccattgacgacgaagactactactactacctgggagggagagtagaaatcaacatgcagcactcacaggaaggagagaaagacctgggctgggctgggccgacagtaatgaacgctagcccaccttcctttcccaccaccaagacgtacaagtcagactatattacttcatttatttgtgctaatatcgtaacgttttattgtgtaagcaatttggtacttgaagcctgcctgcatttggatttggagcggcatcagaagttttttaaagtatttattcgtagaggggtcgatcgagctcgcccttttattgctgcaaatatataatacacattattactgctgcaaacataagattacgttacattacattaaatgaaaagctatattacctcccgttctcgttatcccgctagttcatttttaacgaaacagtgacaaatatgaactaaacagcaacaaataaaaagaaacggaggggtactacgcttttttttatttcagtgcgcgcgtgtctgctccagacggtgctgctgcgcccagtccttgacgatgtgcggctgctgacccgacgacgaggtcgtggtctgaaggtagcggtacacccacgccagcacagccaccgcagccacgccgaaccctcccgacgaaacgatgcctaccgtgagcagcgccaccgtgatggccgccggcaccagcacggggctgaagatcaccatcaatggcgtcgccacgatgagcgccagcaccgtgcccgtcaccgccagccccgacaacaacaacatggagaaggctgccgtggctgtggctaacgccttggccaccgccatgggcgcgggcggcggccgctgctgctgctggtgaccgtagtgggtggcgttgtagtcatcgtcgccgtagaggcccctcatgtagttctctccgacggcctcgcttcttctccctgcacgatggtcatccgcatgatgagcagtggccatacaagctctggctagctagctagctagtatacaatgattcaaaagaaatagatgagtggagcagctagtaggttcttg

SEQ ID NO: 6108 - DNA, 6720 bp, Zea Mays
tagacacctgtgatgtgcctgtgcccggtaaaatttgtggaaccgtgtgctcgttggccaaagcaaacttgcagaaaatgagcagcagattatgggctgcgcaggctctaacccggcccagaaacttccccgcctcccccgcgctcttctttgttgctgttgttgttgttgggcaaatcagtagggtttttggtttcgccggtcttcgcttcgctgccgccatggcgtctcctcccgagcgtgaggtcgccgcactcgagagctgcttccgtgccctctccgcggctgacgccgtcccagcggttgtcgactgcgtcctcgcttcctccgcctcgtcctccccttcccaactcttccacgcgctcctccgttcctttcctccctcccagcgggagcagggtctccaagcccagtctgaccgtcatgccgccatctgccacgccgcggcgctccgccatttgctcgcgcaactcgacagcccccctaaggttagggaggctctgcgcttgctgctgtggagggtcttcctgcccttgctccaggatatcattgaacccactcatcctgcccactttgacctggtaatcgagatgatgtgcaatgcagtctctgacactggatgctgggacctgcttggagctacaatagtatcattctgcattcggtcatctgttgttgccatgggtttgtccgccgcagacgccaactctatactttaccaaagtataatggaagcggattttcctgcggagactctctcatgcctactaccgctctccaattcaagcagtgtgttagcatcattgctggtggacatgctggagaggcgaaggactatacctacctcccaggaaggtgctgctgatctagctgcattggttcagaatttgacatgggaccttgccaagttggtactcaagatgtttacacatgctcaagagtatcggtcttgtgccactcgggtccttcttcagcctgtactcatatcgcttacagatgtttcttctgtcactgtatcgtttggtgcagtccagcataagctatcgaggtttggtttcctagaatgtatatggaattcctgtatttctctatttcctttggggcctggtgagcggcttgatgcatacagaatactctctgtatacttctcaacactgaaatcaggacatcaagccgctgtcttgggagttggcattgtccaggaatttgaccttaagaatgtcagtgaattctgggatgaactgcgcaggggactggttgacaaggattctttagtaaggaaacaggccttctatgtcttgacaatatcacttagcatctttacctcttcatctggaaatgatagctgccagcatttttccagtaggagcccagctgctttgcctgctcaaatcaaagcaaatgctggggaaacaaaaagggaaaggtgggctaacaaagaagccaagtcccttggtgttggagagatggaccaatcaggtgaaaattgctcaaatggtcaagatcggtggaaggtctttttgttactctatgagatgctccaggagtatggcacacatttagttgaagcagcttggacacaccatgtagtgcggctgtttgagtgtacgctacaaaatgactatctaaatcacacctcctgtggagcctttcatgctcagatggaatcttgggaaagaattttgtactggatggcagttttgtgggagcgtgggttcagtcatgagaatcctcaagtgagatgcctggttatgcaatcctttttggatattgcatgggaacgctacaaggtttgcactcatataattccaaggggttttgtgctcggccctctgatacgtggtttgaatgatgtggttcatcataaggattttggcattgggggtgcttatagttcgaaaaccataaaagatgctcagagatttttcagaacttatacccacaacttggcgagatgtgaccgcatacatctggtttggagtctggcttctgcggctaagcaagattcatttggccgagcaggattgatgactcttgcatcctgtgttgcttcatgcacacgtcagtcagagacaaatgatgtgccatgtgctatatctgggaaagcagtgaccaaatgtgatggatgtgtacctacagaagttaggccaacagatttgttagatgtcttatggattctcagtgagaggagtaaacaacactttaatccaaagtatcgtctgaaagtttgtgaacaggttatccaagttgcaacatcactgataaatgccactgaaattccacttaaccagcttctgcatttcattgccacaattcctcgagagttcactgattatattggaccattgagagtagtagttcaaaaatggttttttcagaaggaagaatgttctcctggtgacactttgttgagtaagctgatcgatttctctgccaccttcgtaagtcaaaaacggaatgaaggttcgaatgtttttgatgacgaggatgtggatgcatgggaagctgaagcaaggaggtgggctagaacccttcttcttgtaaccgaggaggaggaacatttgaaacgaatcttcaggtttttggaggcatatggctacaagctctctgagcaatgtcccagtggagatttcatacccataaaattttttatcattgttttaagcttcattgaggaacttgagctgagacagagaaagcttgtttgccggagtaatacaatcttaagaggttcagatacattaaatggattagtgctcgatgatctcaacaaaatgttcacagaatcacttttgctaattttggaaaatatggtggcattcagtaaactgtcttgctccattttctggttagatgtggacaacaaggatttacccccttctatcaaaggaaagcttggaggcccaagccagcgtcgtttggctacctccattacttcttcagtattacagggtatttggtcaatgcgatgtgttagttctgttgcctcatggtgtaatccttacaactccgatgattctgtttcttctgcattttccgtgctatgggacttctatttgaatgttacccatcactccactattgccaatgagatcggagctgaacttcacctggcagcttatgaagctcttgcctatgttctggcagttctatctactgcttccagtactcagtttttggattttgtggaagcgaagcagacagatcaagcccacaagttttcattggacattttggtcaccactttccttgacaacatcaaccatcttcttacagagggaactctgacgcgaagcagaagagctgttttgatgacttggaagtggctttgtatggattctcttctatctatttcaagctgctatagtgacaatgaatctcaaatgaagaggttggaacctttattttctgattcaaccctccgatgcatttttcttgatattatcgaaagccttgaaaacactggtgaaaattctgtcttatctatcttgagatgtgtgagatctgttttgagattgctacacctgaatgagggcaacacaattttttcctctttaggcatcagctatgagatgatgatgcaattagcaaagtcttcctggatcttgcaccttaactgcaacaaacgccgagtggctcccattgctgcactactatctgcagtattgcacccagcaatattttgtaatttggaaatgcaccagacaaatgaaaaagggccaggccctttaaaatggtttgttgagaatcttcttaatgaaggctcaaaaagtcctcgaactattcgcctagcagctttgcatttaagtggtctatggttgatgtacccaaaaactcttagattttatatggaggaactgaagctgctctcgttatacggatctgtggcattcgacgaagattttgaagctgaactctctgaaaaccatgaagcaagatttgaggtttccatgctagcacaaagtcctgatcgtgaattcacagaggtgttcattaatacagaattatatgctcgtgtttcggttgctgttctctttcatcagctttggaaacaaatcaaagaacatagtatattggaaactgaagaagctcttgaatgcggcaaactatttctactagaacttctggactcagcggtgaacagcaaagatctttcaaaagaactctacaagaaatatagcagtgtacataggcgtaaagttcgtgtgtggcaaatgatatgtgttctatcacactatgtagaagatgatattgttggagaagtgacatctagcattcacatctgtctttatagaaataatttgccagctgtccggcagtacttggagacgtttgctatactcttatacttaaaatttccaaccttggcagaggagcaacttattcctatttttcatgacaaagggatgcgacaacaggcactatcttcatatgtttttatagcagcaaacgtcatacttcactcaagacagtccgtccagatataccacctgaatcaattgcttcctccaatactgccgtttttaacatcccatcatcacagtttacgtggttttactcagcttcttgtccattcagtgctatcgaggttgtggcctactctgcatcccgaaacttcagaagatgcagtctttgagaggaggtgctttcaagaattgaaagattatttggcagaaaattctgactgtgttaggcttagagtttcaatcgaaggtttccttgatgtctttgatcccaatgcatctgggaccccccctggaatatttagcgcccgtcctgaggtgtctgacttcgaatgtgttccggtgtcagtgatggagcgtgtgattgagttcctgaacgatgtgagggaggacttgagacaagctatagcaaatgatacagtaacaatcaagaatgaggatctcgcggtgggagagcatcacaagagtgacgagagcgtgtctgagatggtaaaaactggtcaagaggtacttgatttccagaagaaaataacaccccataggggggactccgagcaagcattgaacttgaacaccagaggtcattcaggcgttggtgacgaatacatttcaagaataatttcagagatggaggaagatgaccaagttttcgacctagcgctagaagcaagattgcatgctgcggaaacgatcaagcagagccggcaagaactgatcgtggttgcgtcattggtggaacgcataccaaatcttgcggggctgacgagaacgtgcgaggtcttcagagcagccggtctggttgttgccgacaagagcgttcttcaggataagcagttccggctgatcagtgtgaccgctgagaaatggctgcctgtgacggaggtccccgtggacagcgtgaaggcttacttggagaggaagcggggcgatggttactcggtgattgggctggagcagacggccaacagcatgcctctggaccggttcgggttcccggaccggacggttctggtgctggggcgggagaaggaaggcatccccgtcgacatcatccacattctggacgcgtgcgtggagatcccgcagctggggcgtggtgaggtcgctcaatgtccatgtcagcggcgccatagccgtctgggagtacacgcgtcaacaacgcaatcagcgttagcttgttgcttgtttttgctccattgaccattgacgacgaagactactactactacctgggagggagagtagaaatcaacatgcagcactcacaggaaggagagaaagacctgggctgggctgggccgacagtaatgaacgctagcccaccttcctttcccaccaccaagacgtacaagtcagactatattacttcatttatttgtgctaatatcgtaacgttttattgtgtaagcaatttggtacttgaagcctgcctgcatttggatttggagcggcatcagaagttttttaaagtatttattcgtagaggggtcgatcgagctcgcccttttattgctgcaaatatataatacacattattactgctgcaaacataagattacgttacattacattaaatgaaaagctatattacctcccgttctcgttatcccgctagttcatttttaacgaaacagtgacaaatatgaactaaacagcaacaaataaaaagaaacggaggggtactacgcttttttttatttcagtgcgcgcgtgtctgctccagacggtgctgctgcgcccagtccttgacgatgtgcggctgctgacccgacgacgaggtcgtggtctgaaggtagcggtacacccacgccagcacagccaccgcagccacgccgaaccctcccgacgaaacgatgcctaccgtgagcagcgccaccgtgatggccgccggcaccagcacggggctgaagatcaccatcaatggcgtcgccacgatgagcgccagcaccgtgcccgtcaccgccagccccgacaacaacaacatggagaaggctgccgtggctgtggctaacgccttggccaccgccatgggcgcgggcggcggccgctgctgctgctggtgaccgtagtgggtggcgttgtagtcatcgtcgccgtagaggcccctcatgtagttctctccgacggcctcgcttcttctccctgcacgatggtcatccgcatgatgagcagtggccatacaagctctggctagctagctagctagtatacaatgattcaaaagaaatagatgagtggagcagctagtaggttcttg

SEQ ID NO: 6109 - DNA, 534 bp, Zea Mays
ttcagtttttggaggcatatggctacaagctctctgagcaatgtcccagtggagatttcatacccataaaattttttatcattgttttaagcttcattgaggaacttgagctgagacagagaaagcttgtttgccggagtaatacaatcttaagaggttcagatacattaaatggattagtgctcgatgatctcaacaaaatgttcacagaatcacttttgctaattttggaaaatatggtggcattcagtaaactgtcttgctccattttctggttagatgtggacaacaaggatttacccccttctatcaaaggaaagcttggaggcccaagccagcgtcgtttggctacctccattacttcttcagtattacagggtgtatgttccgtcctgttttttttttctttggtttgctttgtgtaaaaggttccatttcacatgtttcacttaatctttcagatatactgcattactactatcttgatgtttttgtctgctgtgctagtccaacaaagttttcttttctactgtc

SEQ ID NO: 6110 - DNA, 2778 bp, Zea Mays
atggcgtctcctcccgagcgtgaggtcgccgcactcgagagctgcttccgtgccctctccgcggctgacgccgtcccagcggttgtcgactgcgtcctcgcttcctccgcctcgtcctccccttcccaactcttccacgcgctcctccgttcctttcctccctcccagtctgaccgtcatgccgccatctgccacgccgcggcgctccgccatttgctcgcgcaactcgacagcccccctaaggttagggaggctctgcgcttgctgctgtggagggtcttcctgcccttgctccaggatatcattgaacccactcatcctgcccactttgacctggtaatcgagatgatgtgcaatgcagtctctgacactggatgctgggacctgcttggagctacaatagtatcattctgcattcggtcatctgttgttgccatgggtttgtccgccgcagacgccaactctatactttaccaaagtataatggaagcggattttcctgcggagactctctcatgcctactaccgctctccaattcaagcagtgtgttagcatcattgctggtggacatgctggagaggcgaaggactatacctacctcccaggaaggtgctgctgatctagctgcattggttcagaatttgacatgggaccttgccaagttggtactcaagatgtttacacatgctcaagagtatcggtcttgtgccactcgggtccttcttcagcctgtactcatatcgcttacagatgtttcttctgtcactgtatcgtttggtgcagtccagcataagctatcgaggtttggtttcctagaatgtatatggaattcctgtatttctctatttcctttggggcctggtgagcggcttgatgcatacagaatactctctgtatacttctcaacactgaaatcaggacatcaagccgctgtcttgggagttggcattgtccaggaatttgaccttaagaatgtcagtgaattctgggatgaactgcgcaggggactggttgacaaggattctttagtaaggaaacaggccttctatgtcttgacaatatcacttagcatctttacctcttcatctggaaatgatagctgccagcatttttccagtaggagcccagctgctttgcctgctcaaatcaaagcaaatgctggggaaacaaaaagggaaaggtgggctaacaaagaagccaagtcccttggtgttggagagatggaccaatcaggtgaaaattgctcaaatggtcaagatcggtggaaggtctttttgttactctatgagatgctccaggagtatggcacacatttagttgaagcagcttggacacaccatgtagtgcggctgtttgagtgtacgctacaaaatgactatctaaatcacacctcctgtggagcctttcatgctcagatggaatcttgggaaagaattttgtactggatggcagttttgtgggagcgtgggttcagtcatgagaatcctcaagtgagatgcctggttatgcaatcctttttggatattgcatgggaacgctacaaggcattgggggtgcttatagttcgaaaaccataaaagatgctcagagatttttcagaacttatacccacaacttggcgagatgtgaccgcatacatctggtttggagtctggcttctgcggctaagcaagattcatttggccgagcaggattgatgactcttgcatcctgtgttgcttcatgcacacgtcagtcagagacaaatgatgtgccatgtgctatatctgggaaagcagtgaccaaatgtgatggatgtgtacctacagaagttaggccaacagatttgttagatgtcttatggattctcagtgagaggagtaaacaacactttaatccaaagtatcgtctgaaagtttgtgaacaggttatccaagttgcaacatcactgataaatgccactgaaattccacttaaccagcttctgcatttcattgccacaattcctcgagagttcactgattatattggaccattgagagtagtagttcaaaaatggttttttcagaaggaagaatgttctcctggtgacactttgttgagtaagctgatcgatttctctgccaccttcgtaagtcaaaaacggaatgaaggttcgaatgtttttgatgacgaggatgtggatgcatgggaagctgaagcaaggaggtgggctagaacccttcttcttgtaaccgaggaggaggaacatttgaaacgaatcttcaggtttttggaggcatatggctacaagctctctgagcaatgtcccagtggagatttcatacccataaaattttttatcattgttttaagcttcattgaggaacttgagctgagacagagaaagcttgtttgccggagtaatacaatcttaagaggttcagatacattaaatggattagtgctcgatgatctcaacaaaatgttcacagaatcacttttgctaattttggaaaatatggtggcattcagtaaactgtcttgctccattttctggttagatgtggacaacaaggatttacccccttctatcaaaggaaagcttggaggcccaagccagcgtcgtttggctacctccattacttcttcagtattacagggtgtatgttccgtcctgttttttttttctttggtttgctttgtgtaaaaggttccatttcacatgtttcacttaatctttcagatatactgcattactactatcttgatgtttttgtctgctgtgctagtccaacaaagttttcttttctactgtc

SEQ ID NO: 6111 - DNA, 2822 bp, Zea Mays
atggcgtctcctcccgagcgtgaggtcgccgcactcgagagctgcttccgtgccctctccgcggctgacgccgtcccagcggttgtcgactgcgtcctcgcttcctccgcctcgtcctccccttcccaactcttccacgcgctcctccgttcctttcctccctcccagcgggagcagggtctccaagcccagtctgaccgtcatgccgccatctgccacgccgcggcgctccgccatttgctcgcgcaactcgacagcccccctaaggttagggaggctctgcgcttgctgctgtggagggtcttcctgcccttgctccaggatatcattgaacccactcatcctgcccactttgacctggtaatcgagatgatgtgcaatgcagtctctgacactggatgctgggacctgcttggagctacaatagtatcattctgcattcggtcatctgttgttgccatgggtttgtccgccgcagacgccaactctatactttaccaaagtataatggaagcggattttcctgcggagactctctcatgcctactaccgctctccaattcaagcagtgtgttagcatcattgctggtggacatgctggagaggcgaaggactatacctacctcccaggaaggtgctgctgatctagctgcattggttcagaatttgacatgggaccttgccaagttggtactcaagatgtttacacatgctcaagagtatcggtcttgtgccactcgggtccttcttcagcctgtactcatatcgcttacagatgtttcttctgtcactgtatcgtttggtgcagtccagcataagctatcgaggtttggtttcctagaatgtatatggaattcctgtatttctctatttcctttggggcctggtgagcggcttgatgcatacagaatactctctgtatacttctcaacactgaaatcaggacatcaagccgctgtcttgggagttggcattgtccaggaatttgaccttaagaatgtcagtgaattctgggatgaactgcgcaggggactggttgacaaggattctttagtaaggaaacaggccttctatgtcttgacaatatcacttagcatctttacctcttcatctggaaatgatagctgccagcatttttccagtaggagcccagctgctttgcctgctcaaatcaaagcaaatgctggggaaacaaaaagggaaaggtgggctaacaaagaagccaagtcccttggtgttggagagatggaccaatcaggtgaaaattgctcaaatggtcaagatcggtggaaggtctttttgttactctatgagatgctccaggagtatggcacacatttagttgaagcagcttggacacaccatgtagtgcggctgtttgagtgtacgctacaaaatgactatctaaatcacacctcctgtggagcctttcatgctcagatggaatcttgggaaagaattttgtactggatggcagttttgtgggagcgtgggttcagtcatgagaatcctcaagtgagatgcctggttatgcaatcctttttggatattgcatgggaacgctacaaggtttgcactcatataattccaaggggttttgtgctcggccctctgatacgtggtttgaatgatgtggttcatcataaggattttggcattgggggtgcttatagttcgaaaaccataaaagatgctcagagatttttcagaacttatacccacaacttggcgagatggattgatgactcttgcatcctgtgttgcttcatgcacacgtcagtcagagacaaatgatgtgccatgtgctatatctgggaaagcagtgaccaaatgtgatggatgtgtacctacagaagttaggccaacagatttgttagatgtcttatggattctcagtgagaggagtaaacaacactttaatccaaagtatcgtctgaaagtttgtgaacaggttatccaagttgcaacatcactgataaatgccactgaaattccacttaaccagcttctgcatttcattgccacaattcctcgagagttcactgattatattggaccattgagagtagtagttcaaaaatggttttttcagaaggaagaatgttctcctggtgacactttgttgagtaagctgatcgatttctctgccaccttcgtaagtcaaaaacggaatgaaggttcgaatgtttttgatgacgaggatgtggatgcatgggaagctgaagcaaggaggtgggctagaacccttcttcttgtaaccgaggaggaggaacatttgaaacgaatcttcaggtttttggaggcatatggctacaagctctctgagcaatgtcccagtggagatttcatacccataaaattttttatcattgttttaagcttcattgaggaacttgagctgagacagagaaagcttgtttgccggagtaatacaatcttaagaggttcagatacattaaatggattagtgctcgatgatctcaacaaaatgttcacagaatcacttttgctaattttggaaaatatggtggcattcagtaaactgtcttgctccattttctggttagatgtggacaacaaggatttacccccttctatcaaaggaaagcttggaggcccaagccagcgtcgtttggctacctccattacttcttcagtattacagggtgtatgttccgtcctgttttttttttctttggtttgctttgtgtaaaaggttccatttcacatgtttcacttaatctttcagatatactgcattactactatcttgatgtttttgtctgctgtgctagtccaacaaagttttcttttctactgtc

SEQ ID NO: 6112 - DNA, 3513 bp, Zea Mays
ttatcatacactacaggagtactgtagtcagtaatgaccgagtatccaggagagagggaatgaagacaagagactgaccgcgcgccgcccaggagactgacgcctgcagctcatgtaccgttacttggacaggaaaggatttgcttttgcgacattgcgcaccagctggagtctgtgctcggttaactgatgagagtatgatcagagaaaggaagcgcctccctacctccagctccaataaataggggaagagagagagagagaactataagcctgctgctagacactgagcgagcgagcttgagatcgatctcaggaggcggccggcggcggcagcagcagcagagcttgttggcgccgccatggcgataggtggcttcgtggaagcccctgccggcgccgactacggtggccgcgtgacgtccttcgtggtgctctcctgcatcgtagccggtagcggcggcatcctcttcggctacgacctcggcatctcaggtggggttacctccatggagtcgttccttagaaagttcttcccggacgtgtaccaccagatgaaaggagacaaggacgtgagcaactactgccgcttcgacagcgagcttctcaccgtcttcacctcctccctctacatcgccggcctcgtcgccacgctcttcgcctcctccgtcaccaggaggatactccttggagtaggcctcggattcacaaaccagtccatcccgctgtacctctcagagatggcgccaccgcagtaccgtggcgccatcaacaacggcttcgagctctgcatcagcatcggcatcctcatcgccaacctcatcaactacggcgtggagaagatagcaggtggatggggctggaggatctctctgtccctggccgccgtgccggccgcgttcctcaccgtcggcgccatctacctgcccgagacgcccagcttcatcatccaacgccgcggcggcagcaacaacgtcgacgaggcaaggctgctcctccagaggctgcgtggcaccaccagggtccagaaagagctcgacgatctcgtgtccgcgaccaggacgaccaccacagggcgtcccttccgcaccatactgaggcgcaagtacaggccgcagctggtcatagctctcctcgtacccttcttcaaccaggtcaccggcatcaacgtcatcaacttctacgcgccggtcatgttccggaccatcgggctcaaggagagcgcgtccctcatgtcggccgtggtcacgcgcgtctgcgccacggccgccaacgtggtggccatggtggtcgtggacaggttcggccgccggaagctcttcctggtgggcggcgtgcagatgatcctgtcgcaggccatggtgggagcggtgctggccgccaagttccaggagcacggagggatggagaaggagtacgcgtacctggtgctcgtcatcatgtgcgtcttcgtcgcgggcttcgcctggtcctggggccctctcacctacctggtgcccaccgagatctgcccgctggagatcaggtcggcggggcagagcgtcgtcatcgccgtcatcttcttcgtcaccttcctcatcggccagaccttcctggcgatgctgtgccacctcaagttcggcaccttcttcctcttcggcggctgggtgtgcgtcatgacgctcttcgtgtatttcttcctgccggagaccaagcagctgcccatggagcagatggaacaggtctggaggacccactggttttggaaaaggattgtagacgaagatgcagcaggggagcaaccgagagaggaagcagcaggaaccatagctctgtcgtccacgtccaccacaacatagtcatcatcaacaatactcatggcatgggcctgccctgtatagatagataattaactagctgcaccgcacagattgtctccgactataagctagctagctagttggatgcatgcatgcatgcattctgttatttctgtgaccatgaatcaaagggccttccaacagaacagaatatgagatgagatgaatcttatttgtgactgagtgccaagccaaccaagcagaggcagcgtaacaatccaagccactgtcggaagcccatgcatcaaatcaaaacagcgtcatcaccctctgccagtgccagcccaagcacagcgtgccaaatggcaactagcaaatcagaaaccgtcaccgatgcctttttgtttgtcaggtaaggcacaatgtacttcttcatgtcacctttggagataccaagatgacctcccggcacagacacaaacttcacccgccctgcttcatccagtgtcttcaaaccaatccagtcttcctcatacagtttcgtctgcacacacagagcttgccattgtaagcagagcacacatggaggaggacccaactcacgtgcatgaatcaattctaccttctgaggtggtagaactggatcaaaggctccatcagggtagtaaccaaaccatgccgtttctcgtggtatcaggactgcatcatcctgaaactgcaaataacatacatacatacatacatatattaagataggtcaaaagaattcaatcgattttggattcagaccatgtcaagcttaccataatcagaaccaaattctctaagctactgaatctttccttgtaggtggcatttcttttatctggaatttcattgttaagttttggaagaaacctacaactcttcagataatctgccatatcctgatacatacttttagttagacaaacttcgtgcaccagaaacattctcatatactatgaaactatattacatgacaaatttaattgtactaataatcaattaattattcaagaaaaatgaccaaactagttattcagcactatgaagctaagcatttgtaagcatcatccagtatgataagcaaactcaaaagtacatccataagaataatagagtagcatgtcatgtcaacgaaactacataaaaggtgcattcctcgttatactcacagttgggattttgaggtagccactaggtgcaagatgttcctgcacatagtctgagtagatctccaatttgatcagagcatcaacaataatgcaaaaaaatccagactgcatatataatatacagatatcaactgaatcatacaggctgccatagaatatgcggatgttaaaagacaagtacatttaaacaataatggtgttagtctcagccaatatattttccttaatttttactaagtgtataagtcatcaaacaaatgcatgaaagcatatttaaccatctattatactacacaaacttgtcaccatatcatcgaattattagtcaaaacatggcattaaaaaaccacatagtgattggaaataatgactgatgagattaacttacaccacaaagaggcactgaagcggtaccagcatgaggacctcctagagagatgaaattcttgacctgccaggtgcgatctggatcataacttattgcatagaaaaccagtaccaattaaagtgcatacaag

SEQ ID NO: 6113 - DNA, 2189 bp, Zea Mays
ctgcctctctccctctccgcctacctctccttccctaccgtctcctgccactgcgcccctccaatagcgttgtcccttgccctcgcgcgccccgtgctcttcgtcgtcttcgccagcccaggtggcaggaagctacccatagccagcctcgtcttctcggccaaatccttcttcggtgcaccgctggccgccacctcggcctccgtcgctttgtcgctcctgtgccagtggctgcctccagctcgctcgaggtcgtcgctacggggaagaaggggcctttccgaccaaatccttctttggcgcgccactggccgccaccgcggcctccgtcgcgttgccactcccgcgacaaccggccgcctccaactcgcttgaggtcatcgcagcggggaagaaggggctttcccagccagatccttctttgacgtgccgctggccaccaccgcgccctccatcgcatcgccactcccgctagctcgaggtcgtcacaatggggaagaagggctgcaagatgaagacacacaagcgatttcgggtgacaaggaaggacaagatcatgcggcggtgcgctgggaagcaacacttgctcgccaagaaaaacaccaagcgcaagaagagactctccaagatggagatgttcgccgatctgtgggccaaaggcttcagtttgctaggattcatctgctttagctcaattgggatggccagatatgcggataccaatcttatacaccttatcatggccagatagaatctatcgccctagctcaatttgttaaatctgtctagatatttgcaagcatgacatcttcacaactcctgggctacttttacaggacatctgatgcttttatttggaaatgacctccaagaattcaggtcttattttttattacagtatggggttgttctaataagctactggcatatgatggtaatacttgataaattcgtatggatgagggaaacctaagtcagctgttgctcatcaaacttggaccttgacctaaactcatttcaattttggtgtcattttgaatagttatatgtacgagttgagttggataccatggtaaggttgctaaacatgaatatgctttcgaaaaaaggatgttaagtaacttagtgactctgcttaacactgtaggatttgaggctgccatagtatgctctctgaccgtgctaacgggaggaaggagatgatttaagttctccatgtttataaccagaaagaggaggatagtccaatcatggtaactaaatagtaggtagtaatgtttcacggtaaatcacagttctcgaatgcgatatgatctttgactcggagtattgaagactaatttagtttgagtttgagattagttgtttttgtcattaataaactcacattagcgtctggttacgagctcactactagattttagatctccatttttggtgtacttctgctgcatgtgcctcccatagttgcggatttgcaggtaaacatgaatacaaggctggcttgatctggcaagtgctcgccattctatgggcccatcacacttttcgagtacactgtttgatcatgaagagcagtctgctgccactaaacttgaggttgttgatcatgattgtctgaaaatttatcggggatatgccttgggatggagaaatgtcacagaacacaggatgaagacgattccaagaatccacccatgtcaggactagaagacgccttcacatcacggagtagagctctcagcaacaacagtgcaacgatgtttggacttttgttcacatatgggagtgtttaaactcctgcacctagatttagaaacaccaccatgtaaaatagacaaggcggtgcttttgcaaacatgatgctgccacgagacccgaacttatgtatggccaaacatgttaacatattttgtatgtcatgggctgttccagaaacattctgaaatacacggttccttctaaattctatattttgtcttgatagaacgcccgtaaaagtgcttcaatgttctagtttacatgaaaggtatatagcaatttactcaagaattctattgtctctataggacggctccacttattctagtaaaataaaaaaaactggattaggtgggagcaagcgagtgtaggttgggacttgggaataactaggtttagcaagcgacggtctaggatatgttttattg

SEQ ID NO: 6114 - DNA, 3025 bp, Zea Mays
ctgcctctctccctctccgcctacctctccttccctaccgtctcctgccactgcgcccctccaatagcgttgtcccttgccctcgcgcgccccgtgctcttcgtcgtcttcgccagcccaggtggcaggaagctacccatagccagcctcgtcttctcggccaaatccttcttcggtgcaccgctggccgccacctcggcctccgtcgctttgtcgctcctgtgccagtggctgcctccagctcgctcgaggtcgtcgctacggggaagaaggggcctttccgaccaaatccttctttggcgcgccactggccgccaccgcggcctccgtcgcgttgccactcccgcgacaaccggccgcctccaactcgcttgaggtcatcgcagcggggaagaaggggctttcccagccagatccttctttgacgtgccgctggccaccaccgcgccctccatcgcatcgccactcccgctagctcgaggtcgtcacaatggggaagaagggctgcaagatgaagacacacaagcgatttcgggtgacaaggaaggacaagatcatgcggcggtgcgctgggaagcaacacttgctcgccaagaaaaacaccaagcgcaagaagagactctccaagatggagatgttcgccgatctgtgggccaaaggcttcagtttgctaggtgagcatctgcacagttctgaaataggcgcctatggttgcacagttttttactacaacacttattccacactcaggctaaatttggctcagttggttacaatgtcatgttgattggaatctgccatttgtgaatctatggtctatgacttatctggtagggttagattggataaatgtgttcaatacacaaaaacttgtactatctatatgacactagagattagtgtgccagattgttaaaagctagataatctactgctaccatttaaaagtaactgctggattaattttataggtggattgtgcttaaattgcaatatggagataaatttgttaaatctgtgtatcagatggcctgggctgatctttattaggcttgttattcatgttcttctattttcccaggattcatctgctttagctcaattgggatggccagatatgcggataccaatcttatacaccttatcatggccagatagaatctatcgccctagctcaatttgttaaatctgtctagatatttgcaagcatgacatcttcacaactcctgggctacttttacaggacatctgatgcttttatttggaaatgacctccaagaattcaggtcttattttttattacagtatggggttgttctaataagctactggcatatgatggtaatacttgataaattcgtatggatgagggaaacctaagtcagctgttggtatgtgcatctgtgattaaatctgatgggtttttaatcagaaaaattatgacaaccatcttataaattttaggaaatagatatattattgtacttaaaactaaattttctgaacagctcatcaaacttggaccttgacctaaactcatttcaattttggtgtcattttgaatagttatatgtacgagttgagttggataccatggtaaggttgctaaacatgaatatgctttcgaaaaaaggatgttaagtaacttagtgactctgcttaacactgtaggatttgaggctgccatagtatgctctctgaccgtgctaacgggaggaaggagatgatttaagttctccatgtttataaccagaaagaggaggatagtccaatcatggtaactaaatagtaggtagtaatgtttcacggtaaatcacagttctcgaatgcgatatgatctttgactcggagtattgaagactaatttagtttgagtttgagattagttgtttttgtcattaataaactcacattagcgtctggttacgagctcactactagattttagatctccatttttggtgtacttctgctgcatgtgcctcccatagttgcggatttgcaggtatcacctgattccttttgatttttggattgagatacagtaaaagttatctttgcctgtttccaccacactgtatcatacaggtaaacatgaatacaaggctggcttgatctggcaagtgctcgccattctatgggcccatcacacttttcgagtacactgtttgatcatgaagagcagtctgctgccactaaacttgaggttgttgatcatgattgtctgaaaatttatcggggatatgccttgggatggagaaatgtcacagaacacaggatgaagacgattccaagaatccacccatgtcaggtaacacaatagcatgtcagccatatgctatacatgcatatattatggtatggaaataactccggagagtatatcacattgtgttatgtatgcaaacactaatgcaagacagccatcctgcccatcatgttggtaggggtcaaaagcttcttgctgctgaaattgatggtacaccgtacaagcatttacctttgattttttctgacgttaatatgttgcttcactgaaggactagaagacgccttcacatcacggagtagagctctcagcaacaacagtgcaacgatgtttggacttttgttcacatatgggagtgtttaaactcctgcacctagatttagaaacaccaccatgtaaaatagacaaggcggtgcttttgcaaacatgatgctgccacgagacccgaacttatgtatggccaaacatgttaacatattttgtatgtcatgggctgttccagaaacattctgaaatacacggttccttctaaattctatattttgtcttgatagaacgcccgtaaaagtgcttcaatgttctagtttacatgaaaggtatatagcaatttactcaagaattctattgtctctataggacggctccacttattctagtaaaataaaaaaaactggattaggtgggagcaagcgagtgtaggttgggacttgggaataactaggtttagcaagcgacggtctaggatatgttttattg

SEQ ID NO: 6115 - DNA, 2263 bp, Zea Mays
ctgcctctctccctctccgcctacctctccttccctaccgtctcctgccactgcgcccctccaatagcgttgtcccttgccctcgcgcgccccgtgctcttcgtcgtcttcgccagcccaggtggcaggaagctacccatagccagcctcgtcttctcggccaaatccttcttcggtgcaccgctggccgccacctcggcctccgtcgctttgtcgctcctgtgccagtggctgcctccagctcgctcgaggtcgtcgctacggggaagaaggggcctttccgaccaaatccttctttggcgcgccactggccgccaccgcggcctccgtcgcgttgccactcccgcgacaaccggccgcctccaactcgcttgaggtcatcgcagcggggaagaaggggctttcccagccagatccttctttgacgtgccgctggccaccaccgcgccctccatcgcatcgccactcccgctagctcgaggtcgtcacaatggggaagaagggctgcaagatgaagacacacaagcgatttcgggtgacaaggaaggacaagatcatgcggcggtgcgctgggaagcaacacttgctcgccaagaaaaacaccaagcgcaagaagagactctccaagatggattcatctgctttagctcaattgggatggccagatatgcggataccaatcttatacaccttatcatggccagatagaatctatcgccctagctcaatttgttaaatctgtctagatatttgcaagcatgacatcttcacaactcctgggctacttttacaggacatctgatgcttttatttggaaatgacctccaagaattcaggtcttattttttattacagtatggggttgttctaataagctactggcatatgatggtaatacttgataaattcgtatggatgagggaaacctaagtcagctgttggtatgtgcatctgtgattaaatctgatgggtttttaatcagaaaaattatgacaaccatcttataaattttaggaaatagatatattattgtacttaaaactaaattttctgaacagctcatcaaacttggaccttgacctaaactcatttcaattttggtgtcattttgaatagttatatgtacgagttgagttggataccatggtaaggttgctaaacatgaatatgctttcgaaaaaaggatgttaagtaacttagtgactctgcttaacactgtaggatttgaggctgccatagtatgctctctgaccgtgctaacgggaggaaggagatgatttaagttctccatgtttataaccagaaagaggaggatagtccaatcatggtaactaaatagtaggtagtaatgtttcacggtaaatcacagttctcgaatgcgatatgatctttgactcggagtattgaagactaatttagtttgagtttgagattagttgtttttgtcattaataaactcacattagcgtctggttacgagctcactactagattttagatctccatttttggtgtacttctgctgcatgtgcctcccatagttgcggatttgcaggtaaacatgaatacaaggctggcttgatctggcaagtgctcgccattctatgggcccatcacacttttcgagtacactgtttgatcatgaagagcagtctgctgccactaaacttgaggttgttgatcatgattgtctgaaaatttatcggggatatgccttgggatggagaaatgtcacagaacacaggatgaagacgattccaagaatccacccatgtcaggactagaagacgccttcacatcacggagtagagctctcagcaacaacagtgcaacgatgtttggacttttgttcacatatgggagtgtttaaactcctgcacctagatttagaaacaccaccatgtaaaatagacaaggcggtgcttttgcaaacatgatgctgccacgagacccgaacttatgtatggccaaacatgttaacatattttgtatgtcatgggctgttccagaaacattctgaaatacacggttccttctaaattctatattttgtcttgatagaacgcccgtaaaagtgcttcaatgttctagtttacatgaaaggtatatagcaatttactcaagaattctattgtctctataggacggctccacttattctagtaaaataaaaaaaactggattaggtgggagcaagcgagtgtaggttgggacttgggaataactaggtttagcaagcgacggtctaggatatgttttattg

SEQ ID NO: 6116 - DNA, 5190 bp, Zea Mays
ctgcctctctccctctccgcctacctctccttccctaccgtctcctgccactgcgcccctccaatagcgttgtcccttgccctcgcgcgccccgtgctcttcgtcgtcttcgccagcccaggtggcaggaagctacccatagccagcctcgtcttctcggccaaatccttcttcggtgcaccgctggccgccacctcggcctccgtcgctttgtcgctcctgtgccagtggctgcctccagctcgctcgaggtcgtcgctacggggaagaaggggcctttccgaccaaatccttctttggcgcgccactggccgccaccgcggcctccgtcgcgttgccactcccgcgacaaccggccgcctccaactcgcttgaggtcatcgcagcggggaagaaggggctttcccagccagatccttctttgacgtgccgctggccaccaccgcgccctccatcgcatcgccactcccgctagctcgaggtcgtcacaatggggaagaagggctgcaagatgaagacacacaagcgatttcgggtgacaaggaaggacaagatcatgcggcggtgcgctgggaagcaacacttgctcgccaagaaaaacaccaagcgcaagaagagactctccaagatggtattcttctttcctccactcttgtgccgctcaaattttgttcagccgctcattttgtcgcggaggtcgtttcaatagcagtaaatagaaatcatggctggtgcacctccgtgaattagatgctaatgtggaatgacgatgtcaatagcatttgctctcgtattttaattgcttgatagttttaacgtgacaacgttgctgaaaactagaaaggcgaaatgcaagggcgtgagtttgttttgctgatgtgctctggggtgcttcatttgttatttcttggcatatgtctcctactcattaggaagctcagtttattcctcgattttcaaatgtgtgtgagggccagtacccgatagatggcatgaaaaaagcttttggctaaaattgaacatgtcaaagttcacagattattatcatggtccttaatataacgtttgtttctgaaaatgaactattttattgtacacataaagttaccactactatttttgaaaaagctagaaaatagtcatgacaattttgagaataaggtgggtgggagtgggtgtttaatgttttgacctacgagtacttctaattttacttcattattgttagtcatctaatatatacttgttcctacttcattattaggcgtgggtgtttattctgtgttaataagcagttataaattatggggtgttaaagtagtagcacgtctttgttacaagattatagccgatcaagcatacttcgtttactacttggataacacaccaagcagaaatagctgaacaaatatccctacaaacagctcagacatcattgtttcagttcatgtccgtactctgctttgatcaaatacagttcccggtatccagtccatacattttagtttccagatttttgtttggataacattaagcccatactttttcatattttcagttagcacatacatttcatttcatccaagacatgctgaaaactgaatgtgactcatacaacgggctaggcatcctgttcaaatctaaaaacttagtcagtttggatcacatcatattttcagattttcagcttataagctgaaatttgacgcccagtttccagattttagattttcatttttcagttttttatttaaacagtttggatcacattcatgtttcaactttcgatttgcagataatatgcacgtagttttcatattgacatatattatatggtggtctgaatcttgaaaaattgcttgcttgttgagtgaagaactccttgccatggttgttgcagcctaaatctgtttatattacttgtagatattcagttgttattttgtgccttgctgctaccaaaattaagaaatgataacactatagcccacctagcattgttctaacattttaaaatagaataattggatctataccattaaaagattctaactttctgcataggtctatcgttggaaatgaagggacatgtcgtttttctgtccaacgagaatagcagttgtcttctgctaatattgtcgctggacaaatgaactctgtgtttttgtgtgcaagcaataattcagttgttgctttgttggtctggctatctcactaaccatttttgtggtgatttaatcttgaagcatcgattgtgctaaatagtttatcggatcctttatactcatgttttcccttgaactggacagaggtgccggatagggcttaatagttgaatcgaagattaggatacgttggtaggagtactagggagggatcacctggatcagtgcattaaagttagctgacagtaaatattattgttcttgctattctttcgagcaatgttcctcaaaccatgatacatatatcttgtaataagaaaatcagtgacctttttggtgagtgacaattctattatgatatttttgacgatggagatctaggctagcttgttcctgagttggtcctaaggataggtttcatcactttgtggcgttttattcatcttctagcttagacggtttagttattacactgagaattatattcacttggaaacacttgtttcagctggctatttacttgtagctaatagggagttccatttagttgactatctcacatatagttatccaaatggttaagatgtagtggtgtgttgttttgctttttggtgtgtgtcaatttctgcaggagatgttcgccgatctgtgggccaaaggcttcagtttgctaggtgagcatctgcacagttctgaaataggcgcctatggttgcacagttttttactacaacacttattccacactcaggctaaatttggctcagttggttacaatgtcatgttgattggaatctgccatttgtgaatctatggtctatgacttatctggtagggttagattggataaatgtgttcaatacacaaaaacttgtactatctatatgacactagagattagtgtgccagattgttaaaagctagataatctactgctaccatttaaaagtaactgctggattaattttataggtggattgtgcttaaattgcaatatggagataaatttgttaaatctgtgtatcagatggcctgggctgatctttattaggcttgttattcatgttcttctattttcccaggattcatctgctttagctcaattgggatggccagatatgcggataccaatcttatacaccttatcatggccagatagaatctatcgccctagctcaatttgttaaatctgtctagatatttgcaagcatgacatcttcacaactcctgggctacttttacaggacatctgatgcttttatttggaaatgacctccaagaattcaggtcttattttttattacagtatggggttgttctaataagctactggcatatgatggtaatacttgataaattcgtatggatgagggaaacctaagtcagctgttggtatgtgcatctgtgattaaatctgatgggtttttaatcagaaaaattatgacaaccatcttataaattttaggaaatagatatattattgtacttaaaactaaattttctgaacagctcatcaaacttggaccttgacctaaactcatttcaattttggtgtcattttgaatagttatatgtacgagttgagttggataccatggtaaggttgctaaacatgaatatgctttcgaaaaaaggatgttaagtaacttagtgactctgcttaacactgtaggatttgaggctgccatagtatgctctctgaccgtgctaacgggaggaaggagatgatttaagttctccatgtttataaccagaaagaggaggatagtccaatcatggtaactaaatagtaggtagtaatgtttcacggtaaatcacagttctcgaatgcgatatgatctttgactcggagtattgaagactaatttagtttgagtttgagattagttgtttttgtcattaataaactcacattagcgtctggttacgagctcactactagattttagatctccatttttggtgtacttctgctgcatgtgcctcccatagttgcggatttgcaggtatcacctgattccttttgatttttggattgagatacagtaaaagttatctttgcctgtttccaccacactgtatcatacaggtaaacatgaatacaaggctggcttgatctggcaagtgctcgccattctatgggcccatcacacttttcgagtacactgtttgatcatgaagagcagtctgctgccactaaacttgaggttgttgatcatgattgtctgaaaatttatcggggatatgccttgggatggagaaatgtcacagaacacaggatgaagacgattccaagaatccacccatgtcaggtaacacaatagcatgtcagccatatgctatacatgcatatattatggtatggaaataactccggagagtatatcacattgtgttatgtatgcaaacactaatgcaagacagccatcctgcccatcatgttggtaggggtcaaaagcttcttgctgctgaaattgatggtacaccgtacaagcatttacctttgattttttctgacgttaatatgttgcttcactgaaggactagaagacgccttcacatcacggagtagagctctcagcaacaacagtgcaacgatgtttggacttttgttcacatatgggagtgtttaaactcctgcacctagatttagaaacaccaccatgtaaaatagacaaggcggtgcttttgcaaacatgatgctgccacgagacccgaacttatgtatggccaaacatgttaacatattttgtatgtcatgggctgttccagaaacattctgaaatacacggttccttctaaattctatattttgtcttgatagaacgcccgtaaaagtgcttcaatgttctagtttacatgaaaggtatatagcaatttactcaagaattctattgtctctataggacggctccacttattctagtaaaataaaaaaaactggattaggtgggagcaagcgagtgtaggttgggacttgggaataactaggtttagcaagcgacggtctaggatatgttttattg

SEQ ID NO: 6117 - DNA, 2500 bp, Zea Mays
ctgcctctctccctctccgcctacctctccttccctaccgtctcctgccactgcgcccctccaatagcgttgtcccttgccctcgcgcgccccgtgctcttcgtcgtcttcgccagcccaggtggcaggaagctacccatagccagcctcgtcttctcggccaaatccttcttcggtgcaccgctggccgccacctcggcctccgtcgctttgtcgctcctgtgccagtggctgcctccagctcgctcgaggtcgtcgctacggggaagaaggggcctttccgaccaaatccttctttggcgcgccactggccgccaccgcggcctccgtcgcgttgccactcccgcgacaaccggccgcctccaactcgcttgaggtcatcgcagcggggaagaaggggctttcccagccagatccttctttgacgtgccgctggccaccaccgcgccctccatcgcatcgccactcccgctagctcgaggtcgtcacaatggggaagaagggctgcaagatgaagacacacaaggttctttcctgctagctcgtccttagttcctgtgagtcctttggttgttcgatgccttctactgattcatgtctcgttcggttatgtgtgtcatcactcgtcatggcgtcggtgaagcgatttcgggtgacaaggaaggacaagatcatgcggcggtgcgctgggaagcaacacttgctcgccaagaaaaacaccaagcgcaagaagagactctccaagatggagatgttcgccgatctgtgggccaaaggcttcagtttgctaggattcatctgctttagctcaattgggatggccagatatgcggataccaatcttatacaccttatcatggccagatagaatctatcgccctagctcaatttgttaaatctgtctagatatttgcaagcatgacatcttcacaactcctgggctacttttacaggacatctgatgcttttatttggaaatgacctccaagaattcaggtcttattttttattacagtatggggttgttctaataagctactggcatatgatggtaatacttgataaattcgtatggatgagggaaacctaagtcagctgttggtatgtgcatctgtgattaaatctgatgggtttttaatcagaaaaattatgacaaccatcttataaattttaggaaatagatatattattgtacttaaaactaaattttctgaacagctcatcaaacttggaccttgacctaaactcatttcaattttggtgtcattttgaatagttatatgtacgagttgagttggataccatggtaaggttgctaaacatgaatatgctttcgaaaaaaggatgttaagtaacttagtgactctgcttaacactgtaggatttgaggctgccatagtatgctctctgaccgtgctaacgggaggaaggagatgatttaagttctccatgtttataaccagaaagaggaggatagtccaatcatggtaactaaatagtaggtagtaatgtttcacggtaaatcacagttctcgaatgcgatatgatctttgactcggagtattgaagactaatttagtttgagtttgagattagttgtttttgtcattaataaactcacattagcgtctggttacgagctcactactagattttagatctccatttttggtgtacttctgctgcatgtgcctcccatagttgcggatttgcaggtatcacctgattccttttgatttttggattgagatacagtaaaagttatctttgcctgtttccaccacactgtatcatacaggtaaacatgaatacaaggctggcttgatctggcaagtgctcgccattctatgggcccatcacacttttcgagtacactgtttgatcatgaagagcagtctgctgccactaaacttgaggttgttgatcatgattgtctgaaaatttatcggggatatgccttgggatggagaaatgtcacagaacacaggatgaagacgattccaagaatccacccatgtcagaagacgccttcacatcacggagtagagctctcagcaacaacagtgcaacgatgtttggacttttgttcacatatgggagtgtttaaactcctgcacctagatttagaaacaccaccatgtaaaatagacaaggcggtgcttttgcaaacatgatgctgccacgagacccgaacttatgtatggccaaacatgttaacatattttgtatgtcatgggctgttccagaaacattctgaaatacacggttccttctaaattctatattttgtcttgatagaacgcccgtaaaagtgcttcaatgttctagtttacatgaaaggtatatagcaatttactcaagaattctattgtctctataggacggctccacttattctagtaaaataaaaaaaactggattaggtgggagcaagcgagtgtaggttgggacttgggaataactaggtttagcaagcgacggtctaggatatgttttattg

SEQ ID NO: 6118 - DNA, 2078 bp, Zea Mays
ctgcctctctccctctccgcctacctctccttccctaccgtctcctgccactgcgcccctccaatagcgttgtcccttgccctcgcgcgccccgtgctcttcgtcgtcttcgccagcccaggtggcaggaagctacccatagccagcctcgtcttctcggccaaatccttcttcggtgcaccgctggccgccacctcggcctccgtcgctttgtcgctcctgtgccagtggctgcctccagctcgctcgaggtcgtcgctacggggaagaaggggcctttccgaccaaatccttctttggcgcgccactggccgccaccgcggcctccgtcgcgttgccactcccgcgacaaccggccgcctccaactcgcttgaggtcatcgcagcggggaagaaggggctttcccagccagatccttctttgacgtgccgctggccaccaccgcgccctccatcgcatcgccactcccgctagctcgaggtcgtcacaatggggaagaagggctgcaagatgaagacacacaagcgatttcgggtgacaaggaaggacaagatcatgcggcggtgcgctgggaagcaacacttgctcgccaagaaaaacaccaagcgcaagaagagactctccaagatggagatgttcgccgatctgtgggccaaaggcttcagtttgctaggattcatctgctttagctcaattgggatggccagatatgcggataccaatcttatacaccttatcatggccagatagaatctatcgccctagctcaatttgttaaatctgtctagatatttgcaagcatgacatcttcacaactcctgggctacttttacaggacatctgatgcttttatttggaaatgacctccaagaattcaggtcttattttttattacagtatggggttgttctaataagctactggcatatgatggtaatacttgataaattcgtatggatgagggaaacctaagtcagctgttggtatgtgcatctgtgattaaatctgatgggtttttaatcagaaaaattatgacaaccatcttataaattttaggaaatagatatattattgtacttaaaactaaattttctgaacagctcatcaaacttggaccttgacctaaactcatttcaattttggtgtcattttgaatagttatatgtacgagttgagttggataccatggtaaggttgctaaacatgaatatgctttcgaaaaaaggatgttaagtaacttagtgactctgcttaacactgtaggatttgaggctgccatagtatgctctctgaccgtgctaacgggaggaaggagatgatttaagttctccatgtttataaccagaaagaggaggatagtccaatcatggtaaacatgaatacaaggctggcttgatctggcaagtgctcgccattctatgggcccatcacacttttcgagtacactgtttgatcatgaagagcagtctgctgccactaaacttgaggttgttgatcatgattgtctgaaaatttatcggggatatgccttgggatggagaaatgtcacagaacacaggatgaagacgattccaagaatccacccatgtcaggactagaagacgccttcacatcacggagtagagctctcagcaacaacagtgcaacgatgtttggacttttgttcacatatgggagtgtttaaactcctgcacctagatttagaaacaccaccatgtaaaatagacaaggcggtgcttttgcaaacatgatgctgccacgagacccgaacttatgtatggccaaacatgttaacatattttgtatgtcatgggctgttccagaaacattctgaaatacacggttccttctaaattctatattttgtcttgatagaacgcccgtaaaagtgcttcaatgttctagtttacatgaaaggtatatagcaatttactcaagaattctattgtctctataggacggctccacttattctagtaaaataaaaaaaactggattaggtgggagcaagcgagtgtaggttgggacttgggaataactaggtttagcaagcgacggtctaggatatgttttattg

SEQ ID NO: 6119 - DNA, 2631 bp, Zea Mays
ccactctccttctctgcctctctccctctccgcctacctctccttccctaccgtctcctgccactgcgcccctccaatagcgttgtcccttgccctcgcgcgccccgtgctcttcgtcgtcttcgccagcccaggtggcaggaagctacccatagccagcctcgtcttctcggccaaatccttcttcggtgcaccgctggccgccacctcggcctccgtcgctttgtcgctcctgtgccagtggctgcctccagctcgctcgaggtcgtcgctacggggaagaaggggcctttccgaccaaatccttctttggcgcgccactggccgccaccgcggcctccgtcgcgttgccactcccgcgacaaccggccgcctccaactcgcttgaggtcatcgcagcggggaagaaggggctttcccagccagatccttctttgacgtgccgctggccaccaccgcgccctccatcgcatcgccactcccgctagctcgaggtcgtcacaatggggaagaagggctgcaagatgaagacacacaagcgatttcgggtgacaaggaaggacaagatcatgcggcggtgcgctgggaagcaacacttgctcgccaagaaaaacaccaagcgcaagaagagactctccaagatggagatgttcgccgatctgtgggccaaaggcttcagtttgctaggattcatctgctttagctcaattgggatggccagatatgcggataccaatcttatacaccttatcatggccagatagaatctatcgccctagctcaatttgttaaatctgtctagatatttgcaagcatgacatcttcacaactcctgggctacttttacaggacatctgatgcttttatttggaaatgacctccaagaattcaggtcttattttttattacagtatggggttgttctaataagctactggcatatgatggtaatacttgataaattcgtatggatgagggaaacctaagtcagctgttggtatgtgcatctgtgattaaatctgatgggtttttaatcagaaaaattatgacaaccatcttataaattttaggaaatagatatattattgtacttaaaactaaattttctgaacagctcatcaaacttggaccttgacctaaactcatttcaattttggtgtcattttgaatagttatatgtacgagttgagttggataccatggtaaggttgctaaacatgaatatgctttcgaaaaaaggatgttaagtaacttagtgactctgcttaacactgtaggatttgaggctgccatagtatgctctctgaccgtgctaacgggaggaaggagatgatttaagttctccatgtttataaccagaaagaggaggatagtccaatcatggtaactaaatagtaggtagtaatgtttcacggtaaatcacagttctcgaatgcgatatgatctttgactcggagtattgaagactaatttagtttgagtttgagattagttgtttttgtcattaataaactcacattagcgtctggttacgagctcactactagattttagatctccatttttggtgtacttctgctgcatgtgcctcccatagttgcggatttgcaggtatcacctgattccttttgatttttggattgagatacagtaaaagttatctttgcctgtttccaccacactgtatcatacaggtaaacatgaatacaaggctggcttgatctggcaagtgctcgccattctatgggcccatcacacttttcgagtacactgtttgatcatgaagagcagtctgctgccactaaacttgaggttgttgatcatgattgtctgaaaatttatcggggatatgccttgggatggagaaatgtcacagaacacaggatgaagacgattccaagaatccacccatgtcaggtaacacaatagcatgtcagccatatgctatacatgcatatattatggtatggaaataactccggagagtatatcacattgtgttatgtatgcaaacactaatgcaagacagccatcctgcccatcatgttggtaggggtcaaaagcttcttgctgctgaaattgatggtacaccgtacaagcatttacctttgattttttctgacgttaatatgttgcttcactgaaggactagaagacgccttcacatcacggagtagagctctcagcaacaacagtgcaacgatgtttggacttttgttcacatatgggagtgtttaaactcctgcacctagatttagaaacaccaccatgtaaaatagacaaggcggtgcttttgcaaacatgatgctgccacgagacccgaacttatgtatggccaaacatgttaacatattttgtatgtcatgggctgttccagaaacattctgaaatacacggttccttctaaattctatattttgtcttgatagaacgcccgtaaaagtgcttcaatgttctagtttacatgaaaggtatatagcaatttactcaagaattctattgtctctataggacggctccacttattctagtaaaataaaaaaaactggattaggtgggagcaagcgagtgtaggttgggacttgggaataactaggtttagcaagcgacggtctaggatatgttttattg

SEQ ID NO: 6120 - DNA, 1097 bp, Zea Mays
tatctctccactctccttctctgcctctctccctctccgcctacctctccttccctaccgtctcctgccactgcgcccctccaatagcgttgtcccttgccctcgcgcgccccgtgctcttcgtcgtcttcgccagcccaggtggcaggaagctacccatagccagcctcgtcttctcggccaaatccttcttcggtgcaccgctggccgccacctcggcctccgtcgctttgtcgctcctgtgccagtggctgcctccagctcgctcgaggtcgtcgctacggggaagaaggggcctttccgaccaaatccttctttggcgcgccactggccgccaccgcggcctccgtcgcgttgccactcccgcgacaaccggccgcctccaactcgcttgaggtcatcgcagcggggaagaaggggctttcccagccagatccttctttgacgtgccgctggccaccaccgcgccctccatcgcatcgccactcccgctagctcgaggtcgtcacaatggggaagaagggctgcaagatgaagacacacaagcgatttcgggtgacaaggaaggacaagatcatgcggcggtgcgctgggaagcaacacttgctcgccaagaaaaacaccaagcgcaagaagagactctccaagatggtctatcgttggaaatgaagggacatgtcgtttttctgtccaacgagaatagcagttgtcttctgctaatattgtcgctggacaaatgaactctgtgtttttgtgtgcaagcaataattcagttgttgctttgttggtctggctatctcactaaccatttttgtggtgatttaatcttgaagcatcgattgtgctaaatagtttatcggatcctttatactcatgttttcccttgaactggacagaggtgccggatagggcttaatagttgaatcgaagattaggatacgttggtaggagtactagggagggatcacctggatcagtgcattaaagttagctgacagtaaatattattgttcttgctattctttcgagcaatgttcctcaaaccatgatacatatatcttgtaataagaaaatcagtgacctttttggtgagtgac

SEQ ID NO: 6121 - DNA, 2846 bp, Zea Mays
cctcaagcgcttcggcaaggtaattgtgcctgattcgccccctttcccatctgattcgacgatataagcctacaacagatggtcgtgcactgtggtagtcggcagagacgagcttctgcgattgcatcggattgccacatgggaccatcgtgctatgttactctttggttatactagcaaacttttctcgcctctggctttctatcattcgactcatacttagcgacatgggaataatccattttttcgtggtattgtgaggttgctcaatttctggctgcaggtggacagcgccaacaagtacgagaccttgctggaggtggtttaggtgatgaccgacctgaagttgatcatcaagcgggcctacatttcctccgacgacgagtggttcatgaacggtgagtggcgctgcctccccctgctgtctttaggaagttaagataggttaaaggaagatggaacctttctagggtgatgcaaagcctgacttttacttggattgtgtaatatttctattttctttcctccccctcccccgaacctgatgtgtgatgtgtgttgggctttgcttcgcctttctgcaggtactaaaccaacttttattcatgttgctttctaaatatattgtgtctatgtatctacatataaattatgtttactaagcatgtactgttttcgagtaccaggttatatacttatagagtgtggatacatgtttgcaatagctccagatcaattgcaaatgaaccttgtgagacatctcctctctggcccaactgcttcatactaagacacattatttttagtttactttttattagcttttttgcttacaatcctgtgaagtgtggtgtcaacagcggaatgatgtatccttgcaaataatatttgttaaaacattttgttaactttctaaaattgtcaatatttctttggttcctgacaaatatagtggtctatttactactgattttagagttttctatttactaatacacccatatagggcagagcttagttgagtctgccgtctgccctggttccacagacatgaaagagaactctatcaatttgtgaagataattttgtgaatcacttgaagttttgactgcttgtatcatacttgactgcctggtttcagtttatttattatcatctttgcgtcaccagtgctttacccatactactcttgaattggcgtaccttgattctaatgtaatttattttagcctaatttgtgtgaatcattgaatttatagaccactgctataggctgatccattatagctgagaactcattactcctaattgaagttaaaattgagttttgtagttttgaagttagttttcactgttgcagactgataatgtgtaacatcttatgagttttgattattgaagattcttcttggtctttattattaaagaatccattttgacatgtttaggtgttttttattacttatgttctgcaggttgatatcgtgattattcacggcattgtcttattggatgttcttgacaaggagctcatcacttatgccattagagttcgctaatgatattgtctgatgaagagctagaaacatatctaaaggtgattgcagtaatatccatgggaacagaagttattgaacatgacttgttaaatatcagagagctatatgatcatgtgttggccctactatatgactatttaagaagcaagatgaacactatcaccgcaattctaacagcactggtgggtgaatcagttggtgccatattgtgcatggtggaagtttggtaaacttggccaagcaacctggtagcataatttaaatacttggtgtagagaaggctttattcagagctctaaagaaaagcattctacacccaagtatgggctcatctaccatgcatcctcaattgggaaggcttctcaaaagcataacggaaaaactctcggtctctatctgcaaaagctgctcttgctatccgataggatgcccttggtgttgatgaggacaactccattggcactaagagtcgactgaaggttgagacacagtttcaaattcttgaaggtcgtgacggttgggctggagagcacgctggtaggggaggacctcaacgaccgtgcctttgtctatggcttccttagcttcctggacaagatctcttgcgtaatcgtcctatttgtcttggaattgtacgaagacacgaatgagatgtagcgagatgaggggacacggtgagcaggtacgagatgggcctgatctcctcatacttcaccgtcctctccctggtggtcacatccattctgaggctataggtcaccactccgaaagccattgcaatggaagccccactgcttgtctgacaaactgaagaaaccggtgagtgtagatgtcgatcgggttggaagaaagaagaaagaaatgtgcatcctcttcaattagtttcaattagatttgaaagcaggtcactttgtaatagtatgtgtcttgtcatcgtgttggcacaacacagatgtgtatgatgtagttacgtataactcaagattctcattgctatgctttattataccaacaaagttcagatgtttggatatttctagcttattagggtctgatgcggaacatgtttaaacaaatatatcaaatttgaataatgtcaacatgtgtgatatatagaaactatagcaacacatgagccacattagattttgtcattaaattttcttgttacaacttatataatacacaacattttgaatgatgctaacaaaagaagaataacaattaatgtttttaattattggttccatagcaacgcacgggcatacacctagtaaggtagaaaag

SEQ ID NO: 6122 - DNA, 3278 bp, Zea Mays
cctcaagcgcttcggcaaggtaattgtgcctgattcgccccctttcccatctgattcgacgatataagcctacaacagatggtcgtgcactgtggtagtcggcagagacgagcttctgcgattgcatcggattgccacatgggaccatcgtgctatgttactctttggttatactagcaaacttttctcgcctctggctttctatcattcgactcatacttagcgacatgggaataatccattttttcgtggtattgtgaggttgctcaatttctggctgcaggtggacagcgccaacaagtacgagaccttgctggaggtggtttaggtgatgaccgacctgaagttgatcatcaagcgggcctacatttcctccgacgacgagtggttcatgaacggtgagtggcgctgcctccccctgctgtctttaggaagttaagataggttaaaggaagatggaacctttctagggtgatgcaaagcctgacttttacttggattgtgtaatatttctattttctttcctccccctcccccgaacctgatgtgtgatgtgtgttgggctttgcttcgcctttctgcaggtactaaaccaacttttattcatgttgctttctaaatatattgtgtctatgtatctacatataaattatgtttactaagcatgtactgttttcgagtaccaggttatatacttatagagtgtggatacatgtttgcaatagctccagatcaattgcaaatgaaccttgtgagacatctcctctctggcccaactgcttcatactaagacacattatttttagtttactttttattagcttttttgcttacaatcctgtgaagtgtggtgtcaacagcggaatgatgtatccttgcaaataatatttgttaaaacattttgttaactttctaaaattgtcaatatttctttggttcctgacaaatatagtggtctatttactactgattttagagttttctatttactaatacacccatatagggcagagcttagttgagtctgccgtctgccctggttccacagacatgaaagagaactctatcaatttgtgaagataattttgtgaatcacttgaagttttgactgcttgtatcatacttgactgcctggtttcagtttatttattatcatctttgcgtcaccagtgctttacccatactactcttgaattggcgtaccttgattctaatgtaatttattttagcctaatttgtgtgaatcattgaatttatagaccactgctataggctgatccattatagctgagaactcattactcctaattgaagttaaaattgagttttgtagttttgaagttagttttcactgttgcagactgataatgtgtaacatcttatgagttttgattattgaagattcttcttggtctttattattaaagaatccattttgacatgtttaggtgttttttattacttatgttctgcaggttgatatcgtgattattcacggcattgtcttattggatgttcttgacaaggagctcatcacttatgccattagagttcgctaatggtatggctggcactttccaaagctcatcaaaatagttttagataatatttagtatgccaaagctgtgaaggtgatgggcaacagagctaatgcaatcaaccttgacttctcagatatattgtctgatgaagagctagaaacatatctaaaggtgattgcagtaatatccatgggaacagaagttattgaacatgacttgttaaatatcagagagctatatgatcatgtgttggccctactatatgactatttaagaagcaagatgaacactatcaccgcaattctaacagcactggtgggtgaatcagttggtgccatattgtgcatggtggaagtttggtaaacttggccaagcaacctggtagcataatttaaatacttggtgtagagaaggtttgttattgcttatggataattctggaatcttgtaatttttagctctttttttggtgtgtatctgaaccttatgtgcatcaatgcttagtatgacataagtaaacattacttatttgcttatgttgtctgctaaaacagtctaacatcttgtaaatcatgtggatttcatatttgttacttatttcttttaattggttgtttactaataatgctgtagtggttttactcgatggcgtgcgtcaactttatttgccgatgttgtctgctataattttctttctccactaagaactaaaggttatgtttctctacaggctttattcagagctctaaagaaaagcattctacacccaagtatgggctcatctaccatgcatcctcaattgggaaggcttctcaaaagcataacggaaaaactctcggtctctatctgcaaaagctgctcttgctatccgataggatgcccttggtgttgatgaggacaactccattggcactaagagtcgactgaaggttgagacacagtttcaaattcttgaaggtcgtgacggttgggctggagagcacgctggtaggggaggacctcaacgaccgtgcctttgtctatggcttccttagcttcctggacaagatctcttgcgtaatcgtcctatttgtcttggaattgtacgaagacacgaatgagatgtagcgagatgaggggacacggtgagcaggtacgagatgggcctgatctcctcatacttcaccgtcctctccctggtggtcacatccattctgaggctataggtcaccactccgaaagccattgcaatggaagccccactgcttgtctgacaaactgaagaaaccggtgagtgtagatgtcgatcgggttggaagaaagaagaaagaaatgtgcatcctcttcaattagtttcaattagatttgaaagcaggtcactttgtaatagtatgtgtcttgtcatcgtgttggcacaacacagatgtgtatgatgtagttacgtataactcaagattctcattgctatgctttattataccaacaaagttcagatgtttggatatttctagcttattagggtctgatgcggaacatgtttaaacaaatatatcaaatttgaataatgtcaacatgtgtgatatatagaaactatagcaacacatgagccacattagattttgtcattaaattttcttgttacaacttatataatacacaacattttgaatgatgctaacaaaagaagaataacaattaatgtttttaattattggttccatagcaacgcacgggcatacacctagtaaggtagaaaag

SEQ ID NO: 6123 - DNA, 2318 bp, Zea Mays
ctgcacctcaagcgcttcggcaaggtaattgtgcctgattcgccccctttcccatctgattcgacgatataagcctacaacagatggtcgtgcactgtggtagtcggcagagacgagcttctgcgattgcatcggattgccacatgggaccatcgtgctatgttactctttggttatactagcaaacttttctcgcctctggctttctatcattcgactcatacttagcgacatgggaataatccattttttcgtggtattgtgaggttgctcaatttctggctgcaggtggacagcgccaacaagtacgagaccttgctggaggtggtttaggtgatgaccgacctgaagttgatcatcaagcgggcctacatttcctccgacgacgagtggttcatgaacggttatatacttatagagtgtggatacatgtttgcaatagctccagatcaattgcaaatgaaccttgttgatatcgtgattattcacggcattgtcttattggatgttcttgacaaggagctcatcacttatgccattagagttcgctaatggtatggctggcactttccaaagctcatcaaaatagttttagataatatttagtatgccaaagctgtgaaggtgatgggcaacagagctaatgcaatcaaccttgacttctcagatgtaattgttgacatctatgtatgatctccttgactactatgggaactgtttagtgagaaactatattgttttcagatattgtctgatgaagagctagaaacatatctaaaggtgattgcagtaatatccatgggaacagaagttattgaacatgacttgttaaatatcagagagctatatgatcatgtgttggccctactatatgactatttaagaagcaagatgaacactatcaccgcaattctaacagcactggtgggtgaatcagttggtgccatattgtgcatggtggaagtttggtaaacttggccaagcaacctggtagcataatttaaatacttggtgtagagaaggtttgttattgcttatggataattctggaatcttgtaatttttagctctttttttggtgtgtatctgaaccttatgtgcatcaatgcttagtatgacataagtaaacattacttatttgcttatgttgtctgctaaaacagtctaacatcttgtaaatcatgtggatttcatatttgttacttatttcttttaattggttgtttactaataatgctgtagtggttttactcgatggcgtgcgtcaactttatttgccgatgttgtctgctataattttctttctccactaagaactaaaggttatgtttctctacaggctttattcagagctctaaagaaaagcattctacacccaagtatgggctcatctaccatgcatcctcaattgggaaggcttctcaaaagcataacggaaaaactctcggtctctatctgcaaaagctgctcttgctatccgataggatgcccttggtgttgatgaggacaactccattggcactaagagtcgactgaaggtcgtgacggttgggctggagagcacgctggtaggggaggacctcaacgaccgtgcctttgtctatggcttccttagcttcctggacaagatctcttgcgtaatcgtcctatttgtcttggaattgtacgaagacacgaatgagatgtagcgagatgaggggacacggtgagcaggtacgagatgggcctgatctcctcatacttcaccgtcctctccctggtggtcacatccattctgaggctataggtcaccactccgaaagccattgcaatggaagccccactgcttgtctgacaaactgaagaaaccggtgagtgtagatgtcgatcgggttggaagaaagaagaaagaaatgtgcatcctcttcaattagtttcaattagatttgaaagcaggtcactttgtaatagtatgtgtcttgtcatcgtgttggcacaacacagatgtgtatgatgtagttacgtataactcaagattctcattgctatgctttattataccaacaaagttcagatgtttggatatttctagcttattagggtctgatgcggaacatgtttaaacaaatatatcaaatttgaataatgtcaacatgtgtgatatatagaaactatagcaacacatgagccacattagattttgtcattaaattttcttgttacaacttatataatacacaacattttgaatgatgctaacaaaagaagaataacaattaatgtttttaattattggttccatagcaacgcacgggcatacacctagtaaggtagaaaag

SEQ ID NO: 6124 - DNA, 2220 bp, Zea Mays
aagacattggtgtgggtggctttcagaagatttacggtggctgcacctcaagcgcttcggcaaggtggacagcgccaacaagtacgagaccttgctggaggtggtttaggtgatgaccgacctgaagttgatcatcaagcgggcctacatttcctccgacgacgagtggttcatgaacggtgagtggcgctgcctccccctgctgtctttaggaagttaagataggttaaaggaagatggaacctttctagggtgatgcaaagcctgacttttacttggattgtgtaatatttctattttctttcctccccctcccccgaacctgatgtgtgatgtgtgttgggctttgcttcgcctttctgcaggtactaaaccaacttttattcatgttgctttctaaatatattgtgtctatgtatctacatataaattatgtttactaagcatgtactgttttcgagtaccaggttatatacttatagagtgtggatacatgtttgcaatagctccagatcaattgcaaatgaaccttgttgatatcgtgattattcacggcattgtcttattggatgttcttgacaaggagctcatcacttatgccattagagttcgctaatgatattgtctgatgaagagctagaaacatatctaaaggtgattgcagtaatatccatgggaacagaagttattgaacatgacttgttaaatatcagagagctatatgatcatgtgttggccctactatatgactatttaagaagcaagatgaacactatcaccgcaattctaacagcactggtgggtgaatcagttggtgccatattgtgcatggtggaagtttggtaaacttggccaagcaacctggtagcataatttaaatacttggtgtagagaaggtttgttattgcttatggataattctggaatcttgtaatttttagctctttttttggtgtgtatctgaaccttatgtgcatcaatgcttagtatgacataagtaaacattacttatttgcttatgttgtctgctaaaacagtctaacatcttgtaaatcatgtggatttcatatttgttacttatttcttttaattggttgtttactaataatgctgtagtggttttactcgatggcgtgcgtcaactttatttgccgatgttgtctgctataattttctttctccactaagaactaaaggttatgtttctctacaggctttattcagagctctaaagaaaagcattctacacccaagtatgggctcatctaccatgcatcctcaattgggaaggcttctcaaaagcataacggaaaaactctcggtctctatctgcaaaagctgctcttgctatccgataggatgcccttggtgttgatgaggacaactccattggcactaagagtcgactgaaggttgagacacagtttcaaattcttgaaggtcgtgacggttgggctggagagcacgctggtaggggaggacctcaacgaccgtgcctttgtctatggcttccttagcttcctggacaagatctcttgcgtaatcgtcctatttgtcttggaattgtacgaagacacgaatgagatgtagcgagatgaggggacacggtgagcaggtacgagatgggcctgatctcctcatacttcaccgtcctctccctggtggtcacatccattctgaggctataggtcaccactccgaaagccattgcaatggaagccccactgcttgtctgacaaactgaagaaaccggtgagtgtagatgtcgatcgggttggaagaaagaagaaagaaatgtgcatcctcttcaattagtttcaattagatttgaaagcaggtcactttgtaatagtatgtgtcttgtcatcgtgttggcacaacacagatgtgtatgatgtagttacgtataactcaagattctcattgctatgctttattataccaacaaagttcagatgtttggatatttctagcttattagggtctgatgcggaacatgtttaaacaaatatatcaaatttgaataatgtcaacatgtgtgatatatagaaactatagcaacacatgagccacattagattttgtcattaaattttcttgttacaacttatataatacacaacattttgaatgatgctaacaaaagaagaataacaattaatgtttttaattattggttccatagcaacgcacgggcatacacctagtaaggtagaaaag

SEQ ID NO: 6125 - DNA, 1867 bp, Zea Mays
aagacattggtgtgggtggctttcagaagatttacggtggctgcacctcaagcgcttcggcaaggtggacagcgccaacaagtacgagaccttgctggaggtggtttaggtgatgaccgacctgaagttgatcatcaagcgggcctacatttcctccgacgacgagtggttcatgaacggttgatatcgtgattattcacggcattgtcttattggatgttcttgacaaggagctcatcacttatgccattagagttcgctaatgatattgtctgatgaagagctagaaacatatctaaaggtgattgcagtaatatccatgggaacagaagttattgaacatgacttgttaaatatcagagagctatatgatcatgtgttggccctactatatgactatttaagaagcaagatgaacactatcaccgcaattctaacagcactggtgggtgaatcagttggtgccatattgtgcatggtggaagtttggtaaacttggccaagcaacctggtagcataatttaaatacttggtgtagagaaggtttgttattgcttatggataattctggaatcttgtaatttttagctctttttttggtgtgtatctgaaccttatgtgcatcaatgcttagtatgacataagtaaacattacttatttgcttatgttgtctgctaaaacagtctaacatcttgtaaatcatgtggatttcatatttgttacttatttcttttaattggttgtttactaataatgctgtagtggttttactcgatggcgtgcgtcaactttatttgccgatgttgtctgctataattttctttctccactaagaactaaaggttatgtttctctacaggctttattcagagctctaaagaaaagcattctacacccaagtatgggctcatctaccatgcatcctcaattgggaaggcttctcaaaagcataacggaaaaactctcggtctctatctgcaaaagctgctcttgctatccgataggatgcccttggtgttgatgaggacaactccattggcactaagagtcgactgaaggttgagacacagtttcaaattcttgaaggtcgtgacggttgggctggagagcacgctggtaggggaggacctcaacgaccgtgcctttgtctatggcttccttagcttcctggacaagatctcttgcgtaatcgtcctatttgtcttggaattgtacgaagacacgaatgagatgtagcgagatgaggggacacggtgagcaggtacgagatgggcctgatctcctcatacttcaccgtcctctccctggtggtcacatccattctgaggctataggtcaccactccgaaagccattgcaatggaagccccactgcttgtctgacaaactgaagaaaccggtgagtgtagatgtcgatcgggttggaagaaagaagaaagaaatgtgcatcctcttcaattagtttcaattagatttgaaagcaggtcactttgtaatagtatgtgtcttgtcatcgtgttggcacaacacagatgtgtatgatgtagttacgtataactcaagattctcattgctatgctttattataccaacaaagttcagatgtttggatatttctagcttattagggtctgatgcggaacatgtttaaacaaatatatcaaatttgaataatgtcaacatgtgtgatatatagaaactatagcaacacatgagccacattagattttgtcattaaattttcttgttacaacttatataatacacaacattttgaatgatgctaacaaaagaagaataacaattaatgtttttaattattggttccatagcaacgcacgggcatacacctagtaaggtagaaaag

SEQ ID NO: 6126 - DNA, 1903 bp, Zea Mays
aagacattggtgtgggtggctttcagaagatttacggtggctgcacctcaagcgcttcggcaaggtggacagcgccaacaagtacgagaccttgctggaggtggtttaggtgatgaccgacctgaagttgatcatcaagcgggcctacatttcctccgacgacgagtggttcatgaacggtgagtggcgctgcctccccctgctgtctttaggaagttaagataggttaaaggaagatggaacctttctagggtgatgcaaagcctgacttttacttggattgtgtaatatttctattttctttcctccccctcccccgaacctgatgtgtgatgtgtgttgggctttgcttcgcctttctgcaggtactaaaccaacttttattcatgttgctttctaaatatattgtgtctatgtatctacatataaattatgtttactaagcatgtactgttttcgagtaccaggttatatacttatagagtgtggatacatgtttgcaatagctccagatcaattgcaaatgaaccttgttgatatcgtgattattcacggcattgtcttattggatgttcttgacaaggagctcatcacttatgccattagagttcgctaatgatattgtctgatgaagagctagaaacatatctaaaggtgattgcagtaatatccatgggaacagaagttattgaacatgacttgttaaatatcagagagctatatgatcatgtgttggccctactatatgactatttaagaagcaagatgaacactatcaccgcaattctaacagcactggtgggtgaatcagttggtgccatattgtgcatggtggaagtttggtaaacttggccaagcaacctggtagcataatttaaatacttggtgtagagaaggctttattcagagctctaaagaaaagcattctacacccaagtatgggctcatctaccatgcatcctcaattgggaaggcttctcaaaagcataacggaaaaactctcggtctctatctgcaaaagctgctcttgctatccgataggatgcccttggtgttgatgaggacaactccattggcactaagagtcgactgaaggttgagacacagtttcaaattcttgaaggtcgtgacggttgggctggagagcacgctggtaggggaggacctcaacgaccgtgcctttgtctatggcttccttagcttcctggacaagatctcttgcgtaatcgtcctatttgtcttggaattgtacgaagacacgaatgagatgtagcgagatgaggggacacggtgagcaggtacgagatgggcctgatctcctcatacttcaccgtcctctccctggtggtcacatccattctgaggctataggtcaccactccgaaagccattgcaatggaagccccactgcttgtctgacaaactgaagaaaccggtgagtgtagatgtcgatcgggttggaagaaagaagaaagaaatgtgcatcctcttcaattagtttcaattagatttgaaagcaggtcactttgtaatagtatgtgtcttgtcatcgtgttggcacaacacagatgtgtatgatgtagttacgtataactcaagattctcattgctatgctttattataccaacaaagttcagatgtttggatatttctagcttattagggtctgatgcggaacatgtttaaacaaatatatcaaatttgaataatgtcaacatgtgtgatatatagaaactatagcaacacatgagccacattagattttgtcattaaattttcttgttacaacttatataatacacaacattttgaatgatgctaacaaaagaagaataacaattaatgtttttaattattggttccatagcaacgcacgggcatacacctagtaaggtagaaaag

SEQ ID NO: 6127 - DNA, 3059 bp, Zea Mays
aagacattggtgtgggtggctttcagaagatttacggtggctgcacctcaagcgcttcggcaaggtggacagcgccaacaagtacgagaccttgctggaggtggtttaggtgatgaccgacctgaagttgatcatcaagcgggcctacatttcctccgacgacgagtggttcatgaacggtgagtggcgctgcctccccctgctgtctttaggaagttaagataggttaaaggaagatggaacctttctagggtgatgcaaagcctgacttttacttggattgtgtaatatttctattttctttcctccccctcccccgaacctgatgtgtgatgtgtgttgggctttgcttcgcctttctgcaggtactaaaccaacttttattcatgttgctttctaaatatattgtgtctatgtatctacatataaattatgtttactaagcatgtactgttttcgagtaccaggttatatacttatagagtgtggatacatgtttgcaatagctccagatcaattgcaaatgaaccttgtgagacatctcctctctggcccaactgcttcatactaagacacattatttttagtttactttttattagcttttttgcttacaatcctgtgaagtgtggtgtcaacagcggaatgatgtatccttgcaaataatatttgttaaaacattttgttaactttctaaaattgtcaatatttctttggttcctgacaaatatagtggtctatttactactgattttagagttttctatttactaatacacccatatagggcagagcttagttgagtctgccgtctgccctggttccacagacatgaaagagaactctatcaatttgtgaagataattttgtgaatcacttgaagttttgactgcttgtatcatacttgactgcctggtttcagtttatttattatcatctttgcgtcaccagtgctttacccatactactcttgaattggcgtaccttgattctaatgtaatttattttagcctaatttgtgtgaatcattgaatttatagaccactgctataggctgatccattatagctgagaactcattactcctaattgaagttaaaattgagttttgtagttttgaagttagttttcactgttgcagactgataatgtgtaacatcttatgagttttgattattgaagattcttcttggtctttattattaaagaatccattttgacatgtttaggtgttttttattacttatgttctgcaggttgatatcgtgattattcacggcattgtcttattggatgttcttgacaaggagctcatcacttatgccattagagttcgctaatggtatggctggcactttccaaagctcatcaaaatagttttagataatatttagtatgccaaagctgtgaaggtgatgggcaacagagctaatgcaatcaaccttgacttctcagatatattgtctgatgaagagctagaaacatatctaaaggtgattgcagtaatatccatgggaacagaagttattgaacatgacttgttaaatatcagagagctatatgatcatgtgttggccctactatatgactatttaagaagcaagatgaacactatcaccgcaattctaacagcactggtgggtgaatcagttggtgccatattgtgcatggtggaagtttggtaaacttggccaagcaacctggtagcataatttaaatacttggtgtagagaaggtttgttattgcttatggataattctggaatcttgtaatttttagctctttttttggtgtgtatctgaaccttatgtgcatcaatgcttagtatgacataagtaaacattacttatttgcttatgttgtctgctaaaacagtctaacatcttgtaaatcatgtggatttcatatttgttacttatttcttttaattggttgtttactaataatgctgtagtggttttactcgatggcgtgcgtcaactttatttgccgatgttgtctgctataattttctttctccactaagaactaaaggttatgtttctctacaggctttattcagagctctaaagaaaagcattctacacccaagtatgggctcatctaccatgcatcctcaattgggaaggcttctcaaaagcataacggaaaaactctcggtctctatctgcaaaagctgctcttgctatccgataggatgcccttggtgttgatgaggacaactccattggcactaagagtcgactgaaggttgagacacagtttcaaattcttgaaggtcgtgacggttgggctggagagcacgctggtaggggaggacctcaacgaccgtgcctttgtctatggcttccttagcttcctggacaagatctcttgcgtaatcgtcctatttgtcttggaattgtacgaagacacgaatgagatgtagcgagatgaggggacacggtgagcaggtacgagatgggcctgatctcctcatacttcaccgtcctctccctggtggtcacatccattctgaggctataggtcaccactccgaaagccattgcaatggaagccccactgcttgtctgacaaactgaagaaaccggtgagtgtagatgtcgatcgggttggaagaaagaagaaagaaatgtgcatcctcttcaattagtttcaattagatttgaaagcaggtcactttgtaatagtatgtgtcttgtcatcgtgttggcacaacacagatgtgtatgatgtagttacgtataactcaagattctcattgctatgctttattataccaacaaagttcagatgtttggatatttctagcttattagggtctgatgcggaacatgtttaaacaaatatatcaaatttgaataatgtcaacatgtgtgatatatagaaactatagcaacacatgagccacattagattttgtcattaaattttcttgttacaacttatataatacacaacattttgaatgatgctaacaaaagaagaataacaattaatgtttttaattattggttccatagcaacgcacgggcatacacctagtaaggtagaaaag

SEQ ID NO: 6128 - DNA, 2226 bp, Zea Mays
aagacattggtgtgggtggctttcagaagatttacggtggctgcacctcaagcgcttcggcaaggtggacagcgccaacaagtacgagaccttgctggaggtggtttaggtgatgaccgacctgaagttgatcatcaagcgggcctacatttcctccgacgacgagtggttcatgaacggtgagtggcgctgcctccccctgctgtctttaggaagttaagataggttaaaggaagatggaacctttctagggtgatgcaaagcctgacttttacttggattgtgtaatatttctattttctttcctccccctcccccgaacctgatgtgtgatgtgtgttgggctttgcttcgcctttctgcaggttatatacttatagagtgtggatacatgtttgcaatagctccagatcaattgcaaatgaaccttgtgagacatctcctctctggcccaactgcttcatactaagacacattatttttagtttactttttattagcttttttgcttacaatcctgtgaagtgtggtgtcaacagcggaatgatgtatccttgcaaataatatttgttaaaacattttgttaactttctaaaattgtcaatatttctttggttcctgacaaatatagtggtctatttactactgattttagagttttctatttactaatacacccatatagggcagagcttagttgagtctgccgtctgccctggttccacagacatgaaagagaactctatcaatttgtgaagataattttgtgaatcacttgaagttttgactgcttgtatcatacttgactgcctggtttcagtttatttattatcatctttgcgtcaccagtgctttacccatactactcttgaattggcgtaccttgattctaatgtaatttattttagcctaatttgtgtgaatcattgaatttatagaccactgctataggctgatccattatagctgagaactcattactcctaattgaagttaaaattgagttttgtagttttgaagttagttttcactgttgcagactgataatgtgtaacatcttatgagttttgattattgaagattcttcttggtctttattattaaagaatccattttgacatgtttaggtgttttttattacttatgttctgcaggttgatatcgtgattattcacggcattgtcttattggatgttcttgacaaggagctcatcacttatgccattagagttcgctaatggctttattcagagctctaaagaaaagcattctacacccaagtatgggctcatctaccatgcatcctcaattgggaaggcttctcaaaagcataacggaaaaactctcggtctctatctgcaaaagctgctcttgctatccgataggatgcccttggtgttgatgaggacaactccattggcactaagagtcgactgaaggtacgtggtcgtgacggttgggctggagagcacgctggtaggggaggacctcaacgaccgtgcctttgtctatggcttccttagcttcctggacaagatctcttgcgtaatcgtcctatttgtcttggaattgtacgaagacacgaatgagatgtagcgagatgaggggacacggtgagcaggtacgagatgggcctgatctcctcatacttcaccgtcctctccctggtggtcacatccattctgaggctataggtcaccactccgaaagccattgcaatggaagccccactgcttgtctgacaaactgaagaaaccggtgagtgtagatgtcgatcgggttggaagaaagaagaaagaaatgtgcatcctcttcaattagtttcaattagatttgaaagcaggtcactttgtaatagtatgtgtcttgtcatcgtgttggcacaacacagatgtgtatgatgtagttacgtataactcaagattctcattgctatgctttattataccaacaaagttcagatgtttggatatttctagcttattagggtctgatgcggaacatgtttaaacaaatatatcaaatttgaataatgtcaacatgtgtgatatatagaaactatagcaacacatgagccacattagattttgtcattaaattttcttgttacaacttatataatacacaacattttgaatgatgctaacaaaagaagaataacaattaatgtttttaattattggttccatagcaacgcacgggcatacacctagtaaggtagaaaag

SEQ ID NO: 6129 - DNA, 1597 bp, Zea Mays
aagacattggtgtgggtggctttcagaagatttacggtggctgcacctcaagcgcttcggcaaggtggacagcgccaacaagtacgagaccttgctggaggtggtttaggtgatgaccgacctgaagttgatcatcaagcgggcctacatttcctccgacgacgagtggttcatgaacggtgagtggcgctgcctccccctgctgtctttaggaagttaagataggttaaaggaagatggaacctttctagggtgatgcaaagcctgacttttacttggattgtgtaatatttctattttctttcctccccctcccccgaacctgatgtgtgatgtgtgttgggctttgcttcgcctttctgcaggtactaaaccaacttttattcatgttgctttctaaatatattgtgtctatgtatctacatataaattatgtttactaagcatgtactgttttcgagtaccaggttatatacttatagagtgtggatacatgtttgcaatagctccagatcaattgcaaatgaaccttgttgatatcgtgattattcacggcattgtcttattggatgttcttgacaaggagctcatcacttatgccattagagttcgctaatggctttattcagagctctaaagaaaagcattctacacccaagtatgggctcatctaccatgcatcctcaattgggaaggcttctcaaaagcataacggaaaaactctcggtctctatctgcaaaagctgctcttgctatccgataggatgcccttggtgttgatgaggacaactccattggcactaagagtcgactgaaggtcgtgacggttgggctggagagcacgctggtaggggaggacctcaacgaccgtgcctttgtctatggcttccttagcttcctggacaagatctcttgcgtaatcgtcctatttgtcttggaattgtacgaagacacgaatgagatgtagcgagatgaggggacacggtgagcaggtacgagatgggcctgatctcctcatacttcaccgtcctctccctggtggtcacatccattctgaggctataggtcaccactccgaaagccattgcaatggaagccccactgcttgtctgacaaactgaagaaaccggtgagtgtagatgtcgatcgggttggaagaaagaagaaagaaatgtgcatcctcttcaattagtttcaattagatttgaaagcaggtcactttgtaatagtatgtgtcttgtcatcgtgttggcacaacacagatgtgtatgatgtagttacgtataactcaagattctcattgctatgctttattataccaacaaagttcagatgtttggatatttctagcttattagggtctgatgcggaacatgtttaaacaaatatatcaaatttgaataatgtcaacatgtgtgatatatagaaactatagcaacacatgagccacattagattttgtcattaaattttcttgttacaacttatataatacacaacattttgaatgatgctaacaaaagaagaataacaattaatgtttttaattattggttccatagcaacgcacgggcatacacctagtaaggtagaaaag

SEQ ID NO: 6130 - DNA, 2247 bp, Zea Mays
aagacattggtgtgggtggctttcagaagatttacggtggctgcacctcaagcgcttcggcaaggtggacagcgccaacaagtacgagaccttgctggaggtggtttaggtgatgaccgacctgaagttgatcatcaagcgggcctacatttcctccgacgacgagtggttcatgaacggtgagtggcgctgcctccccctgctgtctttaggaagttaagataggttaaaggaagatggaacctttctagggtgatgcaaagcctgacttttacttggattgtgtaatatttctattttctttcctccccctcccccgaacctgatgtgtgatgtgtgttgggctttgcttcgcctttctgcaggttatatacttatagagtgtggatacatgtttgcaatagctccagatcaattgcaaatgaaccttgtgagacatctcctctctggcccaactgcttcatactaagacacattatttttagtttactttttattagcttttttgcttacaatcctgtgaagtgtggtgtcaacagcggaatgatgtatccttgcaaataatatttgttaaaacattttgttaactttctaaaattgtcaatatttctttggttcctgacaaatatagtggtctatttactactgattttagagttttctatttactaatacacccatatagggcagagcttagttgagtctgccgtctgccctggttccacagacatgaaagagaactctatcaatttgtgaagataattttgtgaatcacttgaagttttgactgcttgtatcatacttgactgcctggtttcagtttatttattatcatctttgcgtcaccagtgctttacccatactactcttgaattggcgtaccttgattctaatgtaatttattttagcctaatttgtgtgaatcattgaatttatagaccactgctataggctgatccattatagctgagaactcattactcctaattgaagttaaaattgagttttgtagttttgaagttagttttcactgttgcagactgataatgtgtaacatcttatgagttttgattattgaagattcttcttggtctttattattaaagaatccattttgacatgtttaggtgttttttattacttatgttctgcaggttgatatcgtgattattcacggcattgtcttattggatgttcttgacaaggagctcatcacttatgccattagagttcgctaatggctttattcagagctctaaagaaaagcattctacacccaagtatgggctcatctaccatgcatcctcaattgggaaggcttctcaaaagcataacggaaaaactctcggtctctatctgcaaaagctgctcttgctatccgataggatgcccttggtgttgatgaggacaactccattggcactaagagtcgactgaaggttgagacacagtttcaaattcttgaaggtcgtgacggttgggctggagagcacgctggtaggggaggacctcaacgaccgtgcctttgtctatggcttccttagcttcctggacaagatctcttgcgtaatcgtcctatttgtcttggaattgtacgaagacacgaatgagatgtagcgagatgaggggacacggtgagcaggtacgagatgggcctgatctcctcatacttcaccgtcctctccctggtggtcacatccattctgaggctataggtcaccactccgaaagccattgcaatggaagccccactgcttgtctgacaaactgaagaaaccggtgagtgtagatgtcgatcgggttggaagaaagaagaaagaaatgtgcatcctcttcaattagtttcaattagatttgaaagcaggtcactttgtaatagtatgtgtcttgtcatcgtgttggcacaacacagatgtgtatgatgtagttacgtataactcaagattctcattgctatgctttattataccaacaaagttcagatgtttggatatttctagcttattagggtctgatgcggaacatgtttaaacaaatatatcaaatttgaataatgtcaacatgtgtgatatatagaaactatagcaacacatgagccacattagattttgtcattaaattttcttgttacaacttatataatacacaacattttgaatgatgctaacaaaagaagaataacaattaatgtttttaattattggttccatagcaacgcacgggcatacacctagtaaggtagaaaag

SEQ ID NO: 6131 - DNA, 2944 bp, Zea Mays
aagacattggtgtgggtggctttcagaagatttacggtggctgcacctcaagcgcttcggcaaggtggacagcgccaacaagtacgagaccttgctggaggtggtttaggtgatgaccgacctgaagttgatcatcaagcgggcctacatttcctccgacgacgagtggttcatgaacggtgagtggcgctgcctccccctgctgtctttaggaagttaagataggttaaaggaagatggaacctttctagggtgatgcaaagcctgacttttacttggattgtgtaatatttctattttctttcctccccctcccccgaacctgatgtgtgatgtgtgttgggctttgcttcgcctttctgcaggtactaaaccaacttttattcatgttgctttctaaatatattgtgtctatgtatctacatataaattatgtttactaagcatgtactgttttcgagtaccaggttatatacttatagagtgtggatacatgtttgcaatagctccagatcaattgcaaatgaaccttgtgagacatctcctctctggcccaactgcttcatactaagacacattatttttagtttactttttattagcttttttgcttacaatcctgtgaagtgtggtgtcaacagcggaatgatgtatccttgcaaataatatttgttaaaacattttgttaactttctaaaattgtcaatatttctttggttcctgacaaatatagtggtctatttactactgattttagagttttctatttactaatacacccatatagggcagagcttagttgagtctgccgtctgccctggttccacagacatgaaagagaactctatcaatttgtgaagataattttgtgaatcacttgaagttttgactgcttgtatcatacttgactgcctggtttcagtttatttattatcatctttgcgtcaccagtgctttacccatactactcttgaattggcgtaccttgattctaatgtaatttattttagcctaatttgtgtgaatcattgaatttatagaccactgctataggctgatccattatagctgagaactcattactcctaattgaagttaaaattgagttttgtagttttgaagttagttttcactgttgcagactgataatgtgtaacatcttatgagttttgattattgaagattcttcttggtctttattattaaagaatccattttgacatgtttaggtgttttttattacttatgttctgcaggttgatatcgtgattattcacggcattgtcttattggatgttcttgacaaggagctcatcacttatgccattagagttcgctaatgatattgtctgatgaagagctagaaacatatctaaaggtgattgcagtaatatccatgggaacagaagttattgaacatgacttgttaaatatcagagagctatatgatcatgtgttggccctactatatgactatttaagaagcaagatgaacactatcaccgcaattctaacagcactggtgggtgaatcagttggtgccatattgtgcatggtggaagtttggtaaacttggccaagcaacctggtagcataatttaaatacttggtgtagagaaggtttgttattgcttatggataattctggaatcttgtaatttttagctctttttttggtgtgtatctgaaccttatgtgcatcaatgcttagtatgacataagtaaacattacttatttgcttatgttgtctgctaaaacagtctaacatcttgtaaatcatgtggatttcatatttgttacttatttcttttaattggttgtttactaataatgctgtagtggttttactcgatggcgtgcgtcaactttatttgccgatgttgtctgctataattttctttctccactaagaactaaaggttatgtttctctacaggctttattcagagctctaaagaaaagcattctacacccaagtatgggctcatctaccatgcatcctcaattgggaaggcttctcaaaagcataacggaaaaactctcggtctctatctgcaaaagctgctcttgctatccgataggatgcccttggtgttgatgaggacaactccattggcactaagagtcgactgaaggttgagacacagtttcaaattcttgaaggtcgtgacggttgggctggagagcacgctggtaggggaggacctcaacgaccgtgcctttgtctatggcttccttagcttcctggacaagatctcttgcgtaatcgtcctatttgtcttggaattgtacgaagacacgaatgagatgtagcgagatgaggggacacggtgagcaggtacgagatgggcctgatctcctcatacttcaccgtcctctccctggtggtcacatccattctgaggctataggtcaccactccgaaagccattgcaatggaagccccactgcttgtctgacaaactgaagaaaccggtgagtgtagatgtcgatcgggttggaagaaagaagaaagaaatgtgcatcctcttcaattagtttcaattagatttgaaagcaggtcactttgtaatagtatgtgtcttgtcatcgtgttggcacaacacagatgtgtatgatgtagttacgtataactcaagattctcattgctatgctttattataccaacaaagttcagatgtttggatatttctagcttattagggtctgatgcggaacatgtttaaacaaatatatcaaatttgaataatgtcaacatgtgtgatatatagaaactatagcaacacatgagccacattagattttgtcattaaattttcttgttacaacttatataatacacaacattttgaatgatgctaacaaaagaagaataacaattaatgtttttaattattggttccatagcaacgcacgggcatacacctagtaaggtagaaaag

SEQ ID NO: 6132 - DNA, 2416 bp, Zea Mays
aagacattggtgtgggtggctttcagaagatttacggtggctgcacctcaagcgcttcggcaaggtggacagcgccaacaagtacgagaccttgctggaggtggtttaggtgatgaccgacctgaagttgatcatcaagcgggcctacatttcctccgacgacgagtggttcatgaacggttatatacttatagagtgtggatacatgtttgcaatagctccagatcaattgcaaatgaaccttgtgagacatctcctctctggcccaactgcttcatactaagacacattatttttagtttactttttattagcttttttgcttacaatcctgtgaagtgtggtgtcaacagcggaatgatgtatccttgcaaataatatttgttaaaacattttgttaactttctaaaattgtcaatatttctttggttcctgacaaatatagtggtctatttactactgattttagagttttctatttactaatacacccatatagggcagagcttagttgagtctgccgtctgccctggttccacagacatgaaagagaactctatcaatttgtgaagataattttgtgaatcacttgaagttttgactgcttgtatcatacttgactgcctggtttcagtttatttattatcatctttgcgtcaccagtgctttacccatactactcttgaattggcgtaccttgattctaatgtaatttattttagcctaatttgtgtgaatcattgaatttatagaccactgctataggctgatccattatagctgagaactcattactcctaattgaagttaaaattgagttttgtagttttgaagttagttttcactgttgcagactgataatgtgtaacatcttatgagttttgattattgaagattcttcttggtctttattattaaagaatccattttgacatgtttaggtgttttttattacttatgttctgcaggttgatatcgtgattattcacggcattgtcttattggatgttcttgacaaggagctcatcacttatgccattagagttcgctaatgatgtaattgttgacatctatgtatgatctccttgactactatgggaactgtttagtgagaaactatattgttttcagatattgtctgatgaagagctagaaacatatctaaaggtgattgcagtaatatccatgggaacagaagttattgaacatgacttgttaaatatcagagagctatatgatcatgtgttggccctactatatgactatttaagaagcaagatgaacactatcaccgcaattctaacagcactggtgggtgaatcagttggtgccatattgtgcatggtggaagtttggtaaacttggccaagcaacctggtagcataatttaaatacttggtgtagagaaggctttattcagagctctaaagaaaagcattctacacccaagtatgggctcatctaccatgcatcctcaattgggaaggcttctcaaaagcataacggaaaaactctcggtctctatctgcaaaagctgctcttgctatccgataggatgcccttggtgttgatgaggacaactccattggcactaagagtcgactgaaggttgagacacagtttcaaattcttgaaggtcgtgacggttgggctggagagcacgctggtaggggaggacctcaacgaccgtgcctttgtctatggcttccttagcttcctggacaagatctcttgcgtaatcgtcctatttgtcttggaattgtacgaagacacgaatgagatgtagcgagatgaggggacacggtgagcaggtacgagatgggcctgatctcctcatacttcaccgtcctctccctggtggtcacatccattctgaggctataggtcaccactccgaaagccattgcaatggaagccccactgcttgtctgacaaactgaagaaaccggtgagtgtagatgtcgatcgggttggaagaaagaagaaagaaatgtgcatcctcttcaattagtttcaattagatttgaaagcaggtcactttgtaatagtatgtgtcttgtcatcgtgttggcacaacacagatgtgtatgatgtagttacgtataactcaagattctcattgctatgctttattataccaacaaagttcagatgtttggatatttctagcttattagggtctgatgcggaacatgtttaaacaaatatatcaaatttgaataatgtcaacatgtgtgatatatagaaactatagcaacacatgagccacattagattttgtcattaaattttcttgttacaacttatataatacacaacattttgaatgatgctaacaaaagaagaataacaattaatgtttttaattattggttccatagcaacgcacgggcatacacctagtaaggtagaaaag

SEQ ID NO: 6133 - DNA, 1272 bp, Zea Mays
aagacattggtgtgggtggctttcagaagatttacggtggctgcacctcaagcgcttcggcaaggtggacagcgccaacaagtacgagaccttgctggaggtggtttaggtgatgaccgacctgaagttgatcatcaagcgggcctacatttcctccgacgacgagtggttcatgaacggttgatatcgtgattattcacggcattgtcttattggatgttcttgacaaggagctcatcacttatgccattagagttcgctaatggctttattcagagctctaaagaaaagcattctacacccaagtatgggctcatctaccatgcatcctcaattgggaaggcttctcaaaagcataacggaaaaactctcggtctctatctgcaaaagctgctcttgctatccgataggatgcccttggtgttgatgaggacaactccattggcactaagagtcgactgaaggttgagacacagtttcaaattcttgaaggtcgtgacggttgggctggagagcacgctggtaggggaggacctcaacgaccgtgcctttgtctatggcttccttagcttcctggacaagatctcttgcgtaatcgtcctatttgtcttggaattgtacgaagacacgaatgagatgtagcgagatgaggggacacggtgagcaggtacgagatgggcctgatctcctcatacttcaccgtcctctccctggtggtcacatccattctgaggctataggtcaccactccgaaagccattgcaatggaagccccactgcttgtctgacaaactgaagaaaccggtgagtgtagatgtcgatcgggttggaagaaagaagaaagaaatgtgcatcctcttcaattagtttcaattagatttgaaagcaggtcactttgtaatagtatgtgtcttgtcatcgtgttggcacaacacagatgtgtatgatgtagttacgtataactcaagattctcattgctatgctttattataccaacaaagttcagatgtttggatatttctagcttattagggtctgatgcggaacatgtttaaacaaatatatcaaatttgaataatgtcaacatgtgtgatatatagaaactatagcaacacatgagccacattagattttgtcattaaattttcttgttacaacttatataatacacaacattttgaatgatgctaacaaaagaagaataacaattaatgtttttaattattggttccatagcaacgcacgggcatacacctagtaaggtagaaaag

SEQ ID NO: 6134 - DNA, 1709 bp, Zea Mays
ttgcaaggaagatctaccagaggcaagacattggtgtgggtggctttcagaagatttacggtggctgcacctcaagcgcttcggcaaggtggacagcgccaacaagtacgagaccttgctggaggtggtttaggtgatgaccgacctgaagttgatcatcaagcgggcctacatttcctccgacgacgagtggttcatgaacggttatatacttatagagtgtggatacatgtttgcaatagctccagatcaattgcaaatgaaccttgttgatatcgtgattattcacggcattgtcttattggatgttcttgacaaggagctcatcacttatgccattagagttcgctaatggctttattcagagctctaaagaaaagcattctacacccaagtatgggctcatctaccatgcatcctcaattgggaaggcttctcaaaagcataacggaaaaactctcggtctctatctgcaaaagctgctcttgctatccgataggatgcccttggtgttgatgaggacaactccattggcactaagagtcgactgaaggttgagacacagtttcaaattcttgaaggtttgtgtctgactcatcttagtttatcttctgctacctgttgggcgtttacattgcaatctagtgtgctttgttttcatttccgtttctcaagtgagcaaatacatcctgcactgatgttagcggttcttgtgtggaagtgaaatcataccaatctaaagccggagtgtttagaagtattgttttagctgatttttgtattgctcagaacataacaaacttcctgataatttgcttgttaggatcagcaaacgatctgccaacggtgggttccatgcttagaaatagttgtaccgttaggattaatatatggttcagactttgagaatccagacttgaacctagaaggtcgtgacggttgggctggagagcacgctggtaggggaggacctcaacgaccgtgcctttgtctatggcttccttagcttcctggacaagatctcttgcgtaatcgtcctatttgtcttggaattgtacgaagacacgaatgagatgtagcgagatgaggggacacggtgagcaggtacgagatgggcctgatctcctcatacttcaccgtcctctccctggtggtcacatccattctgaggctataggtcaccactccgaaagccattgcaatggaagccccactgcttgtctgacaaactgaagaaaccggtgagtgtagatgtcgatcgggttggaagaaagaagaaagaaatgtgcatcctcttcaattagtttcaattagatttgaaagcaggtcactttgtaatagtatgtgtcttgtcatcgtgttggcacaacacagatgtgtatgatgtagttacgtataactcaagattctcattgctatgctttattataccaacaaagttcagatgtttggatatttctagcttattagggtctgatgcggaacatgtttaaacaaatatatcaaatttgaataatgtcaacatgtgtgatatatagaaactatagcaacacatgagccacattagattttgtcattaaattttcttgttacaacttatataatacacaacattttgaatgatgctaacaaaagaagaataacaattaatgtttttaattattggttccatagcaacgcacgggcatacacctagtaaggtagaaaag

SEQ ID NO: 6135 - DNA, 1639 bp, Zea Mays
ttgcaaggaagatctaccagaggcaagacattggtgtgggtggctttcagaagatttacggtggctgcacctcaagcgcttcggcaaggtggacagcgccaacaagtacgagaccttgctggaggtggtttaggtgatgaccgacctgaagttgatcatcaagcgggcctacatttcctccgacgacgagtggttcatgaacggttatatacttatagagtgtggatacatgtttgcaatagctccagatcaattgcaaatgaaccttgttgatatcgtgattattcacggcattgtcttattggatgttcttgacaaggagctcatcacttatgccattagagttcgctaatgatattgtctgatgaagagctagaaacatatctaaaggtgattgcagtaatatccatgggaacagaagttattgaacatgacttgttaaatatcagagagctatatgatcatgtgttggccctactatatgactatttaagaagcaagatgaacactatcaccgcaattctaacagcactggtgggtgaatcagttggtgccatattgtgcatggtggaagtttggtaaacttggccaagcaacctggtagcataatttaaatacttggtgtagagaaggctttattcagagctctaaagaaaagcattctacacccaagtatgggctcatctaccatgcatcctcaattgggaaggcttctcaaaagcataacggaaaaactctcggtctctatctgcaaaagctgctcttgctatccgataggatgcccttggtgttgatgaggacaactccattggcactaagagtcgactgaaggttgagacacagtttcaaattcttgaaggtcgtgacggttgggctggagagcacgctggtaggggaggacctcaacgaccgtgcctttgtctatggcttccttagcttcctggacaagatctcttgcgtaatcgtcctatttgtcttggaattgtacgaagacacgaatgagatgtagcgagatgaggggacacggtgagcaggtacgagatgggcctgatctcctcatacttcaccgtcctctccctggtggtcacatccattctgaggctataggtcaccactccgaaagccattgcaatggaagccccactgcttgtctgacaaactgaagaaaccggtgagtgtagatgtcgatcgggttggaagaaagaagaaagaaatgtgcatcctcttcaattagtttcaattagatttgaaagcaggtcactttgtaatagtatgtgtcttgtcatcgtgttggcacaacacagatgtgtatgatgtagttacgtataactcaagattctcattgctatgctttattataccaacaaagttcagatgtttggatatttctagcttattagggtctgatgcggaacatgtttaaacaaatatatcaaatttgaataatgtcaacatgtgtgatatatagaaactatagcaacacatgagccacattagattttgtcattaaattttcttgttacaacttatataatacacaacattttgaatgatgctaacaaaagaagaataacaattaatgtttttaattattggttccatagcaacgcacgggcatacacctagtaaggtagaaaag

SEQ ID NO: 6136 - DNA, 1945 bp, Zea Mays
atgccgtcagtggttgcccacataggggcatgctccaccatgcgcgcacctcgccctgcatgccggcagacataccctgcggctgcccacacaaggctgctaatggcggaggctgagcgccgccatggatctgacacggtgtggaatggggaggagccgaagcggagattggatcaaagtggactgggcaggagccaagcaaatcgtgtccaggacgactgggttcgctatgctaagatgactgaagaaattggagagcaactgcatattgtcggtgatgaccttgtcactaatcccactgcatttttggcacatatggtctatatgaaagaattgatgaatctcgaaggatgtggttaaacatgtctcctagcagccttgtaagattagcaataaaagaccatgagctctggatgctgcgatgcttatagcacaccgccaagttttagatcctcatgctttgaatctctgagtacttaaaacaatgtgtaagggagtccttggattggacctggactgatcgaattcaactgaatttgtaatagaactgactatatatccacccatatttctgacatgtagttggtccttcgaatccaaccacgcattggagacttgttcatatttctaatttccagcctgcacagtcttagcatatatctttgcttagggagttgaactgctccgttgtataatgttgaacattttttgtggttccgaggaattattgttgagcatgcctattatacttggcttccttgtccttaggaaagcatggctttttgacatcctgtcttgtgatgatatatgtccagtaactgttccgtgatcgagttcttgccaattctcatgcttatatctgtctggccgagtcctgttccagttctgcaaatcagcaattgaagtgttttgtgatcatgacaccatgctgtcctcatgttgtgtgtaccggtattttattcttcggtgctgtatcttgccgttgtgattggtcgtttaacaatttagcaggacttgtctgttctgatgtgttttcgacggcaacatattttttagtatctgagtaatatctggcagaagacaccctaacttttgtccaatatcaaacaaagatattatttgcgagtctgctagcctaatcaagagttgttgaatagagagatcctttgaaaagaacaactttttaaactagcaataaaattgacatgactggtccacttgtatgattgtatcttaccattatattcatatttcaaaactatactagggtaggtaaagtgccaacactagagcaaacatgaacctgcgtagtgtactcatgaaaaggataattttgtttgcctacattttcgaatcaataaaatatacgaggtttgtgattattcataaattttgattgttgccagttgcatctgattttttgttatagctgaatgaattgtttcatgtttgggctctatgtagggctctatgataggctttgaatttcagtgcttttgtttagactgaaatggttcagttcatgggtcatacccaagtttattactcctgggccttgctgccataatggctgaagaacctttcaagcttctggtaggactgaaagtgtaaagtgcattcatttctataaatctgagttgtgctcaactgctcaacatacaacttaacactactacaacaacaacaacaaagcctttttatcccaagcacgttggggtaggctagagatgaaaccccgtatgaaaacctcagagctcaaccccaaagaaaaaaaggggaaataaaggcaaaggagaaccgaaaaacgacgaaacagggaaacacataaaagagataaaacccacaagaaccagcaatatctaaatgggcacaagaaaaggtcaaacgattaaagaggaaaagcgaaactataaatcaaggttctggcacgtgaattgcacacttc

SEQ ID NO: 6137 - DNA, 3514 bp, Zea Mays
gtggccttctcttctctctcctccccgctccgacgcgacgaattcgaagttggaataggcgagcggggcagcgccatttccgtccggatttctcttctgtcttctccttccttggctgtccagtctaggaggggagaaaggcaagttcaaaaaaaaaaaaaccccgcccgaatcccaacaaaaccctaggcctcacgtccccggccgccgccgccatgccgcccggggccgacgcgtcctccctcgccgccgccgtgctcgacgcaggcacgccaccggccgccgccgccgccacatccagagtgctcgactacctctcccgccacgccgacgaccaaccgcgggccttcttcgccgacgccttcccgtccctgctctaccgcctctttgtctccgcaccctcctccccatcattcatcgacctcgccgctgccgaccccgcgctcggcgacctcatcctctccctcatctaccccaccggcccgctcctcgccgccgccgccgccgcagaccgcctcaccctcatacgttacgtcttcccctccgagcgcctccccgactggctccgactcgccctcgcgtctcccccctccaccgacctcgcctcgccgctcctgtcgcgtcgcgtcgcctccgagctccacctctccgtcttcgagtactacctcttctggttcgcctactaccctgtctcgtccgcatcatctgccgccccggccgcatccgcctccaaccctcgactcacctcgcgcgcccgcctcgagacctgggtctctactctcgccaccacggccatccgcaaatccggtcagaagcccgaaaactcgctatacctcaggctgctctatgcctacctcagggagttcgtgccaacgcgcactccacccgttaatatgtccgggggcggcaccctgctccaccgtgcacccagccatggcgtcgatgcaatcgactcgtttgcacgggccgagttcttccttcacacccttgtccacttctggcttgtcggcgatgacttctcgccgctccccaagcagacttgccatgcactcggcttgcggttaccttctcgtgctcatgctgacttgagtgagcggccaccgtcgccaggcctgggtgatgcagtgaagctgcttgtcatgtacctcaactgctgcgatggccgcgcactagccgatgcgtgtgtgccatctcctcaagggttgtcagtgtccaatgggctctgtgatacccaggttgggttctggaatccattgatacagaggcctttgtaccggtttgtactcaggaccttcttattctgccccattggcactgcgataaaaaatgcgtcacaagtcttctctgtgtggttggcttatatggagccatggaaagttacccaacaggagctggataggtatggcaagcagcaaggcggggatgagaaggagccacaaacgactaagatggtgtacaattcatcgtggaggacgtatgtcctgtcgaattacctgttctacaactcaatggttgtgcatttcttgggatttgcgcacaagtttatccattctgatgttgcctcagtgctgctaatggtacacaaggtgttggaggtcttgagctcttccccggagctattaggtcttctccataaagtggacgctgcttgccactctaggctagtggcatcatccccagcatctgatcatgtgttgaagtatgtgccatcaatccgtgaacagctaaaggactgggaggatggtttgtcagaaagtgatgcagatgggtcattgttgcatgagcattggaactctgatcttaggcttttcagttacgatgagaatggggcttataatcttcttcagctacttttggtccgagcagagtcagagatactgcgccttccaggtgagacgcaacaagcactccagacgctggattctatcaagtcacagatgaaaacagccttccaagggcacattgaaagaattaacgggaatacgtcgttggaggaatcacataatcaacagcatcaggtgcgtggggaggtattcacacctaagcatcccagcttgaggaagggttcttgggctgatgttaaatacaaaggtgagtggatgaaaaggccaatctcagaggctgaagtagcctggcttgcaaggattctgatccggctctctgactggttgaatgacgccctggggcttgagtgtgctgatgctgaaggtagtcctgctggcgccacctacattcagtttgatgggaacacgacggtgggcgggccaagggatgctgcgagaatggctctcggtgctgtatgttcattcatggtgctagtggggcaagcggtactgaagttgatgaggtcgcacagggtgaagatcagtctgagagtgtttgcttcgaagaaactgctctcagccgctgttgtgctgtatgcagtggtggccgtgacacggaatgtatcgcgttgagagttttgatttgataatggggttatgctgtataagctaagcttgtagaggaagtcgatcgataggaggaaaagaaaagaaaagtgtgtcgttctgctgttgtccagtaagcttgatgtaaatgcctgcactggaatggttttggacttaaaaacgcaatggagtaattaggacagttctaacagtattaaaacagctgctagctcctcatggaagcgttaaatgtatcggtggccttcgaagttcacttaaaaggtcaatacatttttaggctcttatttctaagcttgtaaaaatggtgcattgttatggataacaaacttaaggacctagaaacaatgtaactcagaattcatgcatttaactcagaatgtttgattctgcgtggacaaaacagtccgattgcattcccaagctcttaaacgattagtactagtatatagtagttagaagaaagaggaatcactattgataacagatgtcggcattctcctcgctcctgctgccatcgtttttcctttttcctggacagccactgcaactcctcccaaatcctcccacccggtttagccggctccgctgccaccgccgcgactccacctctgtcgccaccatggtcaagtccaaggccatcagggtccacgagctgggcggccccgaggtgctgcggtgggaggaggtggaggtcggggagcccggtgaaggggagatccgcatcaggaccaccgccgtcggcgtcaacttcatcgacatctactttcggaagggggtctacgccgcgcccaccatgcccttcaccccaggaatggaagccgttggcgtcgtcaccgctgttgggcctggcctcactggcaggaaggtgggcgatgttgttgcatatgccggcaaccccatgggctcctatgctcaggagcagatccttccagcggctgtcgctgttcctgttccaccttccgttgatcataagcaagcagcttctgtgatgctcaagggcatgaccgcccatgttctgcttcgccgggtattcaagctactacgagtgcgcttccacactcgac

SEQ ID NO: 6138 - DNA, 2298 bp, Zea Mays
  misc_feature (1)..(2): n is a, c, g, or t
nnaaggatattacatcaggaaaaggtgtcaatgtcgtctatgattctgttggaaaggatacatacaaggcttccctggagtgcttggcgtcccgcggcttcctggtgtcgtttgggcagtcgtcaggcaaacctgacccaatcccaacgagcgacctggcttccaagtccttgttcctcactcgtcctagcctcatgcattacactgctacccgtgatgagctgctggagtcagccggcgaggtgtttgccaatgtcgctaacggggtgctgcacgtccgggtgaaccacacgtatccattgtcggaagctgcccaggcccatgcagatctggagggcaggaagacatcagggtccatagtgctcatcccgggatagactcaagggcatgtgaatgaataaatggggtgatctggttatgggaacggcgtaataataattatatctatgctgtttatgcggtatgttcgagtctgtttctgagttcctaaatctgaatgaataagtggcgcccttgtgttgttgggtcagggccgtgccggaattattgaacagaggcctttattcacaaaatcactaaaaaataacagtatagaaatgaaatttatgaaaagcatacctactaaactcttggttacataaattttacttgaacaactttgttcttcttgtgttccttgaaataaattcctcaacgttcatattcaatcttatccaacaatccactctcaagtgctattgcggctaaattagaagtctttgttgtgtcattgtaaacacaagtaagacttcaatggttttagtttagaaaagcttcattctgctgaagcaacagtcacatgaactctgtatgcaatactacttgcattaggaaaagaatcatgtcgctttaaattttttagactttgctgaagcaacagtcacatgaatggtcaatagaactctgtatgcaatactacttgcattaggaaaagaatcatgtcgctttaaattttttagaatttccataggccccatcttttcttttggaatgaaatttccaagaaacttcaactccgtatacaattcattagcatcaatatcaggttgtccatctttttttagggcagcctctatattatcaaaaaagactttatctaataactgcaatacttcagaagtaaataagaacccaaaatttttctgatagccttggatgatactgctcaagtctccttgtaagtgaggaaattgcttgatcaacaataggtagaaaactagaatttttgcgcgtcgttgccgcacacacttttatttctattgtaattttttggtgtaatttatatttttggttacggcatataacatcaggggttttatatgctggaataagtcatgtggtcagcagcagttgcagttttgactgctgcaggacagcagcagttgcagcaggacaacatgcaacagtcttttgactgcgcaggacagcagtagcagcagtcttttgactgcgcagcagcagcaaccttttgactgctgcaggacaacagcagttgcagcaggacagcatgcagctgcagtcttttgactacgcaggacagcagtagcagcacagcagaggacaacagtagcagcacaacagttttgactgcactttagtatctaaaggacaacacctgtgtgctgcagcgtgtagtgtagtgtgtagtgcagtgtagtgcagcccctagggctataaatatgtgtccccaacccctctaagggtatgacattgtgtagtgtttgaggaaataaacagaaaattgccccaactcatagtgtcatcctcttgatgagagttagagtccctctacttacaattggtatcaaagccaaactatcctgtagcctaaacatctcttgctcatctccttcccgcgcctctccccacactcagtcggcagcaagagctccaactgttccttcctctcctgtttagacgagcaatttttcgtctgagacagcctcttccacacgcagcgacccctcactagcccaccatgtccctacgctcggtcacttcgagtgcgcggcgccagcaggaagccgaggtcgccgcgacacaagaacgagagcgagcagcagcagcggctgcagcgacagcggcgagggcagcacggctggcggcagcggaactggcagcagcgagagcggaagtagaagcagcggaggcggcggatgctgcacgtgcggcggcagcagagctcgaggttctgcgcggcagtagagctggcagctctgcttctgtcgacgacaacaccgatgaagagctcaggctggc

SEQ ID NO: 6139 - DNA, 821 bp, Zea Mays
tccaggtttgaccctatatatttggatgatgatgtacggtttgccaaggacataagagaagactatttaaaggttgagcatgctccatatttttggaatgggtagtttctgaagtacaaaggtgaccaaaagaacgtttgaagaaccttatgctttcctagccaagtattcatgtcttactattatatttcttttcctatggtacagtaagtctgattcatgttgtacgtgtacatgttacatagtagttaattaccactaaccttttcaaatccatttgtgttgtacttgaaggacatttccagtactaaagcgacgttttaaagagatggattcatataaaatatgaaagtttctactattttcttttcccttacctaacgaactgtcacttgcattagtgtttttttaaatgcaagcgatggaaatctgaatgtttctcatcactctgtgacatgaacatcttattgctctactggtcacccgaagacagccacattgaaaaataggtgctgtttggttgggtgaaaggagcggtaacgacaatggaatcagcagccgttgttatccgatgcagagtaatgattaccgccctttgtttagttattgtgggcagcgttttctgtttttatggtattggatgacgataggtgggaagtgggaatgagattctacaggcttgtatccgataacgctgttatcaattacggagtgcgctaaccaaactccaaggaacggtatcagctgtcccagggaatggttacgagtctaaaatggctgaaccaaacagctccttagtatcaattcaaaacacgttcggc

SEQ ID NO: 6140 - DNA, 855 bp, Zea Mays
gtctcctcgccatcgaagacctccacgaggacctctacagaaaattttgattgacatagagagtcccattttgacctttgtaccactgctttaatttgaatgtggtacaaggagaaacataccaaagttcgagaacttttggtagacatagcgggtcctagtttggcctttctaccagtgctttcatttcaatgcggtacaaggagaaacataccaaagtttgagatttatggcatacacacaatgataccagtatcagtgtgtgtctgttgccggagatagaaggactgaccttccttgagtggacacactttatcttcctgaaaaaagtaaagatggtggatttcatctccatcatgagcatgttctaggtcaggtcaaggctctacacttctttcatctggtactctaattagatctactacatatttaaaggtggaatagattgtaggctgataaacttggatatttttgagcatgtaaagctttcgaaagtctttttacagtctgtcaattacgccagttcgaaccaggaaatccaggcgcattgctgccagagtagtagtgctagacctttctgtagtagtcaatgtcacagttttgcttgatcaagctttgtttactgtctttgctaattcctagccacacatgtattgcgccattatgttgtcgttccttctctactctgaaattactagccacacatttgttgtgttattgtgcatttcttctgttatttatgcactgttactccaataattattgtcgagcatgctgtcactattactgtgttggatgccaggttctttttataggatagcaatataagtttgcagttgtattaagttgttccct

SEQ ID NO: 6141 - DNA, 1318 bp, Zea Mays
ctccttcccttccctggtcccccatctttccccaccgcccctcctccccctacaacctgaccacattcatcccgtctcctcgccatcgaagacctccacgaggacctctacaggtctatcttcgcgctctacctcgctggccgttgcagggcctcctggagttcattgcctcgacagattggtcacacgcgaggctcgacatcaagcgccactgcggcgagcacctcgacccacatttaatgaacccctttgttagtgtgtccttctgtggcgtcaagccagagttctgatatgggatctgatctcgtgtcgcacccgcaaaactcgatatcaagcgctgttgcggcaagcacctccatccgcagctatggaaccctttcgtcgacgtgaccaggtccttccctggggtcaagcgagagttctaagatacgatgtagtcccaccttgctacccttccccaatggccccattgcatgttggctcctggctgacctctgtaccatgcgactcccttgcgcggccgcgcgtgaacactgtcgcctcgctcccagatccttatctggggattgcagctgcttcagatacatgactaccagaacttttggtagacatagcgggtcctagtttggcctttctaccagtgctttcatttcaatgcggtacaaggagaaacataccaaagtttgagatttatggcatacacacaatgataccagtatcagtgtgtgtctgttgccggagatagaaggactgaccttccttgagtggacacactttatcttcctgaaaaaagtaaagatggtggatttcatctccatcatgagcatgttctaggtcaggtcaaggctctacacttctttcatctggtactctaattagatctactacatatttaaaggtggaatagattgtaggctgataaacttggatatttttgagcatgtaaagctttcgaaagtctttttacagtctgtcaattacgccagttcgaaccaggaaatccaggcgcattgctgccagagtagtagtgctagacctttctgtagtagtcaatgtcacagttttgcttgatcaagctttgtttactgtctttgctaattcctagccacacatgtattgcgccattatgttgtcgttccttctctactctgaaattactagccacacatttgttgtgttattgtgcatttcttctgttatttatgcactgttactccaataattattgtcgagcatgctgtcactattactgtgttggatgccaggttctttttataggatagcaatataagtttgcagttgtattaagttgttccct

SEQ ID NO: 6142 - DNA, 1413 bp, Zea Mays
atctccttcccttccctggtcccccatctttccccaccgcccctcctccccctacaacctgaccacattcatcccgtctcctcgccatcgaagacctccacgaggacctctacaggtctatcttcgcgctctacctcgctggccgttgcagggcctcctggagttcattgcctcgacagattggtcacacgcgaggctcgacatcaagcgccactgcggcgagcacctcgacccacatttaatgaacccctttgttagtgtgtccttctgtggcgtcaagccagagttctgatatgggatctgatctcgtgtcgcacccgcaaaactcgatatcaagcgctgttgcggcaagcacctccatccgcagctatggaaccctttcgtcgacgtgaccaggtccttccctggggtcaagcgagagttctaagatacgatgtagtcccaccttgctacccttccccaatggccccattgcatgttggctcctggctgacctctgtaccatgcgactcccttgcgcggccgcgcgtgaacactgtcgcctcgctcccagatccttatctggggattgcagctgcttcagatacatgactaccagaaaattttgattgacatagagagtcccattttgacctttgtaccactgctttaatttgaatgtggtacaaggagaaacataccaaagttcgagaacttttggtagacatagcgggtcctagtttggcctttctaccagtgctttcatttcaatgcggtacaaggagaaacataccaaagtttgagatttatggcatacacacaatgataccagtatcagtgtgtgtctgttgccggagatagaaggactgaccttccttgagtggacacactttatcttcctgaaaaaagtaaagatggtggatttcatctccatcatgagcatgttctaggtcaggtcaaggctctacacttctttcatctggtactctaattagatctactacatatttaaaggtggaatagattgtaggctgataaacttggatatttttgagcatgtaaagctttcgaaagtctttttacagtctgtcaattacgccagttcgaaccaggaaatccaggcgcattgctgccagagtagtagtgctagacctttctgtagtagtcaatgtcacagttttgcttgatcaagctttgtttactgtctttgctaattcctagccacacatgtattgcgccattatgttgtcgttccttctctactctgaaattactagccacacatttgttgtgttattgtgcatttcttctgttatttatgcactgttactccaataattattgtcgagcatgctgtcactattactgtgttggatgccaggttctttttataggatagcaatataagtttgcagttgtattaagttgttccct

SEQ ID NO: 6143 - DNA, 4069 bp, Zea Mays
ggttccagtccactccatcgccaagggcccaaggcttctctatctagggattcatcttcctctcgtcttccctcttcctctccgaggatacaaggcgccgtcccaggtagaggtagggtcgccaccatgctggaggagctgctcatcttcacccggggcggcctcatcctgtggtcgtcctgccgggcgctcggcgccgcagccctcaagggctcccccatcgacgccctcatccgctcctgtctcctcgaggagcgatccgccgacgccagcttctcccaggacaattacgccctcaagtggaccttccacaacgacctcggccttgtcttcgtcgccgtataccagaagatactccacctcctctacgtcgacgatctcctcgccgccgtccgcaaggagttctcccagatctacgaccccaagcgcacctcctacgatgactttggggacatcttccgccagctccaccgcgaggccgaggcgcgcaccgaggaaatgaagaagtccaagcaggccctctcgtcccgtccgcagcctgctctcacccagaagaagcctggtcccaagggccgcggcggtgattcccgcggcggcgctgctaacaagggcggctctggtgccaaggatgactctgatggcgacggctatggcaaccaggaccaccgtactctggcaaatggtgccttcaagggccaagagaatggcgtccgcaaggagaattcttctcatggccgcactgttgttgtcaagggaaaggagaatggggcccccaaggatgaaggggccttcgatgtaagtaaactacagaagctacgggccaacaagaagaatggtgccactgacaatggaaccaagaagctgaccaaacctgacataaagaagaaagggaagcaagatagggtgtgggacgacaaaccttccaacaagaagctggattttacagacccggcagacgagagaggggacgaggtggcagacaatgtggcggtcatcgagggagaaagcatgatggataaggatgaggatctgagcagcgacagcgaggacgaagaggtggaagatggacccaaaaagaaaggatggttctcatcaatgttccagagtatttctggtaacaatgtattggagaagtctgatctgcagcctgcgctcaaagctctcaaagataggctgatggcaaagaacgtggcagaggaaattgcagagaagctttgcgaatctgtcgcagctagccttgagggcaagaagctaggatctttcactagaatatcatcaacagtccagacagctatggaggatgcgcttcttcgtattttgaccccaaggcgctctattgacatactgagggacgtgcacgctgccaaggagcgtgggaggccatatgttattgtttttgttggggtgaatggagttggcaaatccaccaatcttgcaaaggttgcttattggcttcttcagcataacctcagtgttacacttgcagcatgtgacaccttcagatctggtgctgttgagcagctgagaactcatgcaaggaggcttcagatacctatatttgagaagggttatgagaaagatccggcagttgtagcgagggaggctattcaggaagcaacccggaacaaatcagatgttgttctggttgacactgctggacgtatgcaggacaacgagccactcatgagggcactctccaagctaatcaatctcaatagcccagacctggttttatttgttggagaagcattggttggaaatgatgctgtggatcagctcactaaatttaaccagaaactagcagacctatctgctgttcccactgctagattgatcgatggtatcctgctcaccaagtttgacaccatcgacgacaaggttggagcagcgctttccatggtctacatatctggagctccagtcatgttcgttggctgtggtcagtcctacacggacctgaagaagctgaacgtgaaatccattgtgaagaccctcctgaagtgattgcaccaccgtgttgaagtgcagtctgttatctattgtatccccagtgacctttgtcatcctcatgttggacgtcgtcgtggatttgtaactgtcggagttgcaacaaaacttgtgtgcttgcgtcaacgtgtgccgtcttgctctaataatgcactatctgcattttgaatgggtaaaaaatggatgagtatgcgagtttgctatcatctggatgttaccagattattgctcctgcctctgagcatgcaagcgaaaccagtcacgagctcacttcatgtctggatgtgttggcaagctggaagctgcatgaatgtctgacatgatttcattcagcgtacacggttgcttgcaacattagtaatgagtagcgtgttgtcttgtggtgttggcctctgttcatacgtaagggttctgatccccttgtgtgcaagtctcacacatacaaaaacctgatacatacgcgtcccgcaaacatgtgcccttccgtattcagcttctttattttttgtggccttccttgtcatgtggaatgcaattatgcaggcaatacgtattgcatgtcattctccggtgcacctgcccagttgtggtggactggacctagcaaccctatcaatcaaacaaacaatgtgcatgtcttatatattacctttagccccattatctacagctttttctttgcctgagattcccatccttcaatatatctgtatataaatatattatctatttattatatctctctctctctctctatatatatatatatcagtatctgtacatatttaatatagatgggcaagcgattgccgtgcttaaaataggagaaaccttcgtcgccaaggtaaaagagcatctccttttctctcgtttgtcagatgcctcacggaagacatgtggtttagtgtagatatacagctgctgttacatcttttgagggatcccctatatattccccactccccatcctgctttactgatgtatactgctaaaatatggtcgcaatgcactgccgatcatttccatgaatcaaatgaaaccagaatttggttgctcaatcaggatgcgacattaagatacctatataaaaaaaatcatgagcctttctcttcttgtataaaactagtgctatatatatatatattttttttttcaaaaacaaagcaatatcttagtcgattccatggtacagttactgtacaggagagaatttatcatgtcggttcctggttctctcatctaacttttaagcaattggtatccttgtttagggaaggttcttcatgtattggcttaccaaagttttctcttttctttttttttagctttcttattatatataggcatgttcgttcagaccagatacgatagatcacatcatcactgtttgttatttttctttttgtcagatacagaaggtgagagggagaacctctgaagcttaggtctgcgatgccacctattccagttctatatagattgtagtgtattagaatggatcgggatggattttgaattgctattggaatggaattggtggtattgagtcggtttaaatatatagcaattcaaaatctatccagacctatttcaatacactccaatccatggaattggaacgtctgggtttccttctcttacttccatcgacctggagcctaagggcctgtttgtttacccccatggattatataatctggattatttttggaggattatataatctggattatataatctggattatataatctgagtagtcctgtttgtttacccagattatttgagttgttaataggattcttttgtatgaggaagacaagaataccctctatatttgtactaggttgaaactcatatatgaaaaaaaataattcaattgacattggcaaatattgcattagcaatattatcacggaaggcattcatgtcaccttcttcatctccaaattgactagtactaggcgcaaaaacgattaggtggattataatgacaatggtgggtaatttctaggaaacttgaaagggtagtggggaagtgggaaaaaaataatctgaaat

SEQ ID NO: 6144 - DNA, 2890 bp, Zea Mays
atggatctactaggagatcgtgaagatgctcttagccttgtttcatggtgcaggagcgaggagaaagaagatccctggagacccggtgagagggtagagcggctcgtcactcttcccaaactgtccctgcctccatttcttttccttttgtttgtcgcctctcccttcgctcgccctgtctgcgctttcgctttcctttcgcctcccaccaccaaaaagaggagcagaggagaggtttgtgtgacagcgtgagcgagcgagtgatgattaacacctcagccggcagacagccgccaaagcagtagcgtaagaaagagagttagtagagcccagatcgagggagggaggagtagcaccgagcacgagcatctccactccacgcgcgccccatgcccgtccgctccacctccatgagcgtcagctgagcaagacaaggaaggggaatctctccctcattcgccttgccgtcttgatctgtcggctcccggcggcaacaccctacaggtttcatctatggggcaagatgctggcttcaaacgcgaggatcattctggattgggatcaggtcctcaaactttgaaggtctcctgctgcactagtgaagaaaacgagagtcgaaacagaagataccatcagttgaaatgctcagagagcaactcgaggcagttgcacctggactacgtcccaaatttccactgcaggagcttgccaacgagaagccgcaagacgaatgctgagcaaagcaccgtggggaagcgtggttctatgtaccagagctccagcgaaataagcaggatcagaaagatccaggagggcaggaggaaaatagattctgcattcgatggggacgcgttcctgtcctttgatattgtcgatgcatcctctcgccctagcacaagtggagcttatctgcattcccatcagaatcggaggtcgggcgctaagccttctgtggacaccgctaagcgagcgtcaaaggacttcctggaccttcagttccgtgaacatcctgatgagaattttaagctagatcgaccacgcttggatagtaccttgttgaaaaacgatgatggtttcttggagatttctctcgagaaagagatagcaaagggtggcccgtgcagaaatgcagctcctatcctgctaaacactgggtcaggcaaatgcactgacctgcaaaagatgaatggatgccccagtgagaacaactgtggtgacaaggggagagattcagcaagcagttccaaatcaacgcctgtgaaagtaagctcctttgacggatcctgccaatctgacggtgctcaacaccatatcacagagaacaacactaaagctcgatcaagccccttcaagaagatgctggaccctattatgaagtccaaatctcctaggagcccatctatcatggaaagaggaggctccaactccgcaactgggccaggaagcaggaaaaactccgtgtctcgaaaatcactgctgggtgatttttcaagaagtgaacaagcatctaattgccagcccaatgggcaaacacagaagcgtgtaaacaaatctgctttgtcacctgctcatctccaagcggttcttagattggattccaagaacggtgtccaggtttttgaattctgtgttgacggcccaggagaatccatttccgccaggaattggaaaaacggtgatgagttgagctctatatacaccttccatagtggcgggaaacggtccagtgctgctggaaggatctccaaagatggaggctgggatttacccccaatcgttgggcaggtgcaggtttcatcatacttatgctctgaagttggaaaagacggtacggtgaataactctgtcgtcaccgagtttgtttcgtacgacattggtcatgcgaggcggattgttgaggagaagacaggggcacttcaacagccacagaggactagtctgacggaagagaacaagactgggagaaataactcagatgtatcgacatcttgcccgtggtccgaagaagaccttcatccttatttggagattgcggcgactgtgatagaggttccgtttagcagatacaagtccgaagaggtgaagaatggttcatctccttgtactgtcaaagttgttgcacctagtggactgcatggttcgccgagtgacgatgaagccggcggcccatctcccttgctagatagatggaggtacggtgggggttgcgactgtggcggatgggacatggcttgccccatcgacgttattggcaacacatatgataatagctgggctgagtctatagctaccaatgtgaaacatcccatggagctctttgttcagggtagcaaagaagagctccccgtcctttctatgaaggagaacgggagagggcagtttgtggtggatttccatgggcgactatcagcgttacaggcgttttcagtatgcatctctctgctgcactgttctgaagcttcgatcgccatcagcctcaagaaggggaagcagaagctgtattccagctcgctcaagttgctcctcgaggaggacgtgaggcacctgatcgaggcagtcacagctgaagagaagaagaagaagaagcggagtagagaaaaggcgcctcctccgtctgttctgcttgacccgcctttttctcccatcggaagagtgtagtgtagccaccaggcattgaagaacccattgcattgtttatgatttgtcttgatgttcatattttccttttaggatttcatacttgcatggagtgttagattctagcaggcagtaaggttcataatgtactgttgagatgttgaatagaagggggggaaataaagtaggaggagccagttttcttgtgaatggacgaagctaagactacctccaatcatatcgtcatctctct

SEQ ID NO: 6145 - DNA, 1069 bp, Zea Mays
atggatctactaggagatcgtgaagatgctcttagccttgtttcatggtgcaggagcgaggagaaagaagatccctggagacccggtgagagggtagagcggctcgtcactcttcccaaactgtccctgcctccatttcttttccttttgtttgtcgcctctcccttcgctcgccctgtctgcgctttcgctttcctttcgcctcccaccaccaaaaagaggagcagaggagaggtttgtgtgacagcgtgagcgagcgagtgatgattaacacctcagccggcagacagccgccaaagcagtagcgtaagaaagagagttagtagagcccagatcgagggagggaggagtagcaccgagcacgagcatctccactccacgcgcgccccatgcccgtccgctccacctccatgagcgtcagctgagcaagacaaggaaggggaatctctccctcattcgccttgccgtcttgatctgtcggctcccggcggcaacaccctacagggtagcaaagaagagctccccgtcctttctatgaaggagaacgggagagggcagtttgtggtggatttccatgggcgactatcagcgttacaggcgttttcagtatgcatctctctgctgcactgttctgaagcttcgatcgccatcagcctcaagaaggggaagcagaagctgtattccagctcgctcaagttgctcctcgaggaggacgtgaggcacctgatcgaggcagtcacagctgaagagaagaagaagaagaagcggagtagagaaaaggcgcctcctccgtctgttctgcttgacccgcctttttctcccatcggaagagtgtagtgtagccaccaggcattgaagaacccattgcattgtttatgatttgtcttgatgttcatattttccttttaggatttcatacttgcatggagtgttagattctagcaggcagtaaggttcataatgtactgttgagatgttgaatagaagggggggaaataaagtaggaggagccagttttcttgtgaatggacgaagctaagactacctccaatcatatcgtcatctctct

SEQ ID NO: 6146 - DNA, 2885 bp, Zea Mays
atggatctactaggagatcgtgaagatgctcttagccttgtttcatggtgcaggagcgaggagaaagaagatccctggagacccggtgagagggtagagcggctcgtcactcttcccaaactgtccctgcctccatttcttttccttttgtttgtcgcctctcccttcgctcgccctgtctgcgctttcgctttcctttcgcctcccaccaccaaaaagaggagcagaggagaggtttgtgtgacagcgtgagcgagcgagtgatgattaacacctcagccggcagacagccgccaaagcagtagcgtaagaaagagagttagtagagcccagatcgagggagggaggagtagcaccgagcacgagcatctccactccacgcgcgccccatgcccgtccgctccacctccatgagcgtcagctgagcaagacaaggaaggggaatctctccctcattcgccttgccgtcttgatctgtcggctcccggcggcaacaccctacaggtttcatctatggggcaagatgctggcttcaaacgcgaggatcattctggattgggatcaggtcctcaaactttgaaggtctcctgctgcactagtgaagaaaacgagagtcgaaacagaagataccatcagttgaaatgctcagagagcaactcgaggcagttgcacctggactacgtcccaaatttccactgcaggagcttgccaacgagaagccgcaagacgaatgctgagcaaagcaccgtggggaagcgtggttctatgtaccagagctccagcgaaataagcaggatcagaaagatccaggagggcaggaggaaaatagattctgcattcgatggggacgcgttcctgtcctttgatattgtcgatgcatcctctcgccctagcacaagtggagcttatctgcattcccatcagaatcggaggtcgggcgctaagccttctgtggacaccgctaagcgagcgtcaaaggacttcctggaccttcagttccgtgaacatcctgatgagaattttaagctagatcgaccacgcttggatagtaccttgttgaaaaacgatgatggtttcttggagatttctctcgagaaagagatagcaaagggtggcccgtgcagaaatgcagctcctatcctgctaaacactgggtcaggcaaatgcactgacctgcaaaagatgaatggatgccccagtgagaacaactgtggtgacaaggggagagattcagcaagcagttccaaatcaacgcctgtgaaagtaagctcctttgacggatcctgccaatctgacggtgctcaacaccatatcacagagaacaacactaaagctcgatcaagccccttcaagaagatgctggaccctattatgaagtccaaatctcctaggagcccatctatcatggaaagaggaggctccaactccgcaactgggccaggaagcaggaaaaactccgtgtctcgaaaatcactgctgggtgatttttcaagaagtgaacaagcatctaattgccagcccaatgggcaaacacagaagcgtgtaaacaaatctgctttgtcacctgctcatctccaagcggttcttagattggattccaagaacggtgtccaggtttttgaattctgtgttgacggcccaggagaatccatttccgccaggaattggaaaaacggtgatgagttgagctctatatacaccttccatagtggcgggaaacggtccagtgctgctggaaggatctccaaagatggaggctgggatttacccccaatcgttgggcaggtgcaggtttcatcatacttatgctctgaagttggaaaagacggtacggtgaataactctgtcgtcaccgagtttgtttcgtacgacattggtcatgcgaggcggattgttgaggagaagacaggggcacttcaacagccacagaggactagtctgacggaagagaacaagactgggagaaataactcagatgtatcgacatcttgcccgtggtccgaagaagaccttcatccttatttggagattgcggcgactgtgatagaggttccgtttagcagatacaagtccgaagaggtgaagaatggttcatctccttgtactgtcaaagttgttgcacctagtggactgcatggttcgccgagtgacgatgaagccggcggcccatctcccttgctagatagatggaggtacggtgggggttgcgactgtggcggatgggacatggcttgccccatcgacgttattggcaacacatatgataatagctgggctgagtctatagctaccaatgtgaaacatcccatggagctctttgttcagcaaagaagagctccccgtcctttctatgaaggagaacgggagagggcagtttgtggtggatttccatgggcgactatcagcgttacaggcgttttcagtatgcatctctctgctgcactgttctgaagcttcgatcgccatcagcctcaagaaggggaagcagaagctgtattccagctcgctcaagttgctcctcgaggaggacgtgaggcacctgatcgaggcagtcacagctgaagagaagaagaagaagaagcggagtagagaaaaggcgcctcctccgtctgttctgcttgacccgcctttttctcccatcggaagagtgtagtgtagccaccaggcattgaagaacccattgcattgtttatgatttgtcttgatgttcatattttccttttaggatttcatacttgcatggagtgttagattctagcaggcagtaaggttcataatgtactgttgagatgttgaatagaagggggggaaataaagtaggaggagccagttttcttgtgaatggacgaagctaagactacctccaatcatatcgtcatctctct

SEQ ID NO: 6147 - DNA, 6607 bp, Zea Mays
cgacagactaacctttcatttgctgttatatataatgcccttgctcagccaaacaagcgactgcgttcattgtctgagcacgttcctcatggttatcgtaggaaatcactttttgaaggtctcattcgatataatgttccattactaagagcaacatggtttattaaagttacatacctgaatcaggcccgaccggcacctaacagtacttcagtagttgcttctgataatcaacgatctaatcaatggacaaaggatgttgttgaatatttacaacagattttggacgaagtttgttctaaagagggtgccattgtacctccatcttttaaagagcagtcatcaccaggacttgctgctggaaccaatcaaataaaaatgaaaacggaatcatctccagctggagacagtgaagaacccttggtgcacttcaaatggcggtatatggttcgcctcatccaatggcatctcacagaagaattgcttgttccctcagtacttatcgaatggttatctaaccaacttcaggagagggattcagatgatgttttagagcttcttttgcctattatacttggtctggttgacaccattactctctcacaaacatatgtgcgcatgttcgtggagctactagtgagacgtctcaatgtcgatcgtccaaaaaggttttcagtttcttctgttatagcagagttactgcgatacatggtacttgcagtgccagatacatttgtttctttggattgctttcctttcccatcatttgtggttcctgatgtatatggtagaggtgctttgttgaagataaccagtggtggtggaattttatgttctaagaggcgtgatgcttatcggtatttgtcctgtggttatgctgtttcttccattcagaaacgtgcacatgatcttgcagcagttgctaaccctagccttcaagcacgtggtgcagccaaagtggtacaggctttggacaaagctcttgtcacaggaaatttgtcagtggcatatttttcactctttaatgatttatctgatgcgttaatggaagaaagatggattaaagaagtgaatccctgtttgcagtcttctctgatgtggattgggactgttgagctatcccttatctgttctatatttttcctttgtgaatgggcgacatgtgattaccgtgattgccgagcatctccctctcagaatgtgaaatttacaggaagaagagatttgtctcagatacacatggcagtgtctatcttgaagaataaaatggatgagatgaataacttgtctcgtcctaagagtagtactcgcatcacccttaataaagttgccaaaggttctttgaatgatgcttgtttgacagcagctgctgtggatgattcttctggactgagaagtaatgcaaaaaatgttgatgagaagaaggatacaaatgatatctttgaaagccctggtccactgcatgatattattgtgtgttggttggatcagcatgaagttagcaacgttgcaggttttacccgggtggatgttcttatcgcggagcttatccgcaatggtatatttttccctcaggtttatgtcaggcagctaattattagtggaattactgataagaacgatacaatgctggatgttgaaagaaaaaggaggcatcacagaactttgaagcagcttcctgggtcttctttatttgatgttcttgaggaaactaggactgcagaagagcaacagctatatgagatgatgtcaacatactctagtgagcgacgccttgttctctcagaactttcatgtggtcattcattttatgcaagtggcagaggtgagtacacttcaagttcctgcattcggaagcagagtgatcttccagttgcatcagaaggtgataagcatggaagagtgctagaacaagtagaagatgttaaagctcttttgtcaagtctgttgggttttacatatcctcccctagtggaatcaaaactttgtgaaatcaaaacaagctttcaagaatcagtaacgtcaacgctcacacaagttgagactggggaagccaaaagtggatgcgaggattgtatgaggtccaaggggcagaaattggatgacagcgccactcctttccaagggtttccattgattcaatcaggcgaggaggatatttggtgggtgaagaaagggacaaagttacaagaatctttcaacgttgaacctgtacagaagtctgttaagcaaacttctagaggtagggcaaaagttgttcgtaaaacacaaagtcttgcacagcttgcagctgctagaatcgaaggtagccagggggcatctactagtcatgtttgtgaaagcaagatgagctgtccccaccatgaacctaataacgatggtgacaacgtcaaagattttgatcacacaagggcagcaaacgtgactgcaatagggaagtcactaaaaagacttagattgctcgaaagacgatctgtctcttcatggttgttgaaatcaataagacagcttgttgatggaaacggaatgacagcttctaaagctaccaattctataagcatccttcctttgcagcctgatgataaaactgcatccaaatggaggctaggtgatgaagaactgctgtcagttctctatgtactggatacatgctgtgattcagtctctggagtgaagttcctcatatggttactagtgaaaattcgtggagtgggctcctcaggtcaacctgggaggacttatatgcttatgaggaacagagatcaccaagtttgtcaggtcaacgaggcacttgtgttctcatctctgcttaggtatgagaacatacttcttgcgaccgacatcttgcctgatgttctaagtgctttagtgaacagaaattctatgtcagcaactaccaggcatcctggttcaacagcttttgcttatgttcgatattttttgaagaaatatagagatgtggctagtgtggccaagtgggagaaaaactttcggaccacttgtgatcaacgcctgttagctgagcttgataatgggcggtccattgatggtgatttggtatcttcttcgggtattttagcaggcgaggagattgatgagcaggtccgccaaaagttgaatggaaggagttcaagactcgtgcagaatatgaaagagatagtgcaacggcaagctgatggaattcagcgcagtttaaaggaaaagaaagttcttgcaggcgcagcacccaggaatccactcacttttgagaaagaagatagttatcaaattgcacatgacattgttttgggcttagtagaatgcatcaggcaaaatgggggtgcaaatccagatggagacctttcaatagttgcttctgctgtttctgcaatcgttgtgaatgctgggcatatgatagcaaaacatttggattttgcaggaggaaactatcaaggtgttaattctgtggctacttcgctaaattttgttcggcacactttacttattcacataaattctctttgcttactaaaagaaactcttggagatcgcttcagccgtgcctttgaaatagctctggcggttgaaacttctgcagctgttacagcagcttttgctcctccaaagatgcaccgcaatcagtttcaaccatctcctgaggcccatgatgcatatggaaatcatacaagtgagctcagcaactcagggaaaggttttgttgggagaactgcaaaagtatctgctgctatttctgctcttgttgtgggggctgttgttcatggagctgttagccttgagcggatggttgctactctaaaaataaaagatggtctggatattatgcagcttttgagaggtttgaaatcaaatacgaatggtgtatcccatcctactggaggttttaggattgaaaattccacggaagtttcggtacattggtttaggattttattggggaactgcagaactgtctatgatgggcttattgcagatattcttggagatccatacattattgcactctcaaggttgcagcggatgcttcctctaactgtaatttttcctccagcctactcaatttttgccatggttctttggagacgatatatttttaactgtgaagatccacaactttatcagtctttttcaaatgcaataaacgatattaccagacatcagccttttcgagagatctacttccgtaatacacatcggctgtataatcttctggcttctgatgttggtgattcgaagtttgcagcaatgcttgaaagtcatagtccggaccggaattcaaaaatattgccatttatacctctccgtgcacgcctttttctggacgctattattgattgcaacacaccaactattcagggggatggtgcttcagagccttgtgatcccaaagataatgaactaaagctttcagagaggcttatgcaacttcttgatactcttcaacctgcaaaatttcactggcaatgggttgagatgaggcttcttttagatgaacaggctcttatggaaaaagttgcagcaggcaagacaacacttgaatcacttcggtcattatcccctaaagctgagggttttgccctttctgatagtgagaaaggatttactgaagtcattctatcaaggctacttgctagacctgacgctgctcctctgtattcagaacttgtccaccttcttggaaagcttcaagagtcacttgttatggatgtaaaatggattctacaagggcaagatgctattcttgggcgcaggtcaacaagacaacagcttgttcatattgcccaacgaaaaggtctttcaacaaaggcacaggtttggaaaccatggggttggtccagcttgcttagcgatgccattcctaataaaactgcaaaaaggaagttggaagtcacatcaattgaggaaggagaagttgtggatgacactgttgatgctaaaaggactaccaagactccccctcatagtgttgatagaagctttgaagggattagatcgataaataaatatttaactgagaaagcccttgctgaattagtattgccttgcatcgacagaagttctgctgatatccgtggtatactttctgttgatttgaccaaacagatgggggctattagtgaacatatcaaagcaatagcattgaatggtgctaaacaagctggttcagtttcttcaggaaatgaagtgccatcgaacaaatcaagtggccgtagaggaattcgaggtggaagcccaaacattggtagaagagctccggttggtaatgacccaagtcctccttcggcttctgctctgcgggcagcgttgtggttacgcctccagttcatcattaggttgcttccagtaatcatggcagataggagcatgagacatacgcttgcttctgcaattctaggcctgcttgcaacgcgcatgatttatgaagatgcagatttgccccttcctcctaccaacgcaactgctttaaggcgggatgtggattccttgctggaacctcccctggatgtcctgcttgaccggcctggcgaaagcctttttgagaagcttttatgcgttctccatgcactgcttggtagctacaaaccaagttggctgaagtcaaggtcagcctctaggtcgtcaattaaaagccaacgagatttctcagcatttgataacgaagcagccgagggcttacagtccgcgttggaccacatggaattgcctgaaacaatcaggcggaggatccaagcagccatgcctcttcttccaccatccaggcgcccttgtatgcaatgccaacctccgcagttgtcgttggctgcattatcaccactccagagcagtacctctggtgtaggtcctcaacagaaaagttcttgtgtgagttgggtgcccactaacgtatcagtcagaagcaaggcagcattgccttctcatgaccctgaaacggaggtagatccatggagcttgctggaagatggcacaaactgccccccctccacagcatctggaagcaatggctcgagtggagtgacgggagaccatgctaatctgaaagcttccagctggcttaagggtgccgtgagggtgaggaggacagaactgacctacattgggtctgtagatgacgacagctgatacgtgtatgattatcttggtgaattggaggcaaagaatttggtctcacttgttggcatttgtgtcgtgtgcaagttaaaagcaccaactgcatcgaattctttgagagctctgtaccacaaggtggaatggaaaccatatggcttttggttggttgttgtagtgttagaatacatcgctgcccccgatttgttttagttagggcctgtgggggcggctgtatatagttggaatccatttctggattcaatgggggagcttatttgagaatcaggcaggaagccatgtagtagatttctagccaagagccctgtacttgttttttttttgggtctgagatgtaattgtcatgtcacatatattcttttgatctaaggctgacggaagttgcattgcctatttgctttagctattactagtgcagcctagacatcatgagtttggatcgttctatgactaaaccgtcctactggtttgctgtttgtttttg

SEQ ID NO: 6148 - DNA, 7002 bp, Zea Mays
tttcattgggagagctaacagatattcttttatttgcattcttatgcttgggccacctgacttctatccacaaacactaaactgtcccgaagagacattaacaaaagactatgtacaatatggttataaggagactgttgaaggaattgaggaagcaagagagattgtaataagtcagatcccatacttctgtaagccagatgttgtcataaagtgcaaggaggtttcgattttcacagcctgcacattctactggatgtactgcataggcactaaagaagcgtttaagagctatcaatgaatctcgtgctcaaaagagaaaggccggacaagtttatggagttcctctttctggatctctattaatcaagcctggagtttacccagagcaaaggccatgtaatgaggacacacgtagaaaatgggttgaggcccttgctcagccaaacaagcgactgcgttcattgtctgagcacgttcctcatggttatcgtaggaaatcactttttgaaggtctcattcgatataatgttccattactaagagcaacatggtttattaaagttacatacctgaatcaggcccgaccggcacctaacagtacttcagtagttgcttctgataatcaacgatctaatcaatggacaaaggatgttgttgaatatttacaacagattttggacgaagtttgttctaaagagggtgccattgtacctccatcttttaaagagcagtcatcaccaggacttgctgctggaaccaatcaaataaaaatgaaaacggaatcatctccagctggagacagtgaagaacccttggtgcacttcaaatggcggtatatggttcgcctcatccaatggcatctcacagaagaattgcttgttccctcagtacttatcgaatggttatctaaccaacttcaggagagggattcagatgatgttttagagcttcttttgcctattatacttggtctggttgacaccattactctctcacaaacatatgtgcgcatgttcgtggagctactagtgagacgtctcaatgtcgatcgtccaaaaaggttttcagtttcttctgttatagcagagttactgcgatacatggtacttgcagtgccagatacatttgtttctttggattgctttcctttcccatcatttgtggttcctgatgtatatggtagaggtgctttgttgaagataaccagtggtggtggaattttatgttctaagaggcgtgatgcttatcggtatttgtcctgtggttatgctgtttcttccattcagaaacgtgcacatgatcttgcagcagttgctaaccctagccttcaagcacgtggtgcagccaaagtggtacaggctttggacaaagctcttgtcacaggaaatttgtcagtggcatatttttcactctttaatgatttatctgatgcgttaatggaagaaagatggattaaagaagtgaatccctgtttgcagtcttctctgatgtggattgggactgttgagctatcccttatctgttctatatttttcctttgtgaatgggcgacatgtgattaccgtgattgccgagcatctccctctcagaatgtgaaatttacaggaagaagagatttgtctcagatacacatggcagtgtctatcttgaagaataaaatggatgagatgaataacttgtctcgtcctaagagtagtactcgcatcacccttaataaagttgccaaaggttctttgaatgatgcttgtttgacagcagctgctgtggatgattcttctggactgagaagtaatgcaaaaaatgttgatgagaagaaggatacaaatgatatctttgaaagccctggtccactgcatgatattattgtgtgttggttggatcagcatgaagttagcaacgttgcaggttttacccgggtggatgttcttatcgcggagcttatccgcaatggtatatttttccctcaggtttatgtcaggcagctaattattagtggaattactgataagaacgatacaatgctggatgttgaaagaaaaaggaggcatcacagaactttgaagcagcttcctgggtcttctttatttgatgttcttgaggaaactaggactgcagaagagcaacagctatatgagatgatgtcaacatactctagtgagcgacgccttgttctctcagaactttcatgtggtcattcattttatgcaagtggcagaggtgagtacacttcaagttcctgcattcggaagcagagtgatcttccagttgcatcagaaggtgataagcatggaagagtgctagaacaagtagaagatgttaaagctcttttgtcaagtctgttgggttttacatatcctcccctagtggaatcaaaactttgtgaaatcaaaacaagctttcaagaatcagtaacgtcaacgctcacacaagttgagactggggaagccaaaagtggatgcgaggattgtatgaggtccaaggggcagaaattggatgacagcgccactcctttccaagggtttccattgattcaatcaggcgaggaggatatttggtgggtgaagaaagggacaaagttacaagaatctttcaacgttgaacctgtacagaagtctgttaagcaaacttctagaggtagggcaaaagttgttcgtaaaacacaaagtcttgcacagcttgcagctgctagaatcgaaggtagccagggggcatctactagtcatgtttgtgaaagcaagatgagctgtccccaccatgaacctaataacgatggtgacaacgtcaaagattttgatcacacaagggcagcaaacgtgactgcaatagggaagtcactaaaaagacttagattgctcgaaagacgatctgtctcttcatggttgttgaaatcaataagacagcttgttgatggaaacggaatgacagcttctaaagctaccaattctataagcatccttcctttgcagcctgatgataaaactgcatccaaatggaggctaggtgatgaagaactgctgtcagttctctatgtactggatacatgctgtgattcagtctctggagtgaagttcctcatatggttactagtgaaaattcgtggagtgggctcctcaggtcaacctgggaggacttatatgcttatgaggaacagagatcaccaagtttgtcaggtcaacgaggcacttgtgttctcatctctgcttaggtatgagaacatacttcttgcgaccgacatcttgcctgatgttctaagtgctttagtgaacagaaattctatgtcagcaactaccaggcatcctggttcaacagcttttgcttatgttcgatattttttgaagaaatatagagatgtggctagtgtggccaagtgggagaaaaactttcggaccacttgtgatcaacgcctgttagctgagcttgataatgggcggtccattgatggtgatttggtatcttcttcgggtattttagcaggcgaggagattgatgagcaggtccgccaaaagttgaatggaaggagttcaagactcgtgcagaatatgaaagagatagtgcaacggcaagctgatggaattcagcgcagtttaaaggaaaagaaagttcttgcaggcgcagcacccaggaatccactcacttttgagaaagaagatagttatcaaattgcacatgacattgttttgggcttagtagaatgcatcaggcaaaatgggggtgcaaatccagatggagacctttcaatagttgcttctgctgtttctgcaatcgttgtgaatgctgggcatatgatagcaaaacatttggattttgcaggaggaaactatcaaggtgttaattctgtggctacttcgctaaattttgttcggcacactttacttattcacataaattctctttgcttactaaaagaaactcttggagatcgcttcagccgtgcctttgaaatagctctggcggttgaaacttctgcagctgttacagcagcttttgctcctccaaagatgcaccgcaatcagtttcaaccatctcctgaggcccatgatgcatatggaaatcatacaagtgagctcagcaactcagggaaaggttttgttgggagaactgcaaaagtatctgctgctatttctgctcttgttgtgggggctgttgttcatggagctgttagccttgagcggatggttgctactctaaaaataaaagatggtctggatattatgcagcttttgagaggtttgaaatcaaatacgaatggtgtatcccatcctactggaggttttaggattgaaaattccacggaagtttcggtacattggtttaggattttattggggaactgcagaactgtctatgatgggcttattgcagatattcttggagatccatacattattgcactctcaaggttgcagcggatgcttcctctaactgtaatttttcctccagcctactcaatttttgccatggttctttggagacgatatatttttaactgtgaagatccacaactttatcagtctttttcaaatgcaataaacgatattaccagacatcagccttttcgagagatctacttccgtaatacacatcggctgtataatcttctggcttctgatgttggtgattcgaagtttgcagcaatgcttgaaagtcatagtccggaccggaattcaaaaatattgccatttatacctctccgtgcacgcctttttctggacgctattattgattgcaacacaccaactattcagggggatggtgcttcagagccttgtgatcccaaagataatgaactaaagctttcagagaggcttatgcaacttcttgatactcttcaacctgcaaaatttcactggcaatgggttgagatgaggcttcttttagatgaacaggctcttatggaaaaagttgcagcaggcaagacaacacttgaatcacttcggtcattatcccctaaagctgagggttttgccctttctgatagtgagaaaggatttactgaagtcattctatcaaggctacttgctagacctgacgctgctcctctgtattcagaacttgtccaccttcttggaaagcttcaagagtcacttgttatggatgtaaaatggattctacaagggcaagatgctattcttgggcgcaggtcaacaagacaacagcttgttcatattgcccaacgaaaaggtctttcaacaaaggcacaggtttggaaaccatggggttggtccagcttgcttagcgatgccattcctaataaaactgcaaaaaggaagttggaagtcacatcaattgaggaaggagaagttgtggatgacactgttgatgctaaaaggactaccaagactccccctcatagtgttgatagaagctttgaagggattagatcgataaataaatatttaactgagaaagcccttgctgaattagtattgccttgcatcgacagaagttctgctgatatccgtggtatactttctgttgatttgaccaaacagatgggggctattagtgaacatatcaaagcaatagcattgaatggtgctaaacaagctggttcagtttcttcaggaaatgaagtgccatcgaacaaatcaagtggccgtagaggaattcgaggtggaagcccaaacattggtagaagagctccggttggtaatgacccaagtcctccttcggcttctgctctgcgggcagcgttgtggttacgcctccagttcatcattaggttgcttccagtaatcatggcagataggagcatgagacatacgcttgcttctgcaattctaggcctgcttgcaacgcgcatgatttatgaagatgcagatttgccccttcctcctaccaacgcaactgctttaaggcgggatgtggattccttgctggaacctcccctggatgtcctgcttgaccggcctggcgaaagcctttttgagaagcttttatgcgttctccatgcactgcttggtagctacaaaccaagttggctgaagtcaaggtcagcctctaggtcgtcaattaaaagccaacgagatttctcagcatttgataacgaagcagccgagggcttacagtccgcgttggaccacatggaattgcctgaaacaatcaggcggaggatccaagcagccatgcctcttcttccaccatccaggcgcccttgtatgcaatgccaacctccgcagttgtcgttggctgcattatcaccactccagagcagtacctctggtgtaggtcctcaacagaaaagttcttgtgtgagttgggtgcccactaacgtatcagtcagaagcaaggcagcattgccttctcatgaccctgaaacggaggtagatccatggagcttgctggaagatggcacaaactgccccccctccacagcatctggaagcaatggctcgagtggagtgacgggagaccatgctaatctgaaagcttccagctggcttaagggtgccgtgagggtgaggaggacagaactgacctacattgggtctgtagatgacgacagctgatacgtgtatgattatcttggtgaattggaggcaaagaatttggtctcacttgttggcatttgtgtcgtgtgcaagttaaaagcaccaactgcatcgaattctttgagagctctgtaccacaaggtggaatggaaaccatatggcttttggttggttgttgtagtgttagaatacatcgctgcccccgatttgttttagttagggcctgtgggggcggctgtatatagttggaatccatttctggattcaatgggggagcttatttgagaatcaggcaggaagccatgtagtagatttctagccaagagccctgtacttgttttttttttgggtctgagatgtaattgtcatgtcacatatattcttttgatctaaggctgacggaagttgcattgcctatttgctttagctattactagtgcagcctagacatcatgagtttggatcgttctatgactaaaccgtcctactggtttgctgtttgtttttg

SEQ ID NO: 6149 - DNA, 6984 bp, Zea Mays
gtctgagttatggaccaaaggcagttcatttcattgggagagctaacagatattcttttatttgcattcttatgcttgggccacctgacttctatccacaaacactaaactgtcccgaagagacattaacaaaagactatgtacaatatggttataaggagactgttgaaggaattgaggaagcaagagagattgtaataagtcagatcccatacttctgtaagccagatgttgtcataaagtgcaaggaggcactaaagaagcgtttaagagctatcaatgaatctcgtgctcaaaagagaaaggccggacaagtttatggagttcctctttctggatctctattaatcaagcctggagtttacccagagcaaaggccatgtaatgaggacacacgtagaaaatgggttgaggcccttgctcagccaaacaagcgactgcgttcattgtctgagcacgttcctcatggttatcgtaggaaatcactttttgaaggtctcattcgatataatgttccattactaagagcaacatggtttattaaagttacatacctgaatcaggcccgaccggcacctaacagtacttcagtagttgcttctgataatcaacgatctaatcaatggacaaaggatgttgttgaatatttacaacagattttggacgaagtttgttctaaagagggtgccattgtacctccatcttttaaagagcagtcatcaccaggacttgctgctggaaccaatcaaataaaaatgaaaacggaatcatctccagctggagacagtgaagaacccttggtgcacttcaaatggcggtatatggttcgcctcatccaatggcatctcacagaagaattgcttgttccctcagtacttatcgaatggttatctaaccaacttcaggagagggattcagatgatgttttagagcttcttttgcctattatacttggtctggttgacaccattactctctcacaaacatatgtgcgcatgttcgtggagctactagtgagacgtctcaatgtcgatcgtccaaaaaggttttcagtttcttctgttatagcagagttactgcgatacatggtacttgcagtgccagatacatttgtttctttggattgctttcctttcccatcatttgtggttcctgatgtatatggtagaggtgctttgttgaagataaccagtggtggtggaattttatgttctaagaggcgtgatgcttatcggtatttgtcctgtggttatgctgtttcttccattcagaaacgtgcacatgatcttgcagcagttgctaaccctagccttcaagcacgtggtgcagccaaagtggtacaggctttggacaaagctcttgtcacaggaaatttgtcagtggcatatttttcactctttaatgatttatctgatgcgttaatggaagaaagatggattaaagaagtgaatccctgtttgcagtcttctctgatgtggattgggactgttgagctatcccttatctgttctatatttttcctttgtgaatgggcgacatgtgattaccgtgattgccgagcatctccctctcagaatgtgaaatttacaggaagaagagatttgtctcagatacacatggcagtgtctatcttgaagaataaaatggatgagatgaataacttgtctcgtcctaagagtagtactcgcatcacccttaataaagttgccaaaggttctttgaatgatgcttgtttgacagcagctgctgtggatgattcttctggactgagaagtaatgcaaaaaatgttgatgagaagaaggatacaaatgatatctttgaaagccctggtccactgcatgatattattgtgtgttggttggatcagcatgaagttagcaacgttgcaggttttacccgggtggatgttcttatcgcggagcttatccgcaatggtatatttttccctcaggtttatgtcaggcagctaattattagtggaattactgataagaacgatacaatgctggatgttgaaagaaaaaggaggcatcacagaactttgaagcagcttcctgggtcttctttatttgatgttcttgaggaaactaggactgcagaagagcaacagctatatgagatgatgtcaacatactctagtgagcgacgccttgttctctcagaactttcatgtggtcattcattttatgcaagtggcagaggtgagtacacttcaagttcctgcattcggaagcagagtgatcttccagttgcatcagaaggtgataagcatggaagagtgctagaacaagtagaagatgttaaagctcttttgtcaagtctgttgggttttacatatcctcccctagtggaatcaaaactttgtgaaatcaaaacaagctttcaagaatcagtaacgtcaacgctcacacaagttgagactggggaagccaaaagtggatgcgaggattgtatgaggtccaaggggcagaaattggatgacagcgccactcctttccaagggtttccattgattcaatcaggcgaggaggatatttggtgggtgaagaaagggacaaagttacaagaatctttcaacgttgaacctgtacagaagtctgttaagcaaacttctagaggtagggcaaaagttgttcgtaaaacacaaagtcttgcacagcttgcagctgctagaatcgaaggtagccagggggcatctactagtcatgtttgtgaaagcaagatgagctgtccccaccatgaacctaataacgatggtgacaacgtcaaagattttgatcacacaagggcagcaaacgtgactgcaatagggaagtcactaaaaagacttagattgctcgaaagacgatctgtctcttcatggttgttgaaatcaataagacagcttgttgatggaaacggaatgacagcttctaaagctaccaattctataagcatccttcctttgcagcctgatgataaaactgcatccaaatggaggctaggtgatgaagaactgctgtcagttctctatgtactggatacatgctgtgattcagtctctggagtgaagttcctcatatggttactagtgaaaattcgtggagtgggctcctcaggtcaacctgggaggacttatatgcttatgaggaacagagatcaccaagtttgtcaggtcaacgaggcacttgtgttctcatctctgcttaggtatgagaacatacttcttgcgaccgacatcttgcctgatgttctaagtgctttagtgaacagaaattctatgtcagcaactaccaggcatcctggttcaacagcttttgcttatgttcgatattttttgaagaaatatagagatgtggctagtgtggccaagtgggagaaaaactttcggaccacttgtgatcaacgcctgttagctgagcttgataatgggcggtccattgatggtgatttggtatcttcttcgggtattttagcaggcgaggagattgatgagcaggtccgccaaaagttgaatggaaggagttcaagactcgtgcagaatatgaaagagatagtgcaacggcaagctgatggaattcagcgcagtttaaaggaaaagaaagttcttgcaggcgcagcacccaggaatccactcacttttgagaaagaagatagttatcaaattgcacatgacattgttttgggcttagtagaatgcatcaggcaaaatgggggtgcaaatccagatggagacctttcaatagttgcttctgctgtttctgcaatcgttgtgaatgctgggcatatgatagcaaaacatttggattttgcaggaggaaactatcaaggtgttaattctgtggctacttcgctaaattttgttcggcacactttacttattcacataaattctctttgcttactaaaagaaactcttggagatcgcttcagccgtgcctttgaaatagctctggcggttgaaacttctgcagctgttacagcagcttttgctcctccaaagatgcaccgcaatcagtttcaaccatctcctgaggcccatgatgcatatggaaatcatacaagtgagctcagcaactcagggaaaggttttgttgggagaactgcaaaagtatctgctgctatttctgctcttgttgtgggggctgttgttcatggagctgttagccttgagcggatggttgctactctaaaaataaaagatggtctggatattatgcagcttttgagaggtttgaaatcaaatacgaatggtgtatcccatcctactggaggttttaggattgaaaattccacggaagtttcggtacattggtttaggattttattggggaactgcagaactgtctatgatgggcttattgcagatattcttggagatccatacattattgcactctcaaggttgcagcggatgcttcctctaactgtaatttttcctccagcctactcaatttttgccatggttctttggagacgatatatttttaactgtgaagatccacaactttatcagtctttttcaaatgcaataaacgatattaccagacatcagccttttcgagagatctacttccgtaatacacatcggctgtataatcttctggcttctgatgttggtgattcgaagtttgcagcaatgcttgaaagtcatagtccggaccggaattcaaaaatattgccatttatacctctccgtgcacgcctttttctggacgctattattgattgcaacacaccaactattcagggggatggtgcttcagagccttgtgatcccaaagataatgaactaaagctttcagagaggcttatgcaacttcttgatactcttcaacctgcaaaatttcactggcaatgggttgagatgaggcttcttttagatgaacaggctcttatggaaaaagttgcagcaggcaagacaacacttgaatcacttcggtcattatcccctaaagctgagggttttgccctttctgatagtgagaaaggatttactgaagtcattctatcaaggctacttgctagacctgacgctgctcctctgtattcagaacttgtccaccttcttggaaagcttcaagagtcacttgttatggatgtaaaatggattctacaagggcaagatgctattcttgggcgcaggtcaacaagacaacagcttgttcatattgcccaacgaaaaggtctttcaacaaaggcacaggtttggaaaccatggggttggtccagcttgcttagcgatgccattcctaataaaactgcaaaaaggaagttggaagtcacatcaattgaggaaggagaagttgtggatgacactgttgatgctaaaaggactaccaagactccccctcatagtgttgatagaagctttgaagggattagatcgataaataaatatttaactgagaaagcccttgctgaattagtattgccttgcatcgacagaagttctgctgatatccgtggtatactttctgttgatttgaccaaacagatgggggctattagtgaacatatcaaagcaatagcattgaatggtgctaaacaagctggttcagtttcttcaggaaatgaagtgccatcgaacaaatcaagtggccgtagaggaattcgaggtggaagcccaaacattggtagaagagctccggttggtaatgacccaagtcctccttcggcttctgctctgcgggcagcgttgtggttacgcctccagttcatcattaggttgcttccagtaatcatggcagataggagcatgagacatacgcttgcttctgcaattctaggcctgcttgcaacgcgcatgatttatgaagatgcagatttgccccttcctcctaccaacgcaactgctttaaggcgggatgtggattccttgctggaacctcccctggatgtcctgcttgaccggcctggcgaaagcctttttgagaagcttttatgcgttctccatgcactgcttggtagctacaaaccaagttggctgaagtcaaggtcagcctctaggtcgtcaattaaaagccaacgagatttctcagcatttgataacgaagcagccgagggcttacagtccgcgttggaccacatggaattgcctgaaacaatcaggcggaggatccaagcagccatgcctcttcttccaccatccaggcgcccttgtatgcaatgccaacctccgcagttgtcgttggctgcattatcaccactccagagcagtacctctggtgtaggtcctcaacagaaaagttcttgtgtgagttgggtgcccactaacgtatcagtcagaagcaaggcagcattgccttctcatgaccctgaaacggaggtagatccatggagcttgctggaagatggcacaaactgccccccctccacagcatctggaagcaatggctcgagtggagtgacgggagaccatgctaatctgaaagcttccagctggcttaagggtgccgtgagggtgaggaggacagaactgacctacattgggtctgtagatgacgacagctgatacgtgtatgattatcttggtgaattggaggcaaagaatttggtctcacttgttggcatttgtgtcgtgtgcaagttaaaagcaccaactgcatcgaattctttgagagctctgtaccacaaggtggaatggaaaccatatggcttttggttggttgttgtagtgttagaatacatcgctgcccccgatttgttttagttagggcctgtgggggcggctgtatatagttggaatccatttctggattcaatgggggagcttatttgagaatcaggcaggaagccatgtagtagatttctagccaagagccctgtacttgttttttttttgggtctgagatgtaattgtcatgtcacatatattcttttgatctaaggctgacggaagttgcattgcctatttgctttagctattactagtgcagcctagacatcatgagtttggatcgttctatgactaaaccgtcctactggtttgctgtttgtttttg

SEQ ID NO: 6150 - DNA, 7586 bp, Zea Mays
cagcaggccaccatcaccactaccaccagcagcagcagcaacgcaggcacgctccatccactcgtcattcctccgccctgttgctcgcctccaccaccctgctcccgacctcgctccgccaccaaaccctagcctacctgcctttcccacaatcccaccccgtcccccccccccccgacccgagggcgactcgcccgccattttctccgcccgatttttcggacaagtgatcgacctcgcttccgacttcttcccgctcggccggcggggggtggggagtaccaggccactgccggcgacgctatcttttcttcttctcgctcttccaggcagacaggcttgccggccggcggctgagtgaggacaaataaaagaggcttcccccaccccggtgccgtcgcggagcgccttgattcgtgctcatgccgggggcgccgctcaggtgacttgcttgggggtgggggtgccatgcagaggtatgctgggttcagcggcagcagggacggggcgaggttggaagcctcaccgttttcgtcctcctcctcctctggttaccccgtcagctccaggcggcagcagcagctaactccgtacaagctaaagtgtgacaaggacccacttaataacaagcttgggccacctgacttctatccacaaacactaaactgtcccgaagagacattaacaaaagactatgtacaatatggttataaggagactgttgaaggaattgaggaagcaagagagattgtaataagtcagatcccatacttctgtaagccagatgttgtcataaagtgcaaggaggtttcgattttcacagcctgcacattctactggatgtactgcataggcactaaagaagcgtttaagagctatcaatgaatctcgtgctcaaaagagaaaggccggacaagtttatggagttcctctttctggatctctattaatcaagcctggagtttacccagagcaaaggccatgtaatgaggacacacgtagaaaatgggttgaggcccttgctcagccaaacaagcgactgcgttcattgtctgagcacgttcctcatggttatcgtaggaaatcactttttgaaggtctcattcgatataatgttccattactaagagcaacatggtttattaaagttacatacctgaatcaggcccgaccggcacctaacagtacttcagtagttgcttctgataatcaacgatctaatcaatggacaaaggatgttgttgaatatttacaacagattttggacgaagtttgttctaaagagggtgccattgtacctccatcttttaaagagcagtcatcaccaggacttgctgctggaaccaatcaaataaaaatgaaaacggaatcatctccagctggagacagtgaagaacccttggtgcacttcaaatggcggtatatggttcgcctcatccaatggcatctcacagaagaattgcttgttccctcagtacttatcgaatggttatctaaccaacttcaggagagggattcagatgatgttttagagcttcttttgcctattatacttggtctggttgacaccattactctctcacaaacatatgtgcgcatgttcgtggagctactagtgagacgtctcaatgtcgatcgtccaaaaaggttttcagtttcttctgttatagcagagttactgcgatacatggtacttgcagtgccagatacatttgtttctttggattgctttcctttcccatcatttgtggttcctgatgtatatggtagaggtgctttgttgaagataaccagtggtggtggaattttatgttctaagaggcgtgatgcttatcggtatttgtcctgtggttatgctgtttcttccattcagaaacgtgcacatgatcttgcagcagttgctaaccctagccttcaagcacgtggtgcagccaaagtggtacaggctttggacaaagctcttgtcacaggaaatttgtcagtggcatatttttcactctttaatgatttatctgatgcgttaatggaagaaagatggattaaagaagtgaatccctgtttgcagtcttctctgatgtggattgggactgttgagctatcccttatctgttctatatttttcctttgtgaatgggcgacatgtgattaccgtgattgccgagcatctccctctcagaatgtgaaatttacaggaagaagagatttgtctcagatacacatggcagtgtctatcttgaagaataaaatggatgagatgaataacttgtctcgtcctaagagtagtactcgcatcacccttaataaagttgccaaaggttctttgaatgatgcttgtttgacagcagctgctgtggatgattcttctggactgagaagtaatgcaaaaaatgttgatgagaagaaggatacaaatgatatctttgaaagccctggtccactgcatgatattattgtgtgttggttggatcagcatgaagttagcaacgttgcaggttttacccgggtggatgttcttatcgcggagcttatccgcaatggtatatttttccctcaggtttatgtcaggcagctaattattagtggaattactgataagaacgatacaatgctggatgttgaaagaaaaaggaggcatcacagaactttgaagcagcttcctgggtcttctttatttgatgttcttgaggaaactaggactgcagaagagcaacagctatatgagatgatgtcaacatactctagtgagcgacgccttgttctctcagaactttcatgtggtcattcattttatgcaagtggcagaggtgagtacacttcaagttcctgcattcggaagcagagtgatcttccagttgcatcagaaggtgataagcatggaagagtgctagaacaagtagaagatgttaaagctcttttgtcaagtctgttgggttttacatatcctcccctagtggaatcaaaactttgtgaaatcaaaacaagctttcaagaatcagtaacgtcaacgctcacacaagttgagactggggaagccaaaagtggatgcgaggattgtatgaggtccaaggggcagaaattggatgacagcgccactcctttccaagggtttccattgattcaatcaggcgaggaggatatttggtgggtgaagaaagggacaaagttacaagaatctttcaacgttgaacctgtacagaagtctgttaagcaaacttctagaggtagggcaaaagttgttcgtaaaacacaaagtcttgcacagcttgcagctgctagaatcgaaggtagccagggggcatctactagtcatgtttgtgaaagcaagatgagctgtccccaccatgaacctaataacgatggtgacaacgtcaaagattttgatcacacaagggcagcaaacgtgactgcaatagggaagtcactaaaaagacttagattgctcgaaagacgatctgtctcttcatggttgttgaaatcaataagacagcttgttgatggaaacggaatgacagcttctaaagctaccaattctataagcatccttcctttgcagcctgatgataaaactgcatccaaatggaggctaggtgatgaagaactgctgtcagttctctatgtactggatacatgctgtgattcagtctctggagtgaagttcctcatatggttactagtgaaaattcgtggagtgggctcctcaggtcaacctgggaggacttatatgcttatgaggaacagagatcaccaagtttgtcaggtcaacgaggcacttgtgttctcatctctgcttaggtatgagaacatacttcttgcgaccgacatcttgcctgatgttctaagtgctttagtgaacagaaattctatgtcagcaactaccaggcatcctggttcaacagcttttgcttatgttcgatattttttgaagaaatatagagatgtggctagtgtggccaagtgggagaaaaactttcggaccacttgtgatcaacgcctgttagctgagcttgataatgggcggtccattgatggtgatttggtatcttcttcgggtattttagcaggcgaggagattgatgagcaggtccgccaaaagttgaatggaaggagttcaagactcgtgcagaatatgaaagagatagtgcaacggcaagctgatggaattcagcgcagtttaaaggaaaagaaagttcttgcaggcgcagcacccaggaatccactcacttttgagaaagaagatagttatcaaattgcacatgacattgttttgggcttagtagaatgcatcaggcaaaatgggggtgcaaatccagatggagacctttcaatagttgcttctgctgtttctgcaatcgttgtgaatgctgggcatatgatagcaaaacatttggattttgcaggaggaaactatcaaggtgttaattctgtggctacttcgctaaattttgttcggcacactttacttattcacataaattctctttgcttactaaaagaaactcttggagatcgcttcagccgtgcctttgaaatagctctggcggttgaaacttctgcagctgttacagcagcttttgctcctccaaagatgcaccgcaatcagtttcaaccatctcctgaggcccatgatgcatatggaaatcatacaagtgagctcagcaactcagggaaaggttttgttgggagaactgcaaaagtatctgctgctatttctgctcttgttgtgggggctgttgttcatggagctgttagccttgagcggatggttgctactctaaaaataaaagatggtctggatattatgcagcttttgagaggtttgaaatcaaatacgaatggtgtatcccatcctactggaggttttaggattgaaaattccacggaagtttcggtacattggtttaggattttattggggaactgcagaactgtctatgatgggcttattgcagatattcttggagatccatacattattgcactctcaaggttgcagcggatgcttcctctaactgtaatttttcctccagcctactcaatttttgccatggttctttggagacgatatatttttaactgtgaagatccacaactttatcagtctttttcaaatgcaataaacgatattaccagacatcagccttttcgagagatctacttccgtaatacacatcggctgtataatcttctggcttctgatgttggtgattcgaagtttgcagcaatgcttgaaagtcatagtccggaccggaattcaaaaatattgccatttatacctctccgtgcacgcctttttctggacgctattattgattgcaacacaccaactattcagggggatggtgcttcagagccttgtgatcccaaagataatgaactaaagctttcagagaggcttatgcaacttcttgatactcttcaacctgcaaaatttcactggcaatgggttgagatgaggcttcttttagatgaacaggctcttatggaaaaagttgcagcaggcaagacaacacttgaatcacttcggtcattatcccctaaagctgagggttttgccctttctgatagtgagaaaggatttactgaagtcattctatcaaggctacttgctagacctgacgctgctcctctgtattcagaacttgtccaccttcttggaaagcttcaagagtcacttgttatggatgtaaaatggattctacaagggcaagatgctattcttgggcgcaggtcaacaagacaacagcttgttcatattgcccaacgaaaaggtctttcaacaaaggcacaggtttggaaaccatggggttggtccagcttgcttagcgatgccattcctaataaaactgcaaaaaggaagttggaagtcacatcaattgaggaaggagaagttgtggatgacactgttgatgctaaaaggactaccaagactccccctcatagtgttgatagaagctttgaagggattagatcgataaataaatatttaactgagaaagcccttgctgaattagtattgccttgcatcgacagaagttctgctgatatccgtggtatactttctgttgatttgaccaaacagatgggggctattagtgaacatatcaaagcaatagcattgaatggtgctaaacaagctggttcagtttcttcaggaaatgaagtgccatcgaacaaatcaagtggccgtagaggaattcgaggtggaagcccaaacattggtagaagagctccggttggtaatgacccaagtcctccttcggcttctgctctgcgggcagcgttgtggttacgcctccagttcatcattaggttgcttccagtaatcatggcagataggagcatgagacatacgcttgcttctgcaattctaggcctgcttgcaacgcgcatgatttatgaagatgcagatttgccccttcctcctaccaacgcaactgctttaaggcgggatgtggattccttgctggaacctcccctggatgtcctgcttgaccggcctggcgaaagcctttttgagaagcttttatgcgttctccatgcactgcttggtagctacaaaccaagttggctgaagtcaaggtcagcctctaggtcgtcaattaaaagccaacgagatttctcagcatttgataacgaagcagccgagggcttacagtccgcgttggaccacatggaattgcctgaaacaatcaggcggaggatccaagcagccatgcctcttcttccaccatccaggcgcccttgtatgcaatgccaacctccgcagttgtcgttggctgcattatcaccactccagagcagtacctctggtgtaggtcctcaacagaaaagttcttgtgtgagttgggtgcccactaacgtatcagtcagaagcaaggcagcattgccttctcatgaccctgaaacggaggtagatccatggagcttgctggaagatggcacaaactgccccccctccacagcatctggaagcaatggctcgagtggagtgacgggagaccatgctaatctgaaagcttccagctggcttaagggtgccgtgagggtgaggaggacagaactgacctacattgggtctgtagatgacgacagctgatacgtgtatgattatcttggtgaattggaggcaaagaatttggtctcacttgttggcatttgtgtcgtgtgcaagttaaaagcaccaactgcatcgaattctttgagagctctgtaccacaaggtggaatggaaaccatatggcttttggttggttgttgtagtgttagaatacatcgctgcccccgatttgttttagttagggcctgtgggggcggctgtatatagttggaatccatttctggattcaatgggggagcttatttgagaatcaggcaggaagccatgtagtagatttctagccaagagccctgtacttgttttttttttgggtctgagatgtaattgtcatgtcacatatattcttttgatctaaggctgacggaagttgcattgcctatttgctttagctattactagtgcagcctagacatcatgagtttggatcgttctatgactaaaccgtcctactggtttgctgtttgtttttg

SEQ ID NO: 6151 - DNA, 7151 bp, Zea Mays
cggagatggagacggacggacgccgctgggtctgcagggcgagacagggcagtatcgtatggtttcctttcttcctccccaggagcgcaacagcaacgcacacagacacagccgcagtgaccagaggagaccagcagcaggccaccatcaccactaccaccagcagcagcagcaacgcaggcggcagcagcagctaactccgtacaagctaaagtgtgacaaggacccacttaataacaagcttgggccacctgacttctatccacaaacactaaactgtcccgaagagacattaacaaaagactatgtacaatatggttataaggagactgttgaaggaattgaggaagcaagagagattgtaataagtcagatcccatacttctgtaagccagatgttgtcataaagtgcaaggaggcactaaagaagcgtttaagagctatcaatgaatctcgtgctcaaaagagaaaggccggacaagtttatggagttcctctttctggatctctattaatcaagcctggagtttacccagagcaaaggccatgtaatgaggacacacgtagaaaatgggttgaggcccttgctcagccaaacaagcgactgcgttcattgtctgagcacgttcctcatggttatcgtaggaaatcactttttgaaggtctcattcgatataatgttccattactaagagcaacatggtttattaaagttacatacctgaatcaggcccgaccggcacctaacagtacttcagtagttgcttctgataatcaacgatctaatcaatggacaaaggatgttgttgaatatttacaacagattttggacgaagtttgttctaaagagggtgccattgtacctccatcttttaaagagcagtcatcaccaggacttgctgctggaaccaatcaaataaaaatgaaaacggaatcatctccagctggagacagtgaagaacccttggtgcacttcaaatggcggtatatggttcgcctcatccaatggcatctcacagaagaattgcttgttccctcagtacttatcgaatggttatctaaccaacttcaggagagggattcagatgatgttttagagcttcttttgcctattatacttggtctggttgacaccattactctctcacaaacatatgtgcgcatgttcgtggagctactagtgagacgtctcaatgtcgatcgtccaaaaaggttttcagtttcttctgttatagcagagttactgcgatacatggtacttgcagtgccagatacatttgtttctttggattgctttcctttcccatcatttgtggttcctgatgtatatggtagaggtgctttgttgaagataaccagtggtggtggaattttatgttctaagaggcgtgatgcttatcggtatttgtcctgtggttatgctgtttcttccattcagaaacgtgcacatgatcttgcagcagttgctaaccctagccttcaagcacgtggtgcagccaaagtggtacaggctttggacaaagctcttgtcacaggaaatttgtcagtggcatatttttcactctttaatgatttatctgatgcgttaatggaagaaagatggattaaagaagtgaatccctgtttgcagtcttctctgatgtggattgggactgttgagctatcccttatctgttctatatttttcctttgtgaatgggcgacatgtgattaccgtgattgccgagcatctccctctcagaatgtgaaatttacaggaagaagagatttgtctcagatacacatggcagtgtctatcttgaagaataaaatggatgagatgaataacttgtctcgtcctaagagtagtactcgcatcacccttaataaagttgccaaaggttctttgaatgatgcttgtttgacagcagctgctgtggatgattcttctggactgagaagtaatgcaaaaaatgttgatgagaagaaggatacaaatgatatctttgaaagccctggtccactgcatgatattattgtgtgttggttggatcagcatgaagttagcaacgttgcaggttttacccgggtggatgttcttatcgcggagcttatccgcaatggtatatttttccctcaggtttatgtcaggcagctaattattagtggaattactgataagaacgatacaatgctggatgttgaaagaaaaaggaggcatcacagaactttgaagcagcttcctgggtcttctttatttgatgttcttgaggaaactaggactgcagaagagcaacagctatatgagatgatgtcaacatactctagtgagcgacgccttgttctctcagaactttcatgtggtcattcattttatgcaagtggcagaggtgagtacacttcaagttcctgcattcggaagcagagtgatcttccagttgcatcagaaggtgataagcatggaagagtgctagaacaagtagaagatgttaaagctcttttgtcaagtctgttgggttttacatatcctcccctagtggaatcaaaactttgtgaaatcaaaacaagctttcaagaatcagtaacgtcaacgctcacacaagttgagactggggaagccaaaagtggatgcgaggattgtatgaggtccaaggggcagaaattggatgacagcgccactcctttccaagggtttccattgattcaatcaggcgaggaggatatttggtgggtgaagaaagggacaaagttacaagaatctttcaacgttgaacctgtacagaagtctgttaagcaaacttctagaggtagggcaaaagttgttcgtaaaacacaaagtcttgcacagcttgcagctgctagaatcgaaggtagccagggggcatctactagtcatgtttgtgaaagcaagatgagctgtccccaccatgaacctaataacgatggtgacaacgtcaaagattttgatcacacaagggcagcaaacgtgactgcaatagggaagtcactaaaaagacttagattgctcgaaagacgatctgtctcttcatggttgttgaaatcaataagacagcttgttgatggaaacggaatgacagcttctaaagctaccaattctataagcatccttcctttgcagcctgatgataaaactgcatccaaatggaggctaggtgatgaagaactgctgtcagttctctatgtactggatacatgctgtgattcagtctctggagtgaagttcctcatatggttactagtgaaaattcgtggagtgggctcctcaggtcaacctgggaggacttatatgcttatgaggaacagagatcaccaagtttgtcaggtcaacgaggcacttgtgttctcatctctgcttaggtatgagaacatacttcttgcgaccgacatcttgcctgatgttctaagtgctttagtgaacagaaattctatgtcagcaactaccaggcatcctggttcaacagcttttgcttatgttcgatattttttgaagaaatatagagatgtggctagtgtggccaagtgggagaaaaactttcggaccacttgtgatcaacgcctgttagctgagcttgataatgggcggtccattgatggtgatttggtatcttcttcgggtattttagcaggcgaggagattgatgagcaggtccgccaaaagttgaatggaaggagttcaagactcgtgcagaatatgaaagagatagtgcaacggcaagctgatggaattcagcgcagtttaaaggaaaagaaagttcttgcaggcgcagcacccaggaatccactcacttttgagaaagaagatagttatcaaattgcacatgacattgttttgggcttagtagaatgcatcaggcaaaatgggggtgcaaatccagatggagacctttcaatagttgcttctgctgtttctgcaatcgttgtgaatgctgggcatatgatagcaaaacatttggattttgcaggaggaaactatcaaggtgttaattctgtggctacttcgctaaattttgttcggcacactttacttattcacataaattctctttgcttactaaaagaaactcttggagatcgcttcagccgtgcctttgaaatagctctggcggttgaaacttctgcagctgttacagcagcttttgctcctccaaagatgcaccgcaatcagtttcaaccatctcctgaggcccatgatgcatatggaaatcatacaagtgagctcagcaactcagggaaaggttttgttgggagaactgcaaaagtatctgctgctatttctgctcttgttgtgggggctgttgttcatggagctgttagccttgagcggatggttgctactctaaaaataaaagatggtctggatattatgcagcttttgagaggtttgaaatcaaatacgaatggtgtatcccatcctactggaggttttaggattgaaaattccacggaagtttcggtacattggtttaggattttattggggaactgcagaactgtctatgatgggcttattgcagatattcttggagatccatacattattgcactctcaaggttgcagcggatgcttcctctaactgtaatttttcctccagcctactcaatttttgccatggttctttggagacgatatatttttaactgtgaagatccacaactttatcagtctttttcaaatgcaataaacgatattaccagacatcagccttttcgagagatctacttccgtaatacacatcggctgtataatcttctggcttctgatgttggtgattcgaagtttgcagcaatgcttgaaagtcatagtccggaccggaattcaaaaatattgccatttatacctctccgtgcacgcctttttctggacgctattattgattgcaacacaccaactattcagggggatggtgcttcagagccttgtgatcccaaagataatgaactaaagctttcagagaggcttatgcaacttcttgatactcttcaacctgcaaaatttcactggcaatgggttgagatgaggcttcttttagatgaacaggctcttatggaaaaagttgcagcaggcaagacaacacttgaatcacttcggtcattatcccctaaagctgagggttttgccctttctgatagtgagaaaggatttactgaagtcattctatcaaggctacttgctagacctgacgctgctcctctgtattcagaacttgtccaccttcttggaaagcttcaagagtcacttgttatggatgtaaaatggattctacaagggcaagatgctattcttgggcgcaggtcaacaagacaacagcttgttcatattgcccaacgaaaaggtctttcaacaaaggcacaggtttggaaaccatggggttggtccagcttgcttagcgatgccattcctaataaaactgcaaaaaggaagttggaagtcacatcaattgaggaaggagaagttgtggatgacactgttgatgctaaaaggactaccaagactccccctcatagtgttgatagaagctttgaagggattagatcgataaataaatatttaactgagaaagcccttgctgaattagtattgccttgcatcgacagaagttctgctgatatccgtggtatactttctgttgatttgaccaaacagatgggggctattagtgaacatatcaaagcaatagcattgaatggtgctaaacaagctggttcagtttcttcaggaaatgaagtgccatcgaacaaatcaagtggccgtagaggaattcgaggtggaagcccaaacattggtagaagagctccggttggtaatgacccaagtcctccttcggcttctgctctgcgggcagcgttgtggttacgcctccagttcatcattaggttgcttccagtaatcatggcagataggagcatgagacatacgcttgcttctgcaattctaggcctgcttgcaacgcgcatgatttatgaagatgcagatttgccccttcctcctaccaacgcaactgctttaaggcgggatgtggattccttgctggaacctcccctggatgtcctgcttgaccggcctggcgaaagcctttttgagaagcttttatgcgttctccatgcactgcttggtagctacaaaccaagttggctgaagtcaaggtcagcctctaggtcgtcaattaaaagccaacgagatttctcagcatttgataacgaagcagccgagggcttacagtccgcgttggaccacatggaattgcctgaaacaatcaggcggaggatccaagcagccatgcctcttcttccaccatccaggcgcccttgtatgcaatgccaacctccgcagttgtcgttggctgcattatcaccactccagagcagtacctctggtgtaggtcctcaacagaaaagttcttgtgtgagttgggtgcccactaacgtatcagtcagaagcaaggcagcattgccttctcatgaccctgaaacggaggtagatccatggagcttgctggaagatggcacaaactgccccccctccacagcatctggaagcaatggctcgagtggagtgacgggagaccatgctaatctgaaagcttccagctggcttaagggtgccgtgagggtgaggaggacagaactgacctacattgggtctgtagatgacgacagctgatacgtgtatgattatcttggtgaattggaggcaaagaatttggtctcacttgttggcatttgtgtcgtgtgcaagttaaaagcaccaactgcatcgaattctttgagagctctgtaccacaaggtggaatggaaaccatatggcttttggttggttgttgtagtgttagaatacatcgctgcccccgatttgttttagttagggcctgtgggggcggctgtatatagttggaatccatttctggattcaatgggggagcttatttgagaatcaggcaggaagccatgtagtagatttctagccaagagccctgtacttgttttttttttgggtctgagatgtaattgtcatgtcacatatattcttttgatctaaggctgacggaagttgcattgcctatttgctttagctattactagtgcagcctagacatcatgagtttggatcgttctatgactaaaccgtcctactggtttgctgtttgtttttg

SEQ ID NO: 6152 - DNA, 1821 bp, Zea Mays
tcctgatagtagatgtgtggttcctgctgaggatgttgagcgcaaatttcagcatatggcaagttcagtgcataaggtagggatggtgctcgattcagtgcaaaacgacactatgcagttaaacagagccatgaaggaagctgcactagattctggaagcatacagcaaaagattgttgtcctcgacacttcgatgcagaaaaatcttaagggacaaggtgatctcaaagtgcttgttgagagcaacacaaaaaacattgctgatcagctggctgttctgaactcccactccaacaaactggttgagatatcctcagccctttcagtcttgccgaaacaaatagaaagagatttaaagcaacaacagagtgacatcttcagaatttttagaaacaacatggaggagattgctagagctgtcaaatctctcaacagtaagatcgatgcaatccaaatgccaacaagatgcacaaccaatggaaggcccctgatgaaccaactaccagtcgatagaaacgaaaggcctcaggtgaaccaaacaccagaggtaacccgggtgagccagacaacagtagcaagcttagtgaaccaagcaccagcagcaaatggaaggcacctgatgagcaaaacaccagcagcaaatgggaaaagtgtgatgagacaaacaccagcagaaaatggaaggcacctagtgagccaaacacctgcagcaaatggaaaaactctgaagagacaaacatcagtaacaaatggaatttccctgatgagccaagtaccagcagcaaatgggaaacctgtggtgatccaaataccagcaccaaaaggaagacctatgatgaggcagaaaacagcagaaagcggaaggaccgagatgaacgaaatacccgtagcaagtggacgaccccatacaaacaaaatacccatagcggaagtaatagggcatttatgaagaagtggtatttggactactgccgagcacaagtttgagaaactgctatatgctgatggcaggcatcccgcacctttggtgtgccctgcaaagcaggtagcaacagacccgaagcccaaggtagacgaggaaaagctgaaagcgcttccccaaaagctaactagttctagatccagggtggcacctaaacaggaagaggcggcaaatacaaaggtcatcagccgggcagcggcaactgagaaggtggtgatattcatcgacgactctgacgatgacaacgacgtccgtgcttcctgcgtgatcctcaggccctcgggatcaggcagcttaggtgagagggaatgcgacctgatgaaggtgggcgcggaggagagccaggagatcccgcggagggccaggaagcggaggagaagagaaatgcaggccactgtgggtgtggcatgtatgccgctgcctgcctgagcttcggtatggttgactgattggtataattgactgattaattgatgcggtcggtaatttagagcagtgtttgcactgcactgcatactctataaaaggaacagtagtagataggtgaacatgaatgaatgaggacaggaaaacaaaggatcagggttatattatgaatatagtagagagaaacacagttttgttgtggtgtttgttgtgttataataaatcatattggaggtgggaatgaagtcattattactggaggatatatcacaagtactaccttcgttcttaatatttgtcgttcttaatggcaggagctatacggttctgcctttcaattaagaaaaagaatggaattaacacggttttaagaaaaaacaggcctgaaacctccacatagtgcacaaacaacc

SEQ ID NO: 6153 - DNA, 1751 bp, Zea Mays
cttcctgatagtagatgtgtggttcctgctgaggatgttgagcgcaaatttcagcatatggcaagttcagtgcataaggtagggatggtgctcgattcagtgcaaaacgacactatgcagttaaacagagccatgaaggaagctgcactagattctggaagcatacagcaaaagattgttgtcctcgacacttcgatgcagaaaaatcttaagggacaaggtgatctcaaagtgcttgttgagagcaacacaaaaaacattgctgatcagctggctgttctgaactcccactccaacaaactggttgagatatcctcagccctttcagtcttgccgaaacaaatagaaagagatttaaagcaacaacagagtgacatcttcagaatttttagaaacaacatggaggagattgctagagctgtcaaatctctcaacagtaagatcgatgcaatccaaatgccaacagagcagagatgcacaaccaatggaaggcccctgatgaaccaactaccagtcgatagaaacgaaaggcctcaggtgaaccaaacaccagaggtaacccgggtgagccagacaacagtagcaagcttagtgaaccaagcaccagcagcaaatggaaggcacctgatgagcaaaacaccagcagcaaatgggaaaagtgtgatgagacaaacaccagcagaaaatggaaggcacctagtgagccaaacacctgcagcaaatggaaaaactctgaagagacaaacatcagtaacaaatggaatttccctgatgagccaagtaccagcagcaaatgggaaacctgtggtgatccaaataccagcaccaaaaggaagacctatgatgaggcagaaaacagcagaaagcggaaggaccgagatgaacgaaatacccgtagcaagtggacgaccccatacaaacaaaatacccatagcggaagtgcatcccgcacctttggtgtgccctgcaaagcaggtagcaacagacccgaagcccaaggtagacgaggaaaagctgaaagcgcttccccaaaagctaactagttctagatccagggtggcacctaaacaggaagaggcggcaaatacaaaggtcatcagccgggcagcggcaactgagaaggtggtgatattcatcgacgactctgacgatgacaacgacgtccgtgcttcctgcgtgatcctcaggccctcgggatcaggcagcttaggtgagagggaatgcgacctgatgaaggtgggcgcggaggagagccaggagatcccgcggagggccaggaagcggaggagaagagaaatgcaggccactgtgggtgtggcatgtatgccgctgcctgcctgagcttcggtatggttgactgattggtataattgactgattaattgatgcggtcggtaatttagagcagtgtttgcactgcactgcatactctataaaaggaacagtagtagataggtgaacatgaatgaatgaggacaggaaaacaaaggatcagggttatattatgaatatagtagagagaaacacagttttgttgtggtgtttgttgtgttataataaatcatattggaggtgggaatgaagtcattattactggaggatatatcacaagtactaccttcgttcttaatatttgtcgttcttaatggcaggagctatacggttctgcctttcaattaagaaaaagaatggaattaacacggttttaagaaaaaacaggcctgaaacctccacatagtgcacaaacaacc

SEQ ID NO: 6154 - DNA, 2228 bp, Zea Mays
gttctgttcctgctcctctctcaccgcaccggcgatcaccacgggatgacgggagcaggcatgaagcttaagatcaacaaggcatgcgacctcagctccatctccgtcctccctccccgtaggaccggagggagtggcggcgcaggttcctcggccgcggccgcggctgtggcggcggggtcgcagcagcggtcccagccgctgtcgcagcaatccttctcgcagggcgctgtggggagcggcggcgcgtcgtcgctcctgcactcgcagtcgcagctatcgcaggcctccctcgacgagaacctcctcacactccacctcgcttcgcccgcgcgcgaccagggattcaggttgcatgacgactcatcaaagaagatgacatcgttgcctgtcacctcagcttcttgtgtgcgagaagaatctcagctgcaactggcaaaaacatcaagcaaccctgtccatcgatggaacccttctcttcctgatagtagatgtgtggttcctgctgaggatgttgagcgcaaatttcagcatatggcaagttcagtgcataaggtagggatggtgctcgattcagtgcaaaacgacactatgcagttaaacagagccatgaaggaagctgcactagattctggaagcatacagcaaaagattgttgtcctcgacacttcgatgcagaaaaatcttaagggacaaggtgatctcaaagtgcttgttgagagcaacacaaaaaacattgctgatcagctggctgttctgaactcccactccaacaaactggttgagatatcctcagccctttcagtcttgccgaaacaaatagaaagagatttaaagcaacaacagagtgacatcttcagaatttttagaaacaacatggaggagattgctagagctgtcaaatctctcaacagtaagatcgatgcaatccaaatgccaacagagcagagatgcacaaccaatggaaggcccctgatgaaccaactaccagtcgatagaaacgaaaggcctcaggtgaaccaaacaccagaggtaacccgggtgagccagacaacagtagcaagcttagtgaaccaagcaccagcagcaaatggaaggcacctgatgagcaaaacaccagcagcaaatgggaaaagtgtgatgagacaaacaccagcagaaaatggaaggcacctagtgagccaaacacctgcagcaaatggaaaaactctgaagagacaaacatcagtaacaaatggaatttccctgatgagccaagtaccagcagcaaatgggaaacctgtggtgatccaaataccagcaccaaaaggaagacctatgatgaggcagaaaacagcagaaagcggaaggaccgagatgaacgaaatacccgtagcaagtggacgaccccatacaaacaaaatacccatagcggaagtgcatcccgcacctttggtgtgccctgcaaagcaggtagcaacagacccgaagcccaaggtagacgaggaaaagctgaaagcgcttccccaaaagctaactagttctagatccagggtggcacctaaacaggaagaggcggcaaatacaaaggtcatcagccgggcagcggcaactgagaaggtggtgatattcatcgacgactctgacgatgacaacgacgtccgtgcttcctgcgtgatcctcaggccctcgggatcaggcagcttaggtgagagggaatgcgacctgatgaaggtgggcgcggaggagagccaggagatcccgcggagggccaggaagcggaggagaagagaaatgcaggccactgtgggtgtggcatgtatgccgctgcctgcctgagcttcggtatggttgactgattggtataattgactgattaattgatgcggtcggtaatttagagcagtgtttgcactgcactgcatactctataaaaggaacagtagtagataggtgaacatgaatgaatgaggacaggaaaacaaaggatcagggttatattatgaatatagtagagagaaacacagttttgttgtggtgtttgttgtgttataataaatcatattggaggtgggaatgaagtcattattactggaggatatatcacaagtactaccttcgttcttaatatttgtcgttcttaatggcaggagctatacggttctgcctttcaattaagaaaaagaatggaattaacacggttttaagaaaaaacaggcctgaaacctccacatagtgcacaaacaacc

SEQ ID NO: 6155 - DNA, 1902 bp, Zea Mays
ctactccccacagcagctgaaaaccaaagaaaccgttggcggacgcccaccaaccaaaaaaaaaaaaaacccacgcctttcctccccgccggggctctccactctcgctccaacgccgacggagaagccgcagctctgctccctcgctctctcttccgggagcgcgtggctctattccattcgcgcccgctcggctgacaacggaggataaaattttgatcctttcatttgttggacattggatcaactggtgctgttatacatagaaaggagttcattgtaatttctcatctatatttagtggtgccataatcatttttccactggtgttcggcaataatgtcggagagcgagttagcagtaataaaaccagaggcgttaaagacttatatctggcttcagtgctttgatggttccattcagcaagtggaggaggaggttgcaatgttctgccccatgatatgtcgtgaaattgtgaaaaatggcacagggtcgtccaaaaatcatgctattgcgctccctgaaagagttaatccagccagtttgagtttgattcttgactactgccggtttcatcaggttactgggcgctcaaacaaggagcggaagtcctttgatgaaaaatttgttaggatagaaacagaaagactctgcgaattgacttctgcagctgacagtctacagctaaagccacttgttgatcttactagtcgagctcttgctcgaattattgaaggaaagacacctgaggaaatccgtgacattttccacttaccagatgacttaacagaggaagagaagttggagcccctaaaaaatgtaaatgatgatcctaggattcgcctattgaaccggttgtacgcgaagaagcggaaagagctccaggagcgccagaagctgaaggatgtacaagtacaaaaggaggaaaaagatgagagatctttggatgagttactttgttttattaatggggatggaggtataactacagttcaggaggtggggaaagtagtaccaagagtaagaaaaagaataaaagaaggaaggatcatgctaagaaccccgcaaaagctgactctgagtctgtaaatgtggttaggtttcctgactgtttcccctgctgtgtattccatataggatatgtatttcttacatgatctatctggggagtttaggagggagctgcttgtgtggttccgtgcaaagtggatagcagtaatgtttctagacttccatgccaaagtccagatatgcaagatgatgtcgagtacccctttgaagatgctgacctcgatgatggacttgatcctgcaatgaaagaagagcttgatagagaagttgaggactttgcgaggaggttgaattcagtttggagcgagtcacatattggtggtaatggttctgtgcagagatttcctgggtttaatcacaggtgagtgttaagctggcaagatctgaaggcagaagctgaggagatttgtgggcatacagcttggaagggattaaaggccaaacaggccaccttggctcctgtgtgttgtaaaaccttgataactcaggaaccaagcatgcagaaatgcgcaagttcccttggccattttcctgggaaggaggccacctagttgggatgacccttttttttctttgggaagggagggttagaggtctgtcttgactcaattttttgttccttaactgctgtgttgccagttttcctgaataggggaagagaggagtgttgcctgttagctctgttacagatgtccatggaattctgttgtaacactgtattgtggtgcacatagaaatgtgattccctgtattgccgatgtttggctggtttgttgaccgtaccttattattactgagcaaagaggcgtctggacagctgttgggactaaa

SEQ ID NO: 6156 - DNA, 1838 bp, Zea Mays
ctactccccacagcagctgaaaaccaaagaaaccgttggcggacgcccaccaaccaaaaaaaaaaaaaacccacgcctttcctccccgccggggctctccactctcgctccaacgccgacggagaagccgcagctctgctccctcgctctctcttccgggagcgcgtggctctattccattcgcgcccgctcggctgacaacggaggataaaattttgatcctttcatttgttggacattggatcaactggtgctgttatacatagaaaggagttcattgtaatttctcatctatatttagtggtgccataatcatttttccactggtgttcggcaataatgtcggagagcgagttagcagtaataaaaccagaggtacaatcccctgcagcccccctctccggcgttaaagacttatatctggcttcagtgctttgatggttccattcagcaagtggaggaggaggttgcaatgttctgccccatgatatgtcgtgaaattgtgaaaaatggcacagggtcgtccaaaaatcatgctattgcgctccctgaaagagttaatccagccagtttgagtttgattcttgactactgccggtttcatcaggttactgggcgctcaaacaaggagcggaagtcctttgatgaaaaatttgttaggatagaaacagaaagactctgcgaattgacttctgcagctgacagtctacagctaaagccacttgttgatcttactagtcgagctcttgctcgaattattgaaggaaagacacctgaggaaatccgtgacattttccacttaccagatgacttaacagaggaagagaagttggagcccctaaaaaatgtaaatgatgatcctaggattcgcctattgaaccggttgtacgcgaagaagcggaaagagctccaggagcgccagaagctgaaggatgtacaagtacaaaaggaggaaaaagatgagagatctttggatgagttactttgttttattaatggggatggaggttcaggaggtggggaaagtagtaccaagagtaagaaaaagaataaaagaaggaaggatcatgctaagaaccccgcaaaagctgactctgagtctgtaaatgtggagggagctgcttgtgtggttccgtgcaaagtggatagcagtaatgtttctagacttccatgccaaagtccagatatgcaagatgatgtcgagtacccctttgaagatgctgacctcgatgatggacttgatcctgcaatgaaagaagagcttgatagagaagttgaggactttgcgaggaggttgaattcagtttggagcgagtcacatattggtggtaatggttctgtgcagagatttcctgggtttaatcacaggtgagtgttaagctggcaagatctgaaggcagaagctgaggagatttgtgggcatacagcttggaagggattaaaggccaaacaggccaccttggctcctgtgtgttgtaaaaccttgataactcaggaaccaagcatgcagaaatgcgcaagttcccttggccattttcctgggaaggaggccacctagttgggatgacccttttttttctttgggaagggagggttagaggtctgtcttgactcaattttttgttccttaactgctgtgttgccagttttcctgaataggggaagagaggagtgttgcctgttagctctgttacagatgtccatggaattctgttgtaacactgtattgtggtgcacatagaaatgtgattccctgtattgccgatgtttggctggtttgttgaccgtaccttattattactgagcaaagaggcgtctggacagctgttgggactaaa

SEQ ID NO: 6157 - DNA, 2039 bp, Zea Mays
ctactccccacagcagctgaaaaccaaagaaaccgttggcggacgcccaccaaccaaaaaaaaaaaaaacccacgcctttcctccccgccggggctctccactctcgctccaacgccgacggagaagccgcagctctgctccctcgctctctcttccgggagcgcgtggctctattccattcgcgcccgctcggctgacaacggagctgtaggttaacctggtaaaccaattaccttgaagctgaactgtgccgttgaagccaaaatttattacgtgagtctagattgcaaaaaataggcgccactcattgatctgatgccaaatgagataattgtggcataccctgatttcttctacaggataaaattttgatcctttcatttgttggacattggatcaactggtgctgttatacatagaaaggagttcattgtaatttctcatctatatttagtggtgccataatcatttttccactggtgttcggcaataatgtcggagagcgagttagcagtaataaaaccagaggcgttaaagacttatatctggcttcagtgctttgatggttccattcagcaagtggaggaggaggttgcaatgttctgccccatgatatgtcgtgaaattgtgaaaaatggcacagggtcgtccaaaaatcatgctattgcgctccctgaaagagttaatccagccagtttgagtttgattcttgactactgccggtttcatcaggttactgggcgctcaaacaaggagcggaagtcctttgatgaaaaatttgttaggatagaaacagaaagactctgcgaattgacttctgcagctgacagtctacagctaaagccacttgttgatcttactagtcgagctcttgctcgaattattgaaggaaagacacctgaggaaatccgtgacattttccacttaccagatgacttaacagaggaagagaagttggagcccctaaaaaatgtaaatgatgatcctaggattcgcctattgaaccggttgtacgcgaagaagcggaaagagctccaggagcgccagaagctgaaggatgtacaagtacaaaaggaggaaaaagatgagagatctttggatgagttactttgttttattaatggggatggaggaggtggggaaagtagtaccaagagtaagaaaaagaataaaagaaggaaggatcatgctaagaaccccgcaaaagctgactctgagtctgtaaatgtggttaggtttcctgactgtttcccctgctgtgtattccatataggatatgtatttcttacatgatctatctggggagtttaggagggagctgcttgtgtggttccgtgcaaagtggatagcagtaatgtttctagacttccatgccaaagtccagatatgcaagatgatgtcgagtacccctttgaagatgctgacctcgatgatggacttgatcctgcaatgaaagaagagcttgatagagaagttgaggactttgcgaggaggttgaattcagtttggagcgagtcacatattggtggtaatggttctgtgcagagatttcctgggtttaatcacaggtgagtgttaagctggcaagatctgaaggcagaagctgaggagatttgtgggcatacagcttggaagggattaaaggccaaacaggccaccttggctcctgtgtgttgtaaaaccttgataactcaggaaccaagcatgcagaaatgcgcaagttcccttggccattttcctgggaaggaggccacctagttgggatgacccttttttttctttgggaagggagggttagaggtctgtcttgactcaattttttgttccttaactgctgtgttgccagttttcctgaataggggaagagaggagtgttgcctgttagctctgttacagatgtccatggaattctgttgtaacactgtattgtggtgcacatagaaatgtgattccctgtattgccgatgtttggctggtttgttgaccgtaccttattattactgagcaaagaggcgtctggacagctgttgggactaaa

SEQ ID NO: 6158 - DNA, 1849 bp, Zea Mays
ctactccccacagcagctgaaaaccaaagaaaccgttggcggacgcccaccaaccaaaaaaaaaaaaaacccacgcctttcctccccgccggggctctccactctcgctccaacgccgacggagaagccgcagctctgctccctcgctctctcttccgggagcgcgtggctctattccattcgcgcccgctcggctgacaacggaggataaaattttgatcctttcatttgttggacattggatcaactggtgctgttatacatagaaaggagttcattgtaatttctcatctatatttagtggtgccataatcatttttccactggtgttcggcaataatgtcggagagcgagttagcagtaataaaaccagaggtacaatcccctgcagcccccctctccggcgttaaagacttatatctggcttcagtgctttgatggttccattcagcaagtggaggaggaggttgcaatgttctgccccatgatatgtcgtgaaattgtgaaaaatggcacagggtcgtccaaaaatcatgctattgcgctccctgaaagagttaatccagccagtttgagtttgattcttgactactgccggtttcatcaggttactgggcgctcaaacaaggagcggaagtcctttgatgaaaaatttgttaggatagaaacagaaagactctgcgaattgacttctgcagctgacagtctacagctaaagccacttgttgatcttactagtcgagctcttgctcgaattattgaaggaaagacacctgaggaaatccgtgacattttccacttaccagatgacttaacagaggaagagaagttggagcccctaaaaaatgtaaatgatgatcctaggattcgcctattgaaccggttgtacgcgaagaagcggaaagagctccaggagcgccagaagctgaaggatgtacaagtacaaaaggaggaaaaagatgagagatctttggatgagttactttgttttattaatggggatggaggtataactacagttcaggaggtggggaaagtagtaccaagagtaagaaaaagaataaaagaaggaaggatcatgctaagaaccccgcaaaagctgactctgagtctgtaaatgtggagggagctgcttgtgtggttccgtgcaaagtggatagcagtaatgtttctagacttccatgccaaagtccagatatgcaagatgatgtcgagtacccctttgaagatgctgacctcgatgatggacttgatcctgcaatgaaagaagagcttgatagagaagttgaggactttgcgaggaggttgaattcagtttggagcgagtcacatattggtggtaatggttctgtgcagagatttcctgggtttaatcacaggtgagtgttaagctggcaagatctgaaggcagaagctgaggagatttgtgggcatacagcttggaagggattaaaggccaaacaggccaccttggctcctgtgtgttgtaaaaccttgataactcaggaaccaagcatgcagaaatgcgcaagttcccttggccattttcctgggaaggaggccacctagttgggatgacccttttttttctttgggaagggagggttagaggtctgtcttgactcaattttttgttccttaactgctgtgttgccagttttcctgaataggggaagagaggagtgttgcctgttagctctgttacagatgtccatggaattctgttgtaacactgtattgtggtgcacatagaaatgtgattccctgtattgccgatgtttggctggtttgttgaccgtaccttattattactgagcaaagaggcgtctggacagctgttgggactaaa

SEQ ID NO: 6159 - DNA, 1849 bp, Zea Mays
ctactccccacagcagctgaaaaccaaagaaaccgttggcggacgcccaccaaccaaaaaaaaaaaaaacccacgcctttcctccccgccggggctctccactctcgctccaacgccgacggagaagccgcagctctgctccctcgctctctcttccgggagcgcgtggctctattccattcgcgcccgctcggctgacaacggaggataaaattttgatcctttcatttgttggacattggatcaactggtgctgttatacatagaaaggagttcattgtaatttctcatctatatttagtggtgccataatcatttttccactggtgttcggcaataatgtcggagagcgagttagcagtaataaaaccagaggcgttaaagacttatatctggcttcagtgctttgatggttccattcagcaagtggaggaggaggttgcaatgttctgccccatgatatgtcgtgaaattgtgaaaaatggcacagggtcgtccaaaaatcatgctattgcgctccctgaaagagttaatccagccagtttgagtttgattcttgactactgccggtttcatcaggttactgggcgctcaaacaaggagcggaagtcctttgatgaaaaatttgttaggatagaaacagaaagactctgcgaattgacttctgcagctgacagtctacagctaaagccacttgttgatcttactagtcgagctcttgctcgaattattgaaggaaagacacctgaggaaatccgtgacattttccacttaccagatgacttaacagaggaagagaagttggagcccctaaaaaatgtaaatgatgatcctaggattcgcctattgaaccggttgtacgcgaagaagcggaaagagctccaggagcgccagaagctgaaggatgtacaagtacaaaaggaggaaaaagatgagagatctttggatgagttactttgttttattaatggggatggaggttcaggaggtggggaaagtagtaccaagagtaagaaaaagaataaaagaaggaaggatcatgctaagaaccccgcaaaagctgactctgagtctgtaaatgtggagggagctgcttgtgtggttccgtgcaaagtggatagcagtaatgtttctagacttccatgccaaagtccagatatgcaagatgatgtcgagtacccctttgaagatgctgacctcgatgatggacttgatcctgcaatgaaagaagagcttgatagagaagttgaggactttgcgaggaggttgaattcagtttggagcgagtcacatattggtggtaatggttctgtgcagagatttcctggcattgacatacttaaaaatcttgtttgactatttgcagggtttaatcacaggtgagtgttaagctggcaagatctgaaggcagaagctgaggagatttgtgggcatacagcttggaagggattaaaggccaaacaggccaccttggctcctgtgtgttgtaaaaccttgataactcaggaaccaagcatgcagaaatgcgcaagttcccttggccattttcctgggaaggaggccacctagttgggatgacccttttttttctttgggaagggagggttagaggtctgtcttgactcaattttttgttccttaactgctgtgttgccagttttcctgaataggggaagagaggagtgttgcctgttagctctgttacagatgtccatggaattctgttgtaacactgtattgtggtgcacatagaaatgtgattccctgtattgccgatgtttggctggtttgttgaccgtaccttattattactgagcaaagaggcgtctggacagctgttgggactaaa

SEQ ID NO: 6160 - DNA, 2188 bp, Zea Mays
ctactccccacagcagctgaaaaccaaagaaaccgttggcggacgcccaccaaccaaaaaaaaaaaaaacccacgcctttcctccccgccggggctctccactctcgctccaacgccgacggagaagccgcagctctgctccctcgctctctcttccgggagcgcgtggctctattccattcgcgcccgctcggctgacaacggagctgtaggttaacctggtaaaccaattaccttgaagctgaactgtgccgttgaagccaaaatttattacgataaaattttgatcctttcatttgttggacattggatcaactggtgctgttatacatagaaaggagttcattgtaatttctcatctatatttagtggtgccataatcatttttccactggtgttcggcaataatgtcggagagcgagttagcagtaataaaaccagaggcgttaaagacttatatctggcttcagtgctttgatggttccattcagcaagtggaggaggaggttgcaatgttctgccccatgatatgtcgtgaaattgtgaaaaatggcacagggtcgtccaaaaatcatgctattgcgctccctgaaagagttaatccagccagtttgagtttgattcttgactactgccggtttcatcaggttactgggcgctcaaacaaggagcggaagtcctttgatgaaaaatttgttaggatagaaacagaaagactctgcgaattgacttctgcagctgacagtctacagctaaagccacttgttgatcttactagtcgagctcttgctcgaattattgaaggaaagacacctgaggaaatccgtgacattttccacttaccagatgacttaacagaggaagagaagttggagcccctaaaaaatgtaaatgatgatcctaggattcgcctattgaaccggttgtacgcgaagaagcggaaagagctccaggagcgccagaagctgaaggatgtacaagtacaaaaggaggaaaaagatgagagatctttggatgagttactttgttttattaatggggatggaggtataactacagtgagttatattgactatatgacttatgttattctgttcactgtttgtttctgaaactctttagatgacttaaatctgatgttttactgaggccagatattggtcaattttactccctaagattctgttcttttgaagtattgactatctgttaccttggttcttggttgattttcatcattgtttcatgttcaaccaaagtctaaaggctgaaacatttgcttaattagtgttttgtttaaataaaaacattcttaggctccatataaaccatttgacaggttcaggaggtggggaaagtagtaccaagagtaagaaaaagaataaaagaaggaaggatcatgctaagaaccccgcaaaagctgactctgagtctgtaaatgtggagggagctgcttgtgtggttccgtgcaaagtggatagcagtaatgtttctagacttccatgccaaagtccagatatgcaagatgatgtcgagtacccctttgaagatgctgacctcgatgatggacttgatcctgcaatgaaagaagagcttgatagtctgtttttaacatgcagagaagttgaggactttgcgaggaggttgaattcagtttggagcgagtcacatattggtggtaatggttctgtgcagagatttcctgggtttaatcacaggtgagtgttaagctggcaagatctgaaggcagaagctgaggagatttgtgggcatacagcttggaagggattaaaggccaaacaggccaccttggctcctgtgtgttgtaaaaccttgataactcaggaaccaagcatgcagaaatgcgcaagttcccttggccattttcctgggaaggaggccacctagttgggatgacccttttttttctttgggaagggagggttagaggtctgtcttgactcaattttttgttccttaactgctgtgttgccagttttcctgaataggggaagagaggagtgttgcctgttagctctgttacagatgtccatggaattctgttgtaacactgtattgtggtgcacatagaaatgtgattccctgtattgccgatgtttggctggtttgttgaccgtaccttattattactgagcaaagaggcgtctggacagctgttgggactaaa

SEQ ID NO: 6161 - DNA, 1889 bp, Zea Mays
ctactccccacagcagctgaaaaccaaagaaaccgttggcggacgcccaccaaccaaaaaaaaaaaaaacccacgcctttcctccccgccggggctctccactctcgctccaacgccgacggagaagccgcagctctgctccctcgctctctcttccgggagcgcgtggctctattccattcgcgcccgctcggctgacaacggagctgtaggttaacctggtaaaccaattaccttgaagctgaactgtgccgttgaagccaaaatttattacgataaaattttgatcctttcatttgttggacattggatcaactggtgctgttatacatagaaaggagttcattgtaatttctcatctatatttagtggtgccataatcatttttccactggtgttcggcaataatgtcggagagcgagttagcagtaataaaaccagaggcgttaaagacttatatctggcttcagtgctttgatggttccattcagcaagtggaggaggaggttgcaatgttctgccccatgatatgtcgtgaaattgtgaaaaatggcacagggtcgtccaaaaatcatgctattgcgctccctgaaagagttaatccagccagtttgagtttgattcttgactactgccggtttcatcaggttactgggcgctcaaacaaggagcggaagtcctttgatgaaaaatttgttaggatagaaacagaaagactctgcgaattgacttctgcagctgacagtctacagctaaagccacttgttgatcttactagtcgagctcttgctcgaattattgaaggaaagacacctgaggaaatccgtgacattttccacttaccagatgacttaacagaggaagagaagttggagcccctaaaaaatgtaaatgatgatcctaggattcgcctattgaaccggttgtacgcgaagaagcggaaagagctccaggagcgccagaagctgaaggatgtacaagtacaaaaggaggaaaaagatgagagatctttggatgagttactttgttttattaatggggatggaggtataactacagttcaggaggtggggaaagtagtaccaagagtaagaaaaagaataaaagaaggaaggatcatgctaagaaccccgcaaaagctgactctgagtctgtaaatgtggagggagctgcttgtgtggttccgtgcaaagtggatagcagtaatgtttctagacttccatgccaaagtccagatatgcaagatgatgtcgagtacccctttgaagatgctgacctcgatgatggacttgatcctgcaatgaaagaagagcttgatagagaagttgaggactttgcgaggaggttgaattcagtttggagcgagtcacatattggtggtaatggttctgtgcagagatttcctgggtttaatcacaggtgagtgttaagctggcaagatctgaaggcagaagctgaggagatttgtgggcatacagcttggaagggattaaaggccaaacaggccaccttggctcctgtgtgttgtaaaaccttgataactcaggaaccaagcatgcagaaatgcgcaagttcccttggccattttcctgggaaggaggccacctagttgggatgacccttttttttctttgggaagggagggttagaggtctgtcttgactcaattttttgttccttaactgctgtgttgccagttttcctgaataggggaagagaggagtgttgcctgttagctctgttacagatgtccatggaattctgttgtaacactgtattgtggtgcacatagaaatgtgattccctgtattgccgatgtttggctggtttgttgaccgtaccttattattactgagcaaagaggcgtctggacagctgttgggactaaa

SEQ ID NO: 6162 - DNA, 1840 bp, Zea Mays
ctactccccacagcagctgaaaaccaaagaaaccgttggcggacgcccaccaaccaaaaaaaaaaaaaacccacgcctttcctccccgccggggctctccactctcgctccaacgccgacggagaagccgcagctctgctccctcgctctctcttccgggagcgcgtggctctattccattcgcgcccgctcggctgacaacggagctgtaggttaacctggtaaaccaattaccttgaagctgaactgtgccgttgaagccaaaatttattacgataaaattttgatcctttcatttgttggacattggatcaactggtgctgttatacatagaaaggagttcattgtaatttctcatctatatttagtggtgccataatcatttttccactggtgttcggcaataatgtcggagagcgagttagcagtaataaaaccagaggtacaatcccctgcagcccccctctccggcgttaaagacttatatctggcttcagtgctttgatggttccattcagcaagtggaggaggaggttgcaatgttctgccccatgatatgtcgtgaaattgtgaaaaatggcacagggtcgtccaaaaatcatgctattgcgctccctgaaagagttaatccagccagtttgagtttgattcttgactactgccggtttcatcaggttactgggcgctcaaacaaggagcggaagtcctttgatgaaaaatttgttaggatagaaacagaaagactctgcgaattgacttctgcagctgacagtctacagctaaagccacttgttgatcttactagtcgagctcttgctcgaattattgaaggaaagacacctgaggaaatccgtgacattttccacttaccagatgacttaacagaggaagagaagttggagcccctaaaaaatgtaaatgatgatcctaggattcgcctattgaaccggttgtacgcgaagaagcggaaagagctccaggagcgccagaagctgaaggatgtacaagtacaaaaggaggaaaaagatgagagatctttggatgagttactttgttttattaatggggatggaggatatgtatttcttacatgatctatctggggagtttaggagggagctgcttgtgtggttccgtgcaaagtggatagcagtaatgtttctagacttccatgccaaagtccagatatgcaagatgatgtcgagtacccctttgaagatgctgacctcgatgatggacttgatcctgcaatgaaagaagagcttgatagagaagttgaggactttgcgaggaggttgaattcagtttggagcgagtcacatattggtggtaatggttctgtgcagagatttcctgggtttaatcacaggtgagtgttaagctggcaagatctgaaggcagaagctgaggagatttgtgggcatacagcttggaagggattaaaggccaaacaggccaccttggctcctgtgtgttgtaaaaccttgataactcaggaaccaagcatgcagaaatgcgcaagttcccttggccattttcctgggaaggaggccacctagttgggatgacccttttttttctttgggaagggagggttagaggtctgtcttgactcaattttttgttccttaactgctgtgttgccagttttcctgaataggggaagagaggagtgttgcctgttagctctgttacagatgtccatggaattctgttgtaacactgtattgtggtgcacatagaaatgtgattccctgtattgccgatgtttggctggtttgttgaccgtaccttattattactgagcaaagaggcgtctggacagctgttgggactaaa

SEQ ID NO: 6163 - DNA, 1923 bp, Zea Mays
gagacgatagataaggactactccccacagcagctgaaaaccaaagaaaccgttggcggacgcccaccaaccaaaaaaaaaaaaaacccacgcctttcctccccgccggggctctccactctcgctccaacgccgacggagaagccgcagctctgctccctcgctctctcttccgggagcgcgtggctctattccattcgcgcccgctcggctgacaacggagctgtaggttaacctggtaaaccaattaccttgaagctgaactgtgccgttgaagccaaaatttattacgataaaattttgatcctttcatttgttggacattggatcaactggtgctgttatacatagaaaggagttcattgtaatttctcatctatatttagtggtgccataatcatttttccactggtgttcggcaataatgtcggagagcgagttagcagtaataaaaccagaggtacaatcccctgcagcccccctctccggcgttaaagacttatatctggcttcagtgctttgatggttccattcagcaagtggaggaggaggttgcaatgttctgccccatgatatgtcgtgaaattgtgaaaaatggcacagggtcgtccaaaaatcatgctattgcgctccctgaaagagttaatccagccagtttgagtttgattcttgactactgccggtttcatcaggttactgggcgctcaaacaaggagcggaagtcctttgatgaaaaatttgttaggatagaaacagaaagactctgcgaattgacttctgcagctgacagtctacagctaaagccacttgttgatcttactagtcgagctcttgctcgaattattgaaggaaagacacctgaggaaatccgtgacattttccacttaccagatgacttaacagaggaagagaagttggagcccctaaaaaatgtaaatgatgatcctaggattcgcctattgaaccggttgtacgcgaagaagcggaaagagctccaggagcgccagaagctgaaggatgtacaagtacaaaaggaggaaaaagatgagagatctttggatgagttactttgttttattaatggggatggaggttcaggaggtggggaaagtagtaccaagagtaagaaaaagaataaaagaaggaaggatcatgctaagaaccccgcaaaagctgactctgagtctgtaaatgtggagggagctgcttgtgtggttccgtgcaaagtggatagcagtaatgtttctagacttccatgccaaagtccagatatgcaagatgatgtcgagtacccctttgaagatgctgacctcgatgatggacttgatcctgcaatgaaagaagagcttgatagagaagttgaggactttgcgaggaggttgaattcagtttggagcgagtcacatattggtggtaatggttctgtgcagagatttcctgggtttaatcacaggtgagtgttaagctggcaagatctgaaggcagaagctgaggagatttgtgggcatacagcttggaagggattaaaggccaaacaggccaccttggctcctgtgtgttgtaaaaccttgataactcaggaaccaagcatgcagaaatgcgcaagttcccttggccattttcctgggaaggaggccacctagttgggatgacccttttttttctttgggaagggagggttagaggtctgtcttgactcaattttttgttccttaactgctgtgttgccagttttcctgaataggggaagagaggagtgttgcctgttagctctgttacagatgtccatggaattctgttgtaacactgtattgtggtgcacatagaaatgtgattccctgtattgccgatgtttggctggtttgttgaccgtaccttattattactgagcaaagaggcgtctggacagctgttgggactaaa

SEQ ID NO: 6164 - DNA, 714 bp, Zea Mays
caaaagatgagctcatcagcagatgagaattcctttgacatatgatgaggagaaaggagcttggtttcttgagaaagagttgcctgaaggacggtatgaatacaaatacgtagtggatggcaaatggctatgcaacgagcatgagctgataacgaaaccgaatgctgacggccacgtgaacaactatgttcaggtctccagagacggcacgagcgatgaagagaaggagcttagggagcggttgactggtccggaccctgatctcacggaccaggagaggctgatgatcagagagtacttggaacagtacgcggatgccgccgagcgctaggagaagaatgatgatgactgaggaagagaagagacacaccatgagacgacggaccgaagccgacctgaccgcaccttcctttacggagaggtcgggcttcccctctcttgtcaatcaaatactcgtagcttaaccgtgcaaaagggcacgttctgctcgcatacttggagaatgatgatgaaggagcaaactgtacgtattgttgaacagcagctgtgcagaaataacaaaggtagtagcgtaaaactactgtactgaccataatgttactactgtatgctccttcttggctatgaataataataataataataaaagagtaaataaacctcatcgatcccttgttatgcttttctgtgattggtacctgagagagagaggct

SEQ ID NO: 6165 - DNA, 911 bp, Zea Mays
aaaaaccatccgtgtatccttgctgctgcagtgccccttccgccgccgcacaagttcacagtcctgtccccgccctcaaggccacaagacccaagtggacgcctaccctaccgcagtgccgccccccgccctcatgatacagctccaaccttctaggcggacactcaagctccactgctggtgcctgcaagatccaacaaaatccgccgtcttccagagaattcctttgacatatgatgaggagaaaggagcttggtttcttgagaaagagttgcctgaaggacggtatgaatacaaatacgtagtggatggcaaatggctatgcaacgagcatgagctgataacgaaaccgaatgctgacggccacgtgaacaactatgttcaggtctccagagacggcacgagcgatgaagagaaggagcttagggagcggttgactggtccggaccctgatctcacggaccaggagaggctgatgatcagagagtacttggaacagtacgcggatgccgccgagcgctaggaggtccaaagaatgatgatgactgaggaagagaagagacacaccatgagacgacggaccgaagccgacctgaccgcaccttcctttacggagaggtcgggcttcccctctcttgtcaatcaaatactcgtagcttaaccgtgcaaaagggcacgttctgctcgcatacttggagaatgatgatgaaggagcaaactgtacgtattgttgaacagcagctgtgcagaaataacaaaggtagtagcgtaaaactactgtactgaccataatgttactactgtatgctccttcttggctatgaataataataataataataaaagagtaaataaacctcatcgatcccttgttatgcttttctgtgattggtacctgagagagagaggct

SEQ ID NO: 6166 - DNA, 907 bp, Zea Mays
caaaaaccatccgtgtatccttgctgctgcagtgccccttccgccgccgcacaagttcacagtcctgtccccgccctcaaggccacaagacccaagtggacgcctaccctaccgcagtgccgccccccgccctcatgatacagctccaaccttctaggcggacactcaagctccactgctggtgcctgcaagatccaacaaaatccgccgtcttccagagaattcctttgacatatgatgaggagaaaggagcttggtttcttgagaaagagttgcctgaaggacggtatgaatacaaatacgtagtggatggcaaatggctatgcaacgagcatgagctgataacgaaaccgaatgctgacggccacgtgaacaactatgttcaggtctccagagacggcacgagcgatgaagagaaggagcttagggagcggttgactggtccggaccctgatctcacggaccaggagaggctgatgatcagagagtacttggaacagtacgcggatgccgccgagcgctaggagaagaatgatgatgactgaggaagagaagagacacaccatgagacgacggaccgaagccgacctgaccgcaccttcctttacggagaggtcgggcttcccctctcttgtcaatcaaatactcgtagcttaaccgtgcaaaagggcacgttctgctcgcatacttggagaatgatgatgaaggagcaaactgtacgtattgttgaacagcagctgtgcagaaataacaaaggtagtagcgtaaaactactgtactgaccataatgttactactgtatgctccttcttggctatgaataataataataataataaaagagtaaataaacctcatcgatcccttgttatgcttttctgtgattggtacctgagagagagaggct

SEQ ID NO: 6167 - DNA, 1443 bp, Zea Mays
gtccctctccctagtccctcccctcgtccgtcgtccacctctgccactacgagctcgtccccgtcttgtttcgtctcctctcgtctcgtcacgcgagatatttctacgggacgggacccgcgttgcttccccgcctcgccgtcccgcgcgcgccagccgggcccggggaagccatgaactgcctccagaacctgctcaaggagcctccaatcgtggggtccaggtcgatgaggcggccctctccgctgaatctggcgatggtccgcggcggcagtcgccgatcaaacaccgtcaaaactttgcaggcccctggggcgtccacttccggtgccgagagcagcgccgtggagatgggcaccgagaagtccgaagtgtacagcactaacatgacgcaggctatgggagcagggattttgatgcttttgatttgcgattgaggcttcctgctgtggttagcaaattgcacaaacttatcaactgtaatggtggtgtaacatatatacattgtactgctggacttggaagagctcctgctgttgcattggcttatatgttctggattcttgggtacagtctcaatgaaggacatcggctgctacagagtaaaagggcttgctttccgaagttggaagccattaagttggcaactgctgacattctgacaggattatccaaaaacacaatcactttgaagtgggaagctgatggttcttcctctgttgaaatttctgggctcgacattggctggggtcagagaattcctttgacatatgatgaggagaaaggagcttggtttcttgagaaagagttgcctgaaggacggtatgaatacaaatacgtagtggatggcaaatggctatgcaacgagcatgagctgataacgaaaccgaatgctgacggccacgtgaacaactatgttcaggtctccagagacggcacgagcgatgaagagaaggagcttagggagcggttgactggtccggaccctgatctcacggaccaggagaggctgatgatcagagagtacttggaacagtacgcggatgccgccgagcgctaggagaagaatgatgatgactgaggaagagaagagacacaccatgagacgacggaccgaagccgacctgaccgcaccttcctttacggagaggtcgggcttcccctctcttgtcaatcaaatactcgtagcttaaccgtgcaaaagggcacgttctgctcgcatacttggagaatgatgatgaaggagcaaactgtacgtattgttgaacagcagctgtgcagaaataacaaaggtagtagcgtaaaactactgtactgaccataatgttactactgtatgctccttcttggctatgaataataataataataataaaagagtaaataaacctcatcgatcccttgttatgcttttctgtgattggtacctgagagagagaggct

SEQ ID NO: 6168 - DNA, 1520 bp, Zea Mays
gtccctctccctagtccctcccctcgtccgtcgtccacctctgccactacgagctcgtccccgtcttgtttcgtctcctctcgtctcgtcacgcgagatatttctacgggacgggacccgcgttgcttccccgcctcgccgtcccgcgcgcgccagccgggcccggggaagccatgaactgcctccagaacctgctcaaggagcctccaatcgtggggtccaggtcgatgaggcggccctctccgctgaatctgcgttgacatatagacatgaactcgggatgaactacaatttcatacgcccagacttgattgtaggatcctgcttacagagtccacttgatgttgataagcttcggaagattggtgtcaaaactgtattctgcttgcagcaagattcagatcttgaatattttggagtcgacatccgtgccattcaagattattctctacaattcaaagatattgtgcactgccgtgcggaaattagggattttgatgcttttgatttgcgattgaggcttcctgctgtggttagcaaattgcacaaacttatcaactgtaatggtggtgtaacatatatacattgtactgctggacttggaagagctcctgctgttgcattggcttatatgttctggattcttgggtacagtctcaatgaaggacatcggctgctacagagtaaaagggcttgctttccgaagttggaagccattaagttggcaactgctgacattctgacaggattatccaaaaacacaatcactttgaagtgggaagctgatggttcttcctctgttgaaatttctgggctcgacattggctggggtcagagaattcctttgacatatgatgaggagaaaggagcttggtttcttgagaaagagttgcctgacggtatgaatacaaatacgtagtggatggcaaatggctatgcaacgagcatgagctgataacgaaaccgaatgctgacggccacgtgaacaactatgttcaggtctccagagacggcacgagcgatgaagagaaggagcttagggagcggttgactggtccggaccctgatctcacggaccaggagaggctgatgatcagagagtacttggaacagtacgcggatgccgccgagcgctaggagaagaatgatgatgactgaggaagagaagagacacaccatgagacgacggaccgaagccgacctgaccgcaccttcctttacggagaggtcgggcttcccctctcttgtcaatcaaatactcgtagcttaaccgtgcaaaagggcacgttctgctcgcatacttggagaatgatgatgaaggagcaaactgtacgtattgttgaacagcagctgtgcagaaataacaaaggtagtagcgtaaaactactgtactgaccataatgttactactgtatgctccttcttggctatgaataataataataataataaaagagtaaataaacctcatcgatcccttgttatgcttttctgtgattggtacctgagagagagaggct

SEQ ID NO: 6169 - DNA, 1484 bp, Zea Mays
cccgtccccggtccccgtcgtccctctccctagtccctcccctcgtccgtcgtccacctctgccactacgagctcgtccccgtcttgtttcgtctcctctcgtctcgtcacgcgagatatttctacgggacgggacccgcgttgcttccccgcctcgccgtcccgcgcgcgccagccgggcccggggaagccatgaactgcctccagaacctgctcaacgttgacatatagacatgaactcgggatgaactacaatttcatacgcccagacttgattgtaggatcctgcttacagagtccacttgatgttgataagcttcggaagattggtgtcaaaactgtattctgcttgcagcaagattcagatcttgaatattttggagtcgacatccgtgccattcaagattattctctacaattcaaagatattgtgcactgccgtgcggaaattagggattttgatgcttttgatttgcgattgaggcttcctgctgtggttagcaaattgcacaaacttatcaactgtaatggtggtgtaacatatatacattgtactgctggacttggaagagctcctgctgttgcattggcttatatgttctggattcttgggtacagtctcaatgaaggacatcggctgctacagagtaaaagggcttgctttccgaagttggaagccattaagttggcaactgctgacattctgacaggattatccaaaaacacaatcactttgaagtgggaagctgatggttcttcctctgttgaaatttctgggctcgacattggctggggtcagagaattcctttgacatatgatgaggagaaaggagcttggtttcttgagaaagagttgcctgacggtatgaatacaaatacgtagtggatggcaaatggctatgcaacgagcatgagctgataacgaaaccgaatgctgacggccacgtgaacaactatgttcaggtctccagagacggcacgagcgatgaagagaaggagcttagggagcggttgactggtccggaccctgatctcacggaccaggagaggctgatgatcagagagtacttggaacagtacgcggatgccgccgagcgctaggagaagaatgatgatgactgaggaagagaagagacacaccatgagacgacggaccgaagccgacctgaccgcaccttcctttacggagaggtcgggcttcccctctcttgtcaatcaaatactcgtagcttaaccgtgcaaaagggcacgttctgctcgcatacttggagaatgatgatgaaggagcaaactgtacgtattgttgaacagcagctgtgcagaaataacaaaggtagtagcgtaaaactactgtactgaccataatgttactactgtatgctccttcttggctatgaataataataataataataaaagagtaaataaacctcatcgatcccttgttatgcttttctgtgattggtacctgagagagagaggct

SEQ ID NO: 6170 - DNA, 1693 bp, Zea Mays
cgcccgtccccggtccccgtcgtccctctccctagtccctcccctcgtccgtcgtccacctctgccactacgagctcgtccccgtcttgtttcgtctcctctcgtctcgtcacgcgagatatttctacgggacgggacccgcgttgcttccccgcctcgccgtcccgcgcgcgccagccgggcccggggaagccatgaactgcctccagaacctgctcaaggagcctccaatcgtggggtccaggtcgatgaggcggccctctccgctgaatctggcgatggtccgcggcggcagtcgccgatcaaacaccgtcaaaactgcccctggggcgtccacttccggtgccgagagcagcgccgtggagatgggcaccgagaagtccgaagtgtacagcactaacatgacgcaggctatgggagcagcgttgacatatagacatgaactcgggatgaactacaatttcatacgcccagacttgattgtaggatcctgcttacagagtccacttgatgttgataagcttcggaagattggtgtcaaaactgtattctgcttgcagcaagattcagatcttgaatattttggagtcgacatccgtgccattcaagattattctctacaattcaaagatattgtgcactgccgtgcggaaattagggattttgatgcttttgatttgcgattgaggcttcctgctgtggttagcaaattgcacaaacttatcaactgtaatggtggtgtaacatatatacattgtactgctggacttggaagagctcctgctgttgcattggcttatatgttctggattcttgggtacagtctcaatgaaggacatcggctgctacagagtaaaagggcttgctttccgaagttggaagccattaagttggcaactgctgacattctgacaggattatccaaaaacacaatcactttgaagtgggaagctgatggttcttcctctgttgaaatttctgggctcgacattggctggggtcagagaattcctttgacatatgatgaggagaaaggagcttggtttcttgagaaagagttgcctgaaggacggtatgaatacaaatacgtagtggatggcaaatggctatgcaacgagcatgagctgataacgaaaccgaatgctgacggccacgtgaacaactatgttcaggtctccagagacggcacgagcgatgaagagaaggagcttagggagcggttgactggtccggaccctgatctcacggaccaggagaggctgatgatcagagagtacttggaacagtacgcggatgccgccgagcgctaggagaagaatgatgatgactgaggaagagaagagacacaccatgagacgacggaccgaagccgacctgaccgcaccttcctttacggagaggtcgggcttcccctctcttgtcaatcaaatactcgtagcttaaccgtgcaaaagggcacgttctgctcgcatacttggagaatgatgatgaaggagcaaactgtacgtattgttgaacagcagctgtgcagaaataacaaaggtagtagcgtaaaactactgtactgaccataatgttactactgtatgctccttcttggctatgaataataataataataataaaagagtaaataaacctcatcgatcccttgttatgcttttctgtgattggtacctgagagagagaggct

SEQ ID NO: 6171 - DNA, 1490 bp, Zea Mays
cgcccgtccccggtccccgtcgtccctctccctagtccctcccctcgtccgtcgtccacctctgccactacgagctcgtccccgtcttgtttcgtctcctctcgtctcgtcacgcgagatatttctacgggacgggacccgcgttgcttccccgcctcgccgtcccgcgcgcgccagccgggcccggggaagccatgaactgcctccagaacctgctcaacgttgacatatagacatgaactcgggatgaactacaatttcatacgcccagacttgattgtaggatcctgcttacagagtccacttgatgttgataagcttcggaagattggtgtcaaaactgtattctgcttgcagcaagattcagatcttgaatattttggagtcgacatccgtgccattcaagattattctctacaattcaaagatattgtgcactgccgtgcggaaattagggattttgatgcttttgatttgcgattgaggcttcctgctgtggttagcaaattgcacaaacttatcaactgtaatggtggtgtaacatatatacattgtactgctggacttggaagagctcctgctgttgcattggcttatatgttctggattcttgggtacagtctcaatgaaggacatcggctgctacagagtaaaagggcttgctttccgaagttggaagccattaagttggcaactgctgacattctgacaggattatccaaaaacacaatcactttgaagtgggaagctgatggttcttcctctgttgaaatttctgggctcgacattggctggggtcagagaattcctttgacatatgatgaggagaaaggagcttggtttcttgagaaagagttgcctgaaggacggtatgaatacaaatacgtagtggatggcaaatggctatgcaacgagcatgagctgataacgaaaccgaatgctgacggccacgtgaacaactatgttcaggtctccagagacggcacgagcgatgaagagaaggagcttagggagcggttgactggtccggaccctgatctcacggaccaggagaggctgatgatcagagagtacttggaacagtacgcggatgccgccgagcgctaggagaagaatgatgatgactgaggaagagaagagacacaccatgagacgacggaccgaagccgacctgaccgcaccttcctttacggagaggtcgggcttcccctctcttgtcaatcaaatactcgtagcttaaccgtgcaaaagggcacgttctgctcgcatacttggagaatgatgatgaaggagcaaactgtacgtattgttgaacagcagctgtgcagaaataacaaaggtagtagcgtaaaactactgtactgaccataatgttactactgtatgctccttcttggctatgaataataataataataataaaagagtaaataaacctcatcgatcccttgttatgcttttctgtgattggtacctgagagagagaggct

SEQ ID NO: 6172 - DNA, 1713 bp, Zea Mays
ctctcttgcccgcccgtccccggtccccgtcgtccctctccctagtccctcccctcgtccgtcgtccacctctgccactacgagctcgtccccgtcttgtttcgtctcctctcgtctcgtcacgcgagatatttctacgggacgggacccgcgttgcttccccgcctcgccgtcccgcgcgcgccagccgggcccggggaagccatgaactgcctccagaacctgctcaaggagcctccaatcgtggggtccaggtcgatgaggcggccctctccgctgaatctggcgatggtccgcggcggcagtcgccgatcaaacaccgtcaaaactttgcaggcccctggggcgtccacttccggtgccgagagcagcgccgtggagatgggcaccgagaagtccgaagtgtacagcactaacatgacgcaggctatgggagcagcgttgacatatagacatgaactcgggatgaactacaatttcatacgcccagacttgattgtaggatcctgcttacagagtccacttgatgttgataagcttcggaagattggtgtcaaaactgtattctgcttgcagcaagattcagatcttgaatattttggagtcgacatccgtgccattcaagattattctctacaattcaaagatattgtgcactgccgtgcggaaattagggattttgatgcttttgatttgcgattgaggcttcctgctgtggttagcaaattgcacaaacttatcaactgtaatggtggtgtaacatatatacattgtactgctggacttggaagagctcctgctgttgcagtagttggcttatatgttctggattcttgggtacagtctcaatgaaggacatcggctgctacagagtaaaagggcttgctttccgaagttggaagccattaagttggcaactgctgacattctgacaggattatccaaaaacacaatcactttgaagtgggaagctgatggttcttcctctgttgaaatttctgggctcgacattggctggggtcagagaattcctttgacatatgatgaggagaaaggagcttggtttcttgagaaagagttgcctgaaggacggtatgaatacaaatacgtagtggatggcaaatggctatgcaacgagcatgagctgataacgaaaccgaatgctgacggccacgtgaacaactatgttcaggtctccagagacggcacgagcgatgaagagaaggagcttagggagcggttgactggtccggaccctgatctcacggaccaggagaggctgatgatcagagagtacttggaacagtacgcggatgccgccgagcgctaggagaagaatgatgatgactgaggaagagaagagacacaccatgagacgacggaccgaagccgacctgaccgcaccttcctttacggagaggtcgggcttcccctctcttgtcaatcaaatactcgtagcttaaccgtgcaaaagggcacgttctgctcgcatacttggagaatgatgatgaaggagcaaactgtacgtattgttgaacagcagctgtgcagaaataacaaaggtagtagcgtaaaactactgtactgaccataatgttactactgtatgctccttcttggctatgaataataataataataataaaagagtaaataaacctcatcgatcccttgttatgcttttctgtgattggtacctgagagagagaggct

SEQ ID NO: 6173 - DNA, 1522 bp, Zea Mays
ataacaatgtgtttttagtcacttgtctggttgggcatgttttgctgctgcaggcctgcagctcaggtgtttctgaattttgttacatagcgagggcgtccacaaagcctcactgtgcccccgctcgtgcgcgtcttcctccctgcatcccgcccgcgcgcgtcttccttccttgcatctcgcccgcgagcacgcccccaccaaccccgctcccgcccgcgcgcgtcttccttccttgcatcccgcccgcgactcgacgacagatggcgggatccgcggacgcgcccccaccaaccccgccatcaacctcgccgccgggtaccccgccccacaccaaaccgcgccccctgccctcgccctcggccttgatggcagagatggcgggatccgcggacgcgctgccaccaaccccatcaccaagctcgccgccgggtatcccgccccacaccaaaccgcgccccctgccctcgtcctcgccctcgacggcaccttcatggaaggccagatacgcggacgcgccccattccttacctggcagcgacgacaatcacgatgccccttccttgcctcaatcgaccgctattaaaaggatggacagagtgcggtcctttggaaccgaagggcggaagaaagacggagtgcagattcctgctagcgacaaagtttacgagtatatcctcttctggggaactgatatcaagttaagtcatcaccaccacagccgtcaccaccacaagcagcttccctgcacaatgatcctgccataatccagtcacattattctcaacctgcatcaacgtcatcaagtttgccttcaactgggggtgcagttttaccagacttcagctcccaggcagttcaatatgggcttcagaggccaaacttccagagtaaccttcctctctaccaaccagggaatactccgtggggctctttagtggcacctccagcaggaaatgctccatggggctcttcagtggcgcctccagcaggaaatgcttcaacacttttggttccctcaatgtactggcaagggtactatgcaccttcaagtgggctaccgcatcatttgcagccacctcctttgcttcatccaacaccaggattgtcggttccccagaatctccaatatccaggactaaatccttctttgcaatctgggccgcaaaagctgtcagaactccaaccctcattgatgcaacactgactacaactttagttttccgagacattgatatcattgatgcatatgtctccatgtgtgttctgttctctctctttttttagcaaggattcttctctctgagaaaaaatcctggtgcatgctatcatgatgttcgatttgagcttcatttacgtccttttcttaccaaatttatactatctagctagagcttgttgttatttttacgtgacatgtttagatgactattgccaattgcggtggtaaagcaaacatgcatatgtggcctacttgtatctatcttttgatgaaagttgttatggttatttttaatttttg

SEQ ID NO: 6174 - DNA, 1517 bp, Zea Mays
ataacaatgtgtttttagtcacttgtctggttgggcatgttttgctgctgcaggcctgcagctcaggtgtttctgaattttgttacatagcgagggcgtccacaaagcctcactgtgcccccgctcgtgcgcgtcttcctccctgcatcccgcccgcgcgcgtcttccttccttgcatctcgcccgcgagcacgcccccaccaaccccgctcccgcccgcgcgcgtcttccttccttgcatcccgcccgcgactcgacgacagatggcgggatccgcggacgcgcccccaccaaccccgccatcaacctcgccgccgggtaccccgccccacaccaaaccgcgccccctgccctcgccctcggccttgatggcagagatggcgggatccgcggacgcgctgccaccaaccccatcaccaagctcgccgccgggtatcccgccccacaccaaaccgcgccccctgccctcgtcctcgccctcgacggcaccttcatggaaggccagatacgcggacgcgccccattccttacctggcagcgacgacaatcacgatgccccttccttgcctcaatcgaccgctattaaaaggatggacagagtgcggtcctttggaaccgaagggcggaagaaagacggagtgcagattcctgctagcgacaaagtttacgagtatatcctcttctggggaactgatatcaagtcatcaccaccacagccgtcaccaccacaagcagcttccctgcacaatgatcctgccataatccagtcacattattctcaacctgcatcaacgtcatcaagtttgccttcaactgggggtgcagttttaccagacttcagctcccaggcagttcaatatgggcttcagaggccaaacttccagagtaaccttcctctctaccaaccagggaatactccgtggggctctttagtggcacctccagcaggaaatgctccatggggctcttcagtggcgcctccagcaggaaatgcttcaacacttttggttccctcaatgtactggcaagggtactatgcaccttcaagtgggctaccgcatcatttgcagccacctcctttgcttcatccaacaccaggattgtcggttccccagaatctccaatatccaggactaaatccttctttgcaatctgggccgcaaaagctgtcagaactccaaccctcattgatgcaacactgactacaactttagttttccgagacattgatatcattgatgcatatgtctccatgtgtgttctgttctctctctttttttagcaaggattcttctctctgagaaaaaatcctggtgcatgctatcatgatgttcgatttgagcttcatttacgtccttttcttaccaaatttatactatctagctagagcttgttgttatttttacgtgacatgtttagatgactattgccaattgcggtggtaaagcaaacatgcatatgtggcctacttgtatctatcttttgatgaaagttgttatggttatttttaatttttg

SEQ ID NO: 6175 - DNA, 1852 bp, Zea Mays
atgaccttcatgagctgttccgcggccatctccgacggcattccgctgcgcttccccatagagggaagcaggaccctctgcggcggccttggaggtgtctgcgcgcgaggggtgctcgctctcggttcccacaggagtaacaggagtaggagggcgaggcacaggcacgcgacggtcttcgcgaggaggaggaggaggcggcggcccagcaagtggcagcggccgtggtggaagaccttcttctcggactggaacgaagacgacgagagtctggacgggtggagggaggaggacgagctgcttcaggagattggcagcgacaaggggctgtcggaggatgaaaagttcaagacgtggacgagaaaggccgaagcgattgttgatctgcgcgaggcccagcaggatgcggtgaacgccgaggagcggtcgtgggaaaattggatcggtggtggcggcggcacgtcggggactggaggcggtggggaggccagcttgttggaccagatcactgatgaccctgcagagattgtgagggataagagcgtttttgaggttttcagaggttccatcgatgaggattatgaggacatgttgttcgaagatcgagtgttcatgtacgcctcaacaaactcggctaaatttctagcattgctgattgtggttccgtgggtcatagattttatagtccatgactatgttatgatgccctttctagagaggtatgtccagaaagtgccacttgcagcggagttacttgatgtaaggcgcacccagaagctgcagatggttaaagccctaaagattgaaaaggcaagataccgtcttgaagtagagattggcaaatctcctccactttctgatgaggaggtctggatagagttgagggatgattggaggctagagaatcgaaatgctttcgcaaatatatggtctgatacggtttatgggattgttctatttcttcttatgtgcttcaatcagagcaaagtcgcaatgctgaagttcacaggatataagttgctaaataacatttcagacagtgggaaggcctttcttattattttagtatctgacatccttctagggtaccattcagagtcaggttggcatacattggtagaagttattctcgagcattacggttttgaagctgatgaagcggcggtcacattttttgtttgtctggttccagttgctttggatgtgtacataaaattttgggtatacaaataccttccaaggttatcacccagtgtgggcaacgttctggatgaaataaagcgtcattagagattttttgccttagaaattcactatgatctgcagcaattcactcctcgtttgtccctttcagtcttgggatgtccagagctgttagaactgaaacctgtcaacatcttgaaggcttcagaaaatagaggcaaacagagttgcagggtcctgaaaccgagacgtcctatcaatttatgttgataggcctagggtggtattatatagtgatgggtatttttcaccgactccaccggtggagtttactagcagcaacttgaggcaaaaatatctcttgtttacatggttttatctcttgtaaaataagaagttggatgattttgcgcgaaatgagacggaacgtgctgacggtcgtctgttctgatgaccaaccaagcaaatggcaggacagggacaactcccagcaatgtttcccttccctatcactgattatggtgtttgttctactatgtagtgacaagttttttttttgtttgttatttcttttagttgccttcttgtatgattgagactttgcttttgggatctgaactgacgattagctgattgtattgaatttgct

SEQ ID NO: 6176 - DNA, 1988 bp, Zea Mays
gcggcgagtatgttgcggtggtatctagcatccacgccagcggaatgccgatgacatgctccgcgtgcatctgcgcccctgttccaacttccaagtaccgctgggcctggctagctagcttgggcatatggtccgcgtttcatgaccttcatgagctgttccgcggccatctccgacggcattccgctgcgcttccccatagagggaagcaggaccctctgcggcggccttggaggtgtctgcgcgcgaggggtgctcgctctcggttcccacaggagtaacaggagtaggagggcgaggcacaggcacgcgacggtcttcgcgaggaggaggaggaggcggcggcccagcaagtggcagcggccgtggtggaagaccttcttctcggactggaacgaagacgacgagagtctggacgggtggagggaggaggacgagctgcttcaggagattggcagcgacaaggggctgtcggaggatgaaaagttcaagacgtggacgagaaaggccgaagcgattgttgatctgcgcgaggcccagcaggatgcggtgaacgccgaggagcggtcgtgggaaaattggatcggtggtggcggcggcacgtcggggactggaggcggtggggaggccagcttgttggaccagatcactgatgaccctgcagagattgtgagggataagagcgtttttgaggttttcagaggttccatcgatgaggattatgaggacatgttgttcgaagatcgagtgttcatgtacgcctcaacaaactcggctaaatttctagcattgctgattgtggttccgtgggtcatagattttatagtccatgactatgttatgatgccctttctagagaggtatgtccagaaagtgccacttgcagcggagttacttgatgtaaggcgcacccagaagctgcagatggttaaagccctaaagattgaaaaggcaagataccgtcttgaagtagagattggcaaatctcctccactttctgatgaggaggatagagttgagggatgattggaggctagagaatcgaaatgctttcgcaaatatatggtctgatacggtttatgggattgttctatttcttcttatgtgcttcaatcagagcaaagtcgcaatgctgaagttcacaggatataagttgctaaataacatttcagacagtgggaaggcctttcttattattttagtatctgacatccttctagggtaccattcagagtcaggttggcatacattggtagaagttattctcgagcattacggttttgaagctgatgaagcggcggtcacattttttgtttgtctggttccagttgctttggatgtgtacataaaattttgggtatacaaataccttccaaggttatcacccagtgtgggcaacgttctggatgaaataaagcgtcattagagattttttgccttagaaattcactatgatctgcagcaattcactcctcgtttgtccctttcagtcttgggatgtccagagctgttagaactgaaacctgtcaacatcttgaaggcttcagaaaatagaggcaaacagagttgcagggtcctgaaaccgagacgtcctatcaatttatgttgataggcctagggtggtattatatagtgatgggtatttttcaccgactccaccggtggagtttactagcagcaacttgaggcaaaaatatctcttgtttacatggttttatctcttgtaaaataagaagttggatgattttgcgcgaaatgagacggaacgtgctgacggtcgtctgttctgatgaccaaccaagcaaatggcaggacagggacaactcccagcaatgtttcccttccctatcactgattatggtgtttgttctactatgtagtgacaagttttttttttgtttgttatttcttttagttgccttcttgtatgattgagactttgcttttgggatctgaactgacgattagctgattgtattgaatttgct

SEQ ID NO: 6177 - DNA, 2085 bp, Zea Mays
cttcttctctcccctctagcacgctagaattctcctcttcctctttctctctcaagcacataatatgcttccggtgcacagatagctacggcggcgagtatgttgcggtggtatctagcatccacgccagcggaatgccgatgacatgctccgcgtgcatctgcgcccctgttccaacttccaagtaccgctgggcctggctagctagcttgggcatatggtccgcgtttcatgaccttcatgagctgttccgcggccatctccgacggcattccgctgcgcttccccatagagggaagcaggaccctctgcggcggccttggaggtgtctgcgcgcgaggggtgctcgctctcggttcccacaggagtaacaggagtaggagggcgaggcacaggcacgcgacggtcttcgcgaggaggaggaggaggcggcggcccagcaagtggcagcggccgtggtggaagaccttcttctcggactggaacgaagacgacgagagtctggacgggtggagggaggaggacgagctgcttcaggagattggcagcgacaaggggctgtcggaggatgaaaagttcaagacgtggacgagaaaggccgaagcgattgttgatctgcgcgaggcccagcaggatgcggtgaacgccgaggagcggtcgtgggaaaattggatcggtggtggcggcggcacgtcggggactggaggcggtggggaggccagcttgttggaccagatcactgatgaccctgcagagattgtgagggataagagcgtttttgaggttttcagaggttccatcgatgaggattatgaggacatgttgttcgaagatcgagtgttcatgctaaatttctagcattgctgattgtggttccgtgggtcatagattttatagtccatgactatgttatgatgccctttctagagaggtatgtccagaaagtgccacttgcagcggagttacttgatgtaaggcgcacccagaagctgcagatggttaaagccctaaagattgaaaaggcaagataccgtcttgaagtagagattggcaaatctcctccactttctgatgaggaggtctggtatgagctgcgggaaaaagcgatagagttgagggatgattggaggctagagaatcgaaatgctttcgcaaatatatggtctgatacggtttatgggattgttctatttcttcttatgtgcttcaatcagagcaaagtcgcaatgctgaagttcacaggatataagttgctaaataacatttcagacagtgggaaggcctttcttattattttagtatctgacatccttctagggtaccattcagagtcaggttggcatacattggtagaagttattctcgagcattacggttttgaagctgatgaagcggcggtcacattttttgtttgtctggttccagttgctttggatgtgtacataaaattttgggtatacaaataccttccaaggttatcacccagtgtgggcaacgttctggatgaaataaagcgtcattagagattttttgccttagaaattcactatgatctgcagcaattcactcctcgtttgtccctttcagtcttgggatgtccagagctgttagaactgaaacctgtcaacatcttgaaggcttcagaaaatagaggcaaacagagttgcagggtcctgaaaccgagacgtcctatcaatttatgttgataggcctagggtggtattatatagtgatgggtatttttcaccgactccaccggtggagtttactagcagcaacttgaggcaaaaatatctcttgtttacatggttttatctcttgtaaaataagaagttggatgattttgcgcgaaatgagacggaacgtgctgacggtcgtctgttctgatgaccaaccaagcaaatggcaggacagggacaactcccagcaatgtttcccttccctatcactgattatggtgtttgttctactatgtagtgacaagttttttttttgtttgttatttcttttagttgccttcttgtatgattgagactttgcttttgggatctgaactgacgattagctgattgtattgaatttgct

SEQ ID NO: 6178 - DNA, 2188 bp, Zea Mays
tgtgccgcgtccgtggatatgacgccgacctctcttctcttctcccctctcctctctagccgtagtagctagcaagccgaaggctggagctgcctgcctgaattctctcgtttctctgcttcttcctcctctcccgcccagaaccagaaccaggaagcatcgcgagccaccggcgagccctcgtcgccgccaggacgtgcaccgacgaccgggtctctgccggccgctggcctttctacaggtcttcgccgtccgctggggctaagcaagctagcttgcgagggagcatatatggtcctccgcgtttcatgaccttcatgaggtgttccgcggccgtctccgacggcattgcgctgcgcttccccgccgagggcagggccctccgcggaggcgtctgcgcgcgcgggcgcgggctgctcgctctgggttcccacaggagcagcagtaggagggcgaggcgcaggcacgtggcggtcttcgcgaggcggcggctcggcaagtggcagcggccgtggtggaggaccttcttcgcggactggaacgacgacgaggagagcctggccgggttcagggaggacgacgagctgctggaggagattggggccgaccaggagctgtcggagaaggccaagttcgaggagtggaggcggaaggccgaggccattgttgagctgcgcgaggcccagcaggacgcgttcaacgccgaggagcggtcgtgggaggactggaccggcggtggcggcggtggtggcgcgccggagaatggtggaggtggggactggggcggggaggccagcttgtcggagcagataaccgatgatcctgcggagatcgtctgggataagggcgtcgttgaggttttcagaggtactatcgatgaggattacgaggatatgctgttcgaagatcgagtttttatgtatgcctccacgaactcggccaaattcctagcattgctgatcgtggttccgtgggtgatagattttctagtgcacgactatgccatgatgccctttttagagaggtatgtccagaaggtgccgcttgcagctgagttacttgatgtgaggcgcagccagaagctgcagatggttaaggacctgaacatcgagaaggcaagataccgtcttgaagtagagatcggcaaatctcccccgctctctgatgaggaggcttgagttgagggacgattggaggctagaaaaccgacaagcttttgcaaatgtatggtccgatatggtttatggggttgttctattcctgcttatctgcttcaaccagagcaaagttgcgatgctcaagttcacaggatataagttgctaaataacatctcagacactggaaaggccttccttattattctagtatcagacatccttctagggtaccattcagagtcaggttggcatacaatggtagaagttattctcgagcattacgggcttgaatccgatgaagcggcggtcacattttttgtttgtctggttccagttgctttggatgtgtacataaagttttgggtatacaaataccttccaagattatcacccagtgtgggcaacgttctggatgaaataaagcgccactaaggaatcatttggataaattattgccttggaggtattcgatgggtatatttgcttggcatattaagttttcatcaaatctgaagggcgtccttcgtctggaaaggccttgcctagaatgcctgcctggccacgccatcaatcagagtgtccggctgttcgggaggactgggaattggagaagtaatctgagctagtccttatgtatattctaaaacaatatcttgtggatagataaccatagaggaaacttgaggcttttggtctgagatttatcattggcggcaaagcatttttgccttagaaattcttttgcatgatggaggccacaggttggttggaatctgtaaggttattgtttcaggatgatgtccagagctgcaaccttcgttggtgctcctattttagaaccgaaacgtatcgacatcttgatgtccagagtttgcagggttcagaaaccgaaatatgatatgcaagttttaaacttcgttactaagtcgtaaagttcaattgtaaactgtttcggttcgaacctttatctttcgataaagcaagtttctttttgattaatttaaccaaggtaggcttcgtgttgcaggag

SEQ ID NO: 6179 - DNA, 1591 bp, Zea Mays
gccgtagtagctagcaagccgaaggctggagctgcctgcctgaattctctcgtttctctgcttcttcctcctctcccgcccagaaccagaaccaggaagcatcgcgagccaccggcgagccctcgtcgccgccaggacgtgcaccgacgaccgggtctctgccggccgctggcctttctacaggtcttcgccgtccgctggggctaagcaagctagcttgcgagggagcatatatggtcctccgcgtttcatgaccttcatgaggtgttccgcggccgtctccgacggcattgcgctgcgcttccccgccgagggcagggccctccgcggaggcgtctgcgcgcgcgggcgcgggctgctcgctctgggttcccacaggagcagcagtaggagggcgaggcgcaggcacgtggcggtcttcgcgaggcggcggctcggcaagtggcagcggccgtggtggaggaccttcttcgcggactggaacgacgacgaggagagcctggccgggttcagggaggacgacgagctgctggaggagattggggccgaccaggagctgtcggagaaggccaagttcgaggagtggaggcggaaggccgaggccattgttgagctgcgcgaggcccagcaggacgcgttcaacgccgaggagcggtcgtgggaggactggaccggcggtggcggcggtggtggcgcgccggagaatggtggaggtggggactggggcggggaggccagcttgtcggagcagataaccgatgatcctgcggagatcgtctgggataagggcgtcgttgaggttttcagaggtactatcgatgaggattacgaggatatgctgttcgaagatcgagtttttatgtatgcctccacgaactcggccaaattcctagcattgctgatcgtggttccgtgggtgatagattttctagtgcacgactatgccatgatgccctttttagagaggtgccgcttgcagctgagttacttgatgtgaggcgcagccagaagctgcagatggttaaggacctgaacatcgagaaggcaagataccgtcttgaagtagagatcggcaaatctcccccgctctctgatgaggaggtctggtttgagctgcgggaaaaagcgcttgagttgagggacgattggaggctagaaaaccgacaagcttttgcaaatgtatggtccgatatggtttatggggttgttctattcctgcttatctgcttcaaccagagcaaagttgcgatgctcaagttcacaggatataagttgctaaataacatctcagacactggaaaggccttccttattattctagtatcagacatccttctagggtaccattcagagtcaggttggcatacaatggtagaagttattctcgagcattacgggcttgaatccgatgaagcggcggtcacattttttgtttgtctggttccagttgctttggatgtgtacataaagttttgggtatacaaataccttccaagattatcacccagtgtgggcaacgttctggatgaaataaagcgccactaaggaatcatttggataaattattgccttggaggctgggaaactggtt

SEQ ID NO: 6180 - DNA, 1035 bp, Zea Mays
gccagttctgaagtgtttggagttcgtcgattgttcgctggcatgcacgcctcgaaatttcggctcgggagtttgttgatcgcttgctgggttggtcggtactagggagcaacgaggacgacacgacgagccagggtaacgcaggaggtggcgcggcggcgtccgccgcggagacggagggggacgagatggccgtggtggcggcagaggcggaggcggaggcggacgagcaggtggggtcggcggagacggaggagcacatccagcgcatcctcctcgccatcgacaactacacccgccaggtgtctgacatgctggatgccgggcgcgcgctgttcaaggacctcgccgccgacttcgaggaccgcctctgctcgatccacaaggagagggtggagcggtgggaggaggagatccgggagctgcgcgcccgcgacgtcgccaacgagcaggcccgcgccctcctccacaacgcccagctgcacctcctccacaccgtccgcgactaaccgatcgcccaatccatccagacctcagtagcaacaacttacctgcacatcactgttgcctgtctagaatgatagtgctgtactatgcatgtgtgcacatctgaatgctgttcaaatgtttcttgtttcggcagcaactgcatgcatcaaaacttgttctacgtgaattctagatgtctgttcaaagtgctaaaatatgcaagaccacacaccattttacttaggctaggggcacagcatcttgaggaagtgatttctgttcaggcgccacctcctgcttccaggctctagacgcacggtaccccttcatgttcctctccatcaccctcctggctgaacacgaacgcctatccgttgccggacgctcgggtcccgggttagtcgaggagcaccacgtggttcgcgttcgcaaagttttgtatactgtgatttgtatgtatgcccttgggcaaagatatgccagacccactttgatcagcaataaaaacaactcccctccaagatagggcccctttctttgagggaa

SEQ ID NO: 6181 - DNA, 1064 bp, Zea Mays
cctctgttccaccacgctgctggctgctgaggatggaggcggggagggagagctccaaggccaagcgcgcgcgcgccgccatggtaggctagctactaccgccacttccaccgcgaatctctccctccctcctccgagcaacgaggacgacacgacgagccagggtaacgcaggaggtggcgcggcggcgtccgccgcggagacggagggggacgagatggccgtggtggcggcagaggcggaggcggaggcggacgagcaggtggggtcggcggagacggaggagcacatccagcgcatcctcctcgccatcgacaactacacccgccaggtgtctgacatgctggatgccgggcgcgcgctgttcaaggacctcgccgccgacttcgaggaccgcctctgctcgatccacaaggagagggtggagcggtgggaggaggagatccgggagctgcgcgcccgcgacgtcgccaacgagcaggcccgcgccctcctccacaacgcccagctgcacctcctccacaccgtccgcgactaaccgatcgcccaatccatccagacctcagtagcaacaacttacctgcacatcactgttgcctgtctagaatgatagtgctgtactatgcatgtgtgcacatctgaatgctgttcaaatgtttcttgtttcggcagcaactgcatgcatcaaaacttgttctacgtgaattctagatgtctgttcaaagtgctaaaatatgcaagaccacacaccattttacttaggctaggggcacagcatcttgaggaagtgatttctgttcaggcgccacctcctgcttccaggctctagacgcacggtaccccttcatgttcctctccatcaccctcctggctgaacacgaacgcctatccgttgccggacgctcgggtcccgggttagtcgaggagcaccacgtggttcgcgttcgcaaagttttgtatactgtgatttgtatgtatgcccttgggcaaagatatgccagacccactttgatcagcaataaaaacaactcccctccaagatagggcccctttctttgagggaa

SEQ ID NO: 6182 - DNA, 912 bp, Zea Mays
ccctcttctccgcgtaccctgttgtagctgcctccctcgcgagatgaatgtggagaagctcaagaagatggcgggtgctgtgcgcactggaggaaagggcagcatgcgcaggaagaagaaggcagtccacaagaccgcaaccaccgatgacaagcggcttcagagcacgttgaaaagaattggagtgaacactattcctggtattgaggaggtcaacatcttcaaggatgatattgttatccaattccagaaccctaaagtgcaagcatccattcctgcaaatacatgggtagtcagtggagtaccccagacaaaaagtctacaagaccttctgccaacaattatcaaccaactgggccctgataacctggagaacctcaagaggcttgctgagcatttccagaagcaggtacctggtgccgaagccagcgccagtgcagctgcacaggatgatgacgatgtccctgagcttgtcccaggagagacatttgaggaggctgcggaggtgaaggaggtgcctgaagcggaaccggaagagaagaaagagtcgtaattttgttgcgtgtcatatccattgtttgtgaagggtcgttatgtgttaccatacaccatgggagagacctggtcatctatgaaccccctgatgttcctcattcgtttacatgtcctccagtttttcagtttcttatttacctgggttttggtccaaacctgacaactcagcatttggtttggcgtcaattgtgcttcaggttccaaaaaaaacattactgcagtatgattatgttgagggtgtaggccagaccggcacatattttcatcgagccagagtttcagccaatgtttgttttctcggttggcgtccacagcagttccatatacagaccaaattttgcaaaagcaaaaaagata

SEQ ID NO: 6183 - DNA, 2603 bp, Zea Mays
cgaccccagaccccctctcgcttcgcccctcctcatcctctctcctctctcccccgccccgttcgtctccggcgagctagggtttgcccccccgccttgccaccccacggttcccgccatccttggatctccagccatgtacggcggagacgaggtttcggcaatcgtcatagatgtgggctcttacagctgcaaggcgggctacgcaggcgacgacacccccaaggccgtcttcccatcggttgttggttcaattgaacaaactgaagacacagatgaccccaagccagagaaggaagctgactctgcatcagattctaagaacggtgccaagcccatggatgtggacaaagccaagacaaaacgcagactttatgtaggccaagagttagagttcaggagggatcacatggaggtgatttcatctatgaaagatggaacggtaactgactgggatattgttgataatatatggaatcatgctttcagacggaggttgttgatcaatcctgaagagcatcctatgctcattgctgaaccatctacaaacactgcacagcaaagagagaaagcagcggaacttatgtttgagaactacaaagtgccagcgctgtttctagccaaaaatgcagtgctcacatcttttgcgtctggacgagctacatctttggtggttgacaggtgatcattttcttcgcttcattccactaagaagatacttttttctcttatgaaacaatagtccgctttgcccatgttagattggtgaatgcatctttttatgctgcctgcttccattggttcctcctctttattcaatatagaatatacaaactatatttttgcttcattagtcagacacagttgcataggtactattagtccatcattcactccatgggaataaaatgatttgagaaactgaaagttgatgctcttgcccttgttttgtgacaagattctataccgttctatgcccttaccatgattgtcatattggtttaacgtgctagagcatgattgagttaatctgtgcttttgagcttttaggtgtagccatctctgttattttataattttggactgtctcaatttttaactctgccatgtgtttttgggatcacttctcgccttagcagccatttagcccatttaaacggtacacgtaggccagccatgcttgttaaccagcagtctagcctgtttagccatctaaataaggtggccaactatttgacgtttttggttgacaattgtttgggactctgttggtgtaacaaataacaatattatcactggttcagtttgttttattcccgatggcttttgggacctcttcatgagaaacatagctggaatatgataatatggctagttttggtgcagtggtggtgggtctactgtggtttctgctgtacacgatggttttgttttacagaagtctgtgtcgacttctccagttggcggtgaatttttaactgactgtatgatgaaaagcttggagagcaagggcatcgtcattaggcccagatattcatttaagaagaaggaaatcagtcctggagaatataagattgtagatcttgatcttccaaacacaactgagagttacaggttgtactgcatgagagctattgctagtgacgtcaaggagtctgtttgcagagttccagacactgcttttgatgaagtggcatatgcaaatgttcctacaacttcatatgagcttcctgatggacaaactattgaagttggtgctgatagattcaaggttcctgatattctatttaatccatctctatcccagactattcctgggattgatggatttgcagattcaataccagtccgtggccttcaacgaatggtcattgatagcgtaaataagtgcgacgttgacatacgaaaagagctattcagtaacatcttgctctctggtgggtcatcatcaattctgcagttaaaggagcgcctggagaaagaagtattggaggagtctcctcaagctgctcgtgtcaaggttatggcaagcggaaactcagtagagagacgtttcagtgtttggattggagggagcattctagcatctcttgggtcgttccagcagatgtggttctccaaagcagagtatgaagagcatggggtttcctatattcagagaaagtgcccttgaagcaggggaaggaatatgtacaaccaatattatgctttacgagccttattgttgccaaagggttccttgtgtacaacagcctggtgccttgccatgttggccaatgaatactcgagactcttttcaagtgacgtttgttgtcttcatggctagttaattttaggtgatgtaagaatgagacgggaccccatcttgttctgtaccggggctaattctttgccagcacacaaagagccaagacgattgttgtaactcgggttatttaaatcccagctgcagagcaaatacacaactttaaacgtgtagcgagcaggcagaacaacgatgccgcaatcattctgtccgtaatgtctgcaaccacgattgctagtgcggagggatgaacaagctatttctttattaggtcatgggaatgctgccaggcgtttgc

SEQ ID NO: 6184 - DNA, 4293 bp, Zea Mays
attttcatgtgctgctgaagttaacccagagctgtccgcaacaggttccttaaactcatgcctaggtgtttcactagaaaattcacactctaggatatcaggagatggtacaaggaaaaccttgggttgaggagattgagtaatcaaaccatttgatgggtttgcttcaagtgttcttttctcattcaagatctccattttgcatatgtcggaagcagatgcagaagtagaagttagatttcgaggcactgttgatattaaccctgagttacccatgagaggctgctcaccctcaggtcttggatttggactaggacgtccacacacattatcttggtcatcaccagaagatgaagcgaaaacgctagagagaggaggctgattaagtggagcatttgatgcatctgcttcaagtgttattttcttattcaagatctccatcttgcatgtatcagaggcaactgcagaacttgtcagtagatttccaggcactgctgatgttaacactaagttgtccacaaaaggttccttactgtcagaccttggagttgagctaggacattcacgctcaatatcttgattattggaagaagcagtgaaaatgtgacaacgaggaggctgattaagtgaagcattcgatgcatccacttcaattggtctttgctgattcacaaactcctccattttgcatgtatcagaagcggatgcagaagatcttacaagaatttcaggcgccgctgatgttaatactgagttctccataagagattccttgcattcagaccttggagttgggctaggacattcacgctctatatctttattatcagaagatacagcgaaaatgtgaggctgattaagtgaagcatttgatgcatccgcttcaattagtctttgctgattcacaaactcctccattttgcatgtatcagaagcagatgcagaagatcttgcaagaatttcaggcgccgctgatgttaatactgaattctccataagggattccttgcattcagaccttggagttgggctaggacattcacgctctatatctttagtatcagaagatacagcgaaagtgcgacactgattaagtgaagcatttggtgcatctgcttcaattggtctttgctgattcacaaactcctccattttgcatgtatcagaagcggatgcagaagatattgcaagaatttcaggcgccgctgatgttaatactgagttctccataatagattccttgcattcagaccttggagttgggttaggacattcacgctctatatctttattatcagaagatatagcgaaaatgcgaggctggttaagtgaagcattcgatgcatctgcttcaattggtctttgctgattcacaaactccattttgcatgtatcagaagcggatacagaagatcttgcaatttcaggcaccgctgatgttaatactgagttctccataaaagattccttgcattcagaccttggagttggactaggacactcacgctctatatcttgattatcggaaggtacagcaaaaacatgaggctgattaagtgaagcatttgatgcatccgcttcaattggtttttgctgattcacaaactcctccgttttgcatttatcagaagcagaggcagaagatcttgctagaatttcaggcgccaaggatgttaatactgagttctccgtaagtgattccttgcattcagaccttggagttgggctaggacgttcacgctccatatcttgattatcggaagatacagcgaaaatgtgaggctgattaaatgaagcattcgatgcatccacttcaagtgctttttgctgattcgcaaactcctccattttgcatttatcagaggcagaagttgtcgctagcattccaggcaccactgatgttaatactgagttgtccacaagaggttccttactgtcagattttggatttgggctaggatgttcacactgattgtcttgattatcagaagatacacggaaaatgtgagaatgaggatgatgattaagtggagcatttgatgcatctgcttcaagcgcttttggctgatccactgactcctccattttgcatgtatcagaggctgcagaggctgtcgtctgaatttcagatggtcctgatgttaacacggagttgttcataagaggttccttagtgtcagatctttgagttgggcctggacattcacgctcaatatcttgcttgtcagaaggtactgagaaaatgtgagaatgaggagattgattaagtggagcatttgatgaatctgcttcaagggttttttgctgattcacaaactcctccattttgcttgtatcagaggctgatgcagttgtcgctgagttgttcataagagcttcctcactgtcagatcttggagttggacctggacattcacactcaatatcttgattgtcagaaggtaccaggaaactgtgagaatgaggaagttgatgaagtggagcatttgatgcatccgcttcaaatgtttttggctgattcactacctccattttgcatgtatcagaatcatgggttgaagttgtcgttagattttcaggagcagctgacgttgaaagtaaactatccaccgcaggattcttattctcgggccttggggttgaactggggtatttatgtttcgtatcttcattattagaagatacaggggaaactttagattgaggagaatggttatctgaagaattcgatacaacagccccaattacttgttgttgactcactacctcctccatcttgcatgtatctgaaacaggcaaattcgtagtaatattttcaggtgacgctggtgctaattctgagctgtccacagcaatgtccttattctcagatcttggaactggactaggaaactcgcggtcaatatcttggttatcaggagaggatacaggaaaagcccttgattcaggagactggttaactgaagcattcgatgtatccaccacaagtgttctttgctgattcatgatctcctccatcttgcacatatcagaagcagatgctaaaggggctgattgtggactgcagattggaactctttcttcatgacttagcatatctgatggtgaactagaacctctgtcttcaatgggggttgctggagcgcagctcttaggctttgcagaagcaatagaagaatgaagttcatcgagaaagcttgggttagttgttgaacttaagcaagacccttcctgttgacttgaagctgtcctcgactcggccggactccaagcaaacaaaggactggaaacatctttcccaatacgttgagcaggtaggtttttcgatagatcctgccttgaattcagatctttaacaaatcctccttgtgaaccatttttagattcatgttgactttctgaccaggaaacatgctgattctgatgagattccacgttaccacgtccacaactcacatgtgccactgtaggactccatagggctctactgctgtgatggtggtttgattcaccagagcatcctccctgtattccatcatggttcaagtctgtgtgcccatatgaactcccaggagattgaatgaaaacagaatgcttattctggcagtgtgcttggctattcacagtataagcatcctttggtggaaccgaactagttgacagcgacaagctatcatctggagagtacacactttccctttctggaacagaatacttattatactgaacaggtattccagaagaactaaccacgctatgaccaacaggggagaaagcattggtctgatccacactagggttgttccttgtatgtccagtgccaaccagtgttgccttgctacttgtatgtgatgcagcctgagtaaaatctttctgctgttttgaaagcacttcagtcaacagcaatgatctctcttcactctcaaatgtaagccatactctcagatcacgtgggaagtaacttgtccaatttgaaagttgcaaaagagtaaatggaccctgaacattcccagaaggatccttgtagtgccagactttctctggctctgtgtcgtttgtcattgttactacagaagatgaaagtggtccagctccatacatagttctgtttgctgtgctgttctccaaacttcttgctcctgatccacatattgcactttctgtggacaagctttttggaaggtggctagaatcagaaacttttttaggatggttttgcacagtgctaagatatctcgatatccttcgtgatatggttgtatctggtcttgtctgatttaccgactttccaac

SEQ ID NO: 6185 - DNA, 4666 bp, Zea Mays
caatagattcacttccaaaatattgctctttttgaatagtttcttcacctttaaaatctgatttcgtgtcacctaattccccagttagagcaccagactttggtggtacaaaggcatctggtgagtggacatgtggcttagtccctaaattttcatgtgctgctgaagttaacccagagctgtccgcaacaggttccttaaactcatgcctaggtgtttcactagaaaattcacactctaggatatcaggagatggtacaaggaaaaccttgggttgaggagattgagtaatcaaaccatttgatgggtttgcttcaagtgttcttttctcattcaagatctccattttgcatatgtcggaagcagatgcagaagtagaagttagatttcgaggcactgttgatattaaccctgagttacccatgagaggctgctcaccctcaggtcttggatttggactaggacgtccacacacattatcttggtcatcaccagaagatgaagcgaaaacgctagagagaggaggctgattaagtggagcatttgatgcatctgcttcaagtgttattttcttattcaagatctccatcttgcatgtatcagaggcaactgcagaacttgtcagtagatttccaggcactgctgatgttaacactaagttgtccacaaaaggttccttactgtcagaccttggagttgagctaggacattcacgctcaatatcttgattattggaagaagcagtgaaaatgtgacaacgaggaggctgattaagtgaagcattcgatgcatccacttcaattggtctttgctgattcacaaactcctccattttgcatgtatcagaagcggatgcagaagatcttacaagaatttcaggcgccgctgatgttaatactgagttctccataagagattccttgcattcagaccttggagttgggctaggacattcacgctctatatctttattatcagaagatacagcgaaaatgtgaggctgattaagtgaagcatttgatgcatccgcttcaattagtctttgctgattcacaaactcctccattttgcatgtatcagaagcagatgcagaagatcttgcaagaatttcaggcgccgctgatgttaatactgaattctccataagggattccttgcattcagaccttggagttgggctaggacattcacgctctatatctttagtatcagaagatacagcgaaagtgcgacactgattaagtgaagcatttggtgcatctgcttcaattggtctttgctgattcacaaactccattttgcatgtatcagaagcggatgcagaagatctttcaggtgccgctgatgttaatactgagttctccataagggattccttgcattcagaccttggagttgggctaggacattcacgctctatatctttattatcagaagatacagtgaaaatgtgaggctggttaagtgaagcattcgatgcgtccgcttcatttggtctttgctgcttcacaaactcctccattttgcatgtatcagaagcggatgcagaagatcttgcaagaatttcaggcgtcgctggtgttaatactgagttctccataagagattccttgcattcagaccttggagttgggctaggacattcgcgctctatatctttattatcagaagatatagcgaaaatgtgaggctggttaagtgaagcattcgatgcatctgcttcaattggtctttgctgattcacaaactcctccattttgcatgtatcagaagcggatacagaagatcttgcaatttcaggcaccgctgatgttaatactgagttctccataaaagattccttgcattcagaccttggagttggactaggacactcacgctctatatcttgattatcggaaggtacagcaaaaacatgaggctgattaagtgaagcatttgatgcatccgcttcaattggtttttgctgattcacaaactcctccgttttgcatttatcagaagcagaggcagaagatcttgctagaatttcaggcgccaaggatgttaatactgagttctccgtaagtgattccttgcattcagaccttggagttgggctaggacgttcacgctccatatcttgattatcggaagatacagcgaaaatgtgaggctgattaaatgaagcattcgatgcatccacttcaagtgctttttgctgattcgcaaactcctccattttgcatttatcagaggcagaagttgtcgctagcattccaggcaccactgatgttaatactgagttgtccacaagaggttccttactgtcagattttggatttgggctaggatgttcacactgattgtcttgattatcagaagatacacggaaaatgtgagaatgaggatgatgattaagtggagcatttgatgcatctgcttcaagcgcttttggctgatccactgactcctccattttgcatgtatcagaggctgcagaggctgtcgtctgaatttcagatggtcctgatgttaacacggagttgttcataagaggttccttagtgtcagatctttgagttgggcctggacattcacgctcaatatcttgcttgtcagaaggtactgagaaaatgtgagaatgaggagattgattaagtggagcatttgatgaatctgcttcaagggttttttgctgattcacaaactcctccattttgcttgtatcagaggctgatgcagttgtcgctgagttgttcataagagcttcctcactgtcagatcttggagttggacctggacattcacactcaatatcttgattgtcagaaggtaccaggaaactgtgagaatgaggaagttgatgaagtggagcatttgatgcatccgcttcaaatgtttttggctgattcactacctccattttgcatgtatcagaatcatgggttgaagttgtcgttagattttcaggagcagctgacgttgaaagtaaactatccaccgcaggattcttattctcgggccttggggttgaactggggtatttatgtttcgtatcttcattattagaagatacaggggaaactttagattgaggagaatggttatctgaagaattcgatacaacagccccaattacttgttgttgactcactacctcctccatcttgcatgtatctgaaacaggcaaattcgtagtaatattttcaggtgacgctggtgctaattctgagctgtccacagcaatgtccttattctcagatcttggaactggactaggaaactcgcggtcaatatcttggttatcaggagaggatacaggaaaagcccttgattcaggagactggttaactgaagcattcgatgtatccaccacaagtgttctttgctgattcatgatctcctccatcttgcacatatcagaagcagatgctaaaggggctgattgtggactgcagattggaactctttcttcatgacttagcatatctgatggtgaactagaacctctgtcttcaatgggggttgctggagcgcagctcttaggctttgcagaagcaatagaagaatgaagttcatcgagaaagcttgggttagttgttgaacttaagcaagacccttcctgttgacttgaagctgtcctcgactcggccggactccaagcaaacaaaggactggaaacatctttcccaatacgttgagcaggtaggtttttcgatagatcctgccttgaattcagatctttaacaaatcctccttgtgaaccatttttagattcatgttgactttctgaccaggaaacatgctgattctgatgagattccacgttaccacgtccacaactcacatgtgccactgtaggactccatagggctctactgctgtgatggtggtttgattcaccagagcatcctccctgtattccatcatggttcaagtctgtgtgcccatatgaactcccaggagattgaatgaaaacagaatgcttattctggcagtgtgcttggctattcacagtataagcatcctttggtggaaccgaactagttgacagcgacaagctatcatctggagagtacacactttccctttctggaacagaatacttattatactgaacaggtattccagaagaactaaccacgctatgaccaacaggggagaaagcattggtctgatccacactagggttgttccttgtatgtccagtgccaaccagtgttgccttgctacttgtatgtgatgcagcctgagtaaaatctttctgctgttttgaaagcacttcagtcaacagcaatgatctctcttcactctcaaatgtaagccatactctcagatcacgtgggaagtaacttgtccaatttgaaagttgcaaaagagtaaatggaccctgaacattcccagaaggatccttgtagtgccagactttctctggctctgtgtcgtttgtcattgttactacagaagatgaaagtggtccagctccatacatagttctgtttgctgtgctgttctccaaacttcttgctcctgatccacatattgcactttctgtggacaagctttttggaaggtggctagaatcagaaacttttttaggatggttttgcacagtgctaagatatctcgatatccttcgtgatatggttgtatctggtcttgtctgatttaccgactttccaac

SEQ ID NO: 6186 - DNA, 4550 bp, Zea Mays
ctcctttcttccattaaagaatccagtacatctgacacatctatcgactcaacaccagaggaaggatcaattaacaaattctctcttgtagcggcaatagattcacttccaaaatattgctctttttgaatagtttcttcacctttaaaatctgatttcgtgtcacctaattccccagttagagcaccagactttggtggtacaaaggcatctggtgagtggacatgtggcttagtccctaaattttcatgtgctgctgaagttaacccagagctgtccgcaacaggttccttaaactcatgcctaggtgtttcactagaaaattcacactctaggatatcaggagatggtacaaggaaaaccttgggttgaggagattgagtaatcaaaccatttgatgggtttgcttcaagtgttcttttctcattcaagatctccattttgcatatgtcggaagcagatgcagaagtagaagttagatttcgaggcactgttgatattaaccctgagttacccatgagaggctgctcaccctcaggtcttggatttggactaggacgtccacacacattatcttggtcatcaccagaagatgaagcgaaaacgctagagagaggaggctgattaagtggagcatttgatgcatctgcttcaagtgttattttcttattcaagatctccatcttgcatgtatcagaggcaactgcagaacttgtcagtagatttccaggcactgctgatgttaacactaagttgtccacaaaaggttccttactgtcagaccttggagttgagctaggacattcacgctcaatatcttgattattggaagaagcagtgaaaatgtgacaacgaggaggctgattaagtgaagcattcgatgcatccacttcaattggtctttgctgattcacaaactcctccattttgcatgtatcagaagcggatgcagaagatcttacaagaatttcaggcgccgctgatgttaatactgagttctccataagagattccttgcattcagaccttggagttgggctaggacattcacgctctatatctttattatcagaagatacagcgaaaatgtgaggctgattaagtgaagcatttgatgcatccgcttcaattagtctttgctgattcacaaactcctccattttgcatgtatcagaagcagatgcagaagatcttgcaagaatttcaggcgccgctgatgttaatactgaattctccataagggattccttgcattcagaccttggagttgggctaggacattcacgctctatatctttagtatcagaagatacagcgaaagtgcgacactgattaagtgaagcatttggtgcatctgcttcaattggtctttgctgattcacaaactccattttgcatgtatcagaagcggatgcagaagatctttcaggtgccgctgatgttaatactgagttctccataagggattccttgcattcagaccttggagttgggctaggacattcacaccttggagttgggttaggacattcacgctctatatctttattatcagaagatatagcgaaaatgcgaggctggttaagtgaagcattcgatgcatctgcttcaattggtctttgctgattcacaaactccattttgcatgtatcagaagcggatacagaagatcttgcaatttcaggcaccgctgatgttaatactgagttctccataaaagattccttgcattcagaccttggagttggactaggacactcacgctctatatcttgattatcggaaggtacagcaaaaacatgaggctgattaagtgaagcatttgatgcatccgcttcaattggtttttgctgattcacaaactcctccgttttgcatttatcagaagcagaggcagaagatcttgctagaatttcaggcgccaaggatgttaatactgagttctccgtaagtgattccttgcattcagaccttggagttgggctaggacgttcacgctccatatcttgattatcggaagatacagcgaaaatgtgaggctgattaaatgaagcattcgatgcatccacttcaagtgctttttgctgattcgcaaactcctccattttgcatttatcagaggcagaagttgtcgctagcattccaggcaccactgatgttaatactgagttgtccacaagaggttccttactgtcagattttggatttgggctaggatgttcacactgattgtcttgattatcagaagatacacggaaaatgtgagaatgaggatgatgattaagtggagcatttgatgcatctgcttcaagcgcttttggctgatccactgactcctccattttgcatgtatcagaggctgcagaggctgtcgtctgaatttcagatggtcctgatgttaacacggagttgttcataagaggttccttagtgtcagatctttgagttgggcctggacattcacgctcaatatcttgcttgtcagaaggtactgagaaaatgtgagaatgaggagattgattaagtggagcatttgatgaatctgcttcaagggttttttgctgattcacaaactcctccattttgcttgtatcagaggctgatgcagttgtcgctgagttgttcataagagcttcctcactgtcagatcttggagttggacctggacattcacactcaatatcttgattgtcagaaggtaccaggaaactgtgagaatgaggaagttgatgaagtggagcatttgatgcatccgcttcaaatgtttttggctgattcactacctccattttgcatgtatcagaatcatgggttgaagttgtcgttagattttcaggagcagctgacgttgaaagtaaactatccaccgcaggattcttattctcgggccttggggttgaactggggtatttatgtttcgtatcttcattattagaagatacaggggaaactttagattgaggagaatggttatctgaagaattcgatacaacagccccaattacttgttgttgactcactacctcctccatcttgcatgtatctgaaacaggcaaattcgtagtaatattttcaggtgacgctggtgctaattctgagctgtccacagcaatgtccttattctcagatcttggaactggactaggaaactcgcggtcaatatcttggttatcaggagaggatacaggaaaagcccttgattcaggagactggttaactgaagcattcgatgtatccaccacaagtgttctttgctgattcatgatctcctccatcttgcacatatcagaagcagatgctaaaggggctgattgtggactgcagattggaactctttcttcatgacttagcatatctgatggtgaactagaacctctgtcttcaatgggggttgctggagcgcagctcttaggctttgcagaagcaatagaagaatgaagttcatcgagaaagcttgggttagttgttgaacttaagcaagacccttcctgttgacttgaagctgtcctcgactcggccggactccaagcaaacaaaggactggaaacatctttcccaatacgttgagcaggtaggtttttcgatagatcctgccttgaattcagatctttaacaaatcctccttgtgaaccatttttagattcatgttgactttctgaccaggaaacatgctgattctgatgagattccacgttaccacgtccacaactcacatgtgccactgtaggactccatagggctctactgctgtgatggtggtttgattcaccagagcatcctccctgtattccatcatggttcaagtctgtgtgcccatatgaactcccaggagattgaatgaaaacagaatgcttattctggcagtgtgcttggctattcacagtataagcatcctttggtggaaccgaactagttgacagcgacaagctatcatctggagagtacacactttccctttctggaacagaatacttattatactgaacaggtattccagaagaactaaccacgctatgaccaacaggggagaaagcattggtctgatccacactagggttgttccttgtatgtccagtgccaaccagtgttgccttgctacttgtatgtgatgcagcctgagtaaaatctttctgctgttttgaaagcacttcagtcaacagcaatgatctctcttcactctcaaatgtaagccatactctcagatcacgtgggaagtaacttgtccaatttgaaagttgcaaaagagtaaatggaccctgaacattcccagaaggatccttgtagtgccagactttctctggctctgtgtcgtttgtcattgttactacagaagatgaaagtggtccagctccatacatagttctgtttgctgtgctgttctccaaacttcttgctcctgatccacatattgcactttctgtggacaagctttttggaaggtggctagaatcagaaacttttttaggatggttttgcacagtgctaagatatctcgatatccttcgtgatatggttgtatctggtcttgtctgatttaccgactttccaac

SEQ ID NO: 6187 - DNA, 4663 bp, Zea Mays
attgatcctggcatgtacgaagttccactcctttcttccattaaagaatccagtacatctgacacatctatcgactcaacaccagaggaaggatcaattaacaaattctctcttgtagcggcaatagattcacttccaaaatattgctctttttgaatagtttcttcacctttaaaatctgatttcgtgtcacctaattccccagttagagcaccagactttggtggtacaaaggcatctggtgagtggacatgtggcttagtccctaaattttcatgtgctgctgaagttaacccagagctgtccgcaacaggttccttaaactcatgcctaggtgtttcactagaaaattcacactctaggatatcaggagatggtacaaggaaaaccttgggttgaggagattgagtaatcaaaccatttgatgggtttgcttcaagtgttcttttctcattcaagatctccattttgcatatgtcggaagcagatgcagaagtagaagttagatttcgaggcactgttgatattaaccctgagttacccatgagaggctgctcaccctcaggtcttggatttggactaggacgtccacacacattatcttggtcatcaccagaagatgaagcgaaaacgctagagagaggaggctgattaagtggagcatttgatgcatctgcttcaagtgttattttcttattcaagatctccatcttgcatgtatcagaggcaactgcagaacttgtcagtagatttccaggcactgctgatgttaacactaagttgtccacaaaaggttccttactgtcagaccttggagttgagctaggacattcacgctcaatatcttgattattggaagaagcagtgaaaatgtgacaacgaggaggctgattaagtgaagcattcgatgcatccacttcaattggtctttgctgattcacaaactcctccattttgcatgtatcagaagcggatgcagaagatcttacaagaatttcaggcgccgctgatgttaatactgagttctccataagagattccttgcattcagaccttggagttgggctaggacattcacgctctatatctttattatcagaagatacagcgaaaatgtgaggctgattaagtgaagcatttgatgcatccgcttcaattagtctttgctgattcacaaactcctccattttgcatgtatcagaagcagatgcagaagatcttgcaagaatttcaggcgccgctgatgttaatactgaattctccataagggattccttgcattcagaccttggagttgggctaggacattcacgctctatatctttagtatcagaagatacagcgaaagtgcgacactgattaagtgaagcatttggtgcatctgcttcaattggtctttgctgattcacaaactccattttgcatgtatcagaagcggatgcagaagatctttcaggtgccgctgatgttaatactgagttctccataagggattccttgcattcagaccttggagttgggctaggacattcacgctctatatctttattatcagaagatacagtgaaaatgtgaggctggttaagtgaagcattcgatgcgtccgcttcatttggtctttgctgcttcacaaactcctccattcacgctctatatctttattatcagaagatatagcgaaaatgcgaggctggttaagtgaagcattcgatgcatctgcttcaattggtctttgctgattcacaaactccattttgcatgtatcagaagcggatacagaagatcttgcaatttcaggcaccgctgatgttaatactgagttctccataaaagattccttgcattcagaccttggagttggactaggacactcacgctctatatcttgattatcggaaggtacagcaaaaacatgaggctgattaagtgaagcatttgatgcatccgcttcaattggtttttgctgattcacaaactcctccgttttgcatttatcagaagcagaggcagaagatcttgctagaatttcaggcgccaaggatgttaatactgagttctccgtaagtgattccttgcattcagaccttggagttgggctaggacgttcacgctccatatcttgattatcggaagatacagcgaaaatgtgaggctgattaaatgaagcattcgatgcatccacttcaagtgctttttgctgattcgcaaactcctccattttgcatttatcagaggcagaagttgtcgctagcattccaggcaccactgatgttaatactgagttgtccacaagaggttccttactgtcagattttggatttgggctaggatgttcacactgattgtcttgattatcagaagatacacggaaaatgtgagaatgaggatgatgattaagtggagcatttgatgcatctgcttcaagcgcttttggctgatccactgactcctccattttgcatgtatcagaggctgcagaggctgtcgtctgaatttcagatggtcctgatgttaacacggagttgttcataagaggttccttagtgtcagatctttgagttgggcctggacattcacgctcaatatcttgcttgtcagaaggtactgagaaaatgtgagaatgaggagattgattaagtggagcatttgatgaatctgcttcaagggttttttgctgattcacaaactcctccattttgcttgtatcagaggctgatgcagttgtcgctgagttgttcataagagcttcctcactgtcagatcttggagttggacctggacattcacactcaatatcttgattgtcagaaggtaccaggaaactgtgagaatgaggaagttgatgaagtggagcatttgatgcatccgcttcaaatgtttttggctgattcactacctccattttgcatgtatcagaatcatgggttgaagttgtcgttagattttcaggagcagctgacgttgaaagtaaactatccaccgcaggattcttattctcgggccttggggttgaactggggtatttatgtttcgtatcttcattattagaagatacaggggaaactttagattgaggagaatggttatctgaagaattcgatacaacagccccaattacttgttgttgactcactacctcctccatcttgcatgtatctgaaacaggcaaattcgtagtaatattttcaggtgacgctggtgctaattctgagctgtccacagcaatgtccttattctcagatcttggaactggactaggaaactcgcggtcaatatcttggttatcaggagaggatacaggaaaagcccttgattcaggagactggttaactgaagcattcgatgtatccaccacaagtgttctttgctgattcatgatctcctccatcttgcacatatcagaagcagatgctaaaggggctgattgtggactgcagattggaactctttcttcatgacttagcatatctgatggtgaactagaacctctgtcttcaatgggggttgctggagcgcagctcttaggctttgcagaagcaatagaagaatgaagttcatcgagaaagcttgggttagttgttgaacttaagcaagacccttcctgttgacttgaagctgtcctcgactcggccggactccaagcaaacaaaggactggaaacatctttcccaatacgttgagcaggtaggtttttcgatagatcctgccttgaattcagatctttaacaaatcctccttgtgaaccatttttagattcatgttgactttctgaccaggaaacatgctgattctgatgagattccacgttaccacgtccacaactcacatgtgccactgtaggactccatagggctctactgctgtgatggtggtttgattcaccagagcatcctccctgtattccatcatggttcaagtctgtgtgcccatatgaactcccaggagattgaatgaaaacagaatgcttattctggcagtgtgcttggctattcacagtataagcatcctttggtggaaccgaactagttgacagcgacaagctatcatctggagagtacacactttccctttctggaacagaatacttattatactgaacaggtattccagaagaactaaccacgctatgaccaacaggggagaaagcattggtctgatccacactagggttgttccttgtatgtccagtgccaaccagtgttgccttgctacttgtatgtgatgcagcctgagtaaaatctttctgctgttttgaaagcacttcagtcaacagcaatgatctctcttcactctcaaatgtaagccatactctcagatcacgtgggaagtaacttgtccaatttgaaagttgcaaaagagtaaatggaccctgaacattcccagaaggatccttgtagtgccagactttctctggctctgtgtcgtttgtcattgttactacagaagatgaaagtggtccagctccatacatagttctgtttgctgtgctgttctccaaacttcttgctcctgatccacatattgcactttctgtggacaagctttttggaaggtggctagaatcagaaacttttttaggatggttttgcacagtgctaagatatctcgatatccttcgtgatatggttgtatctggtcttgtctgatttaccgactttccaac

SEQ ID NO: 6188 - DNA, 2488 bp, Zea Mays
ctcttcctcttcgatcctgtggcgcagatcgtacgttgcgtcgtcgcggtcgcccacggccgccgccacacgaacacagtgaatttcccaattaaaaaccatacacacatcgctctccacatccactttatttccactcgttattcttctcaacttcccctttagtcgtgtgtcgtcacctcatcatcgtcgtctatcccatagtagtagatatacacgatgcaagtgctactcagtactcacttcagatctgatgcccctctgcatgcatgtagagatctatgaggaacgaaaaaaagtagatcgaacagataaaattgtactgaactggaggctgtctactagtgctgtaggaggctggaggccatgggctacaagcggagcgccaagaagtgccgcgagaagttcgagaacgtcgataagtactacaagcgcaccaaggacggccgcgcgggccgtggcgacggcaaggcataccgcttcttctccgagctcgaggccctccacggcgccgcgccggcggtggcgtcgctcgcgcgtcggcctgtggccatggcgcccgcgccaccaccaccggtcacggccctcgtgggcgcgtccaccggcatggcgccgaccgccttgcatgccgagccaccgccgatgccgcagcctgcagctccggctccaacggggacggggacggggactgggactggcagtgtcactgctaccatcgcgccccctgcaggcgccgccgccagcgacgcggcggcggcggcggcatgcatgatgacgcctggtgacgtcagcttctcctcgggctcggacggggaggacacggatgagaccggcggcggcagcgggaagcggaagcgggacggcggggaggacgaggacggcttcggcggcagcatcagcagcaagatgatgcggttcttcgagggcctgatgcggcaggtgatggagcggcaggaggagatgcagcggcggttcatcgaggccatcgagcggcgggagcaggaccggatgatccgcgaggaggcgtggcggcgccaggaggtggcgcgcctcgcccgcgagcaggacgcgctcgcccaggaacgcgccatggccgtgtcccgcgacgccgccgtcgtctccttcatacagcgggtcaccggccagaacatccccatgcccgtgccctcgcccgtcgcgcctccgccggccttcatcaccgcgctcacgcatgcgccgccgctgcagcccacgccggtcgcttccgctgcaccggcagcgccagccccggcgcaagcgcaacaccaaccgccgccgccagctcatcagctgtcgccgaagaaaccgcaaactgtaatgccgttgacaccacaggcgccccaacaaccgcaggtacagccacgccaggcgccgtcgccgtcgccgtcgccggcgacgcatccgcagggcaataaggagatcgtcgtccgcgctccgccgccggcggagtcgcaggacacggcggggttcggtggcggcgcgccgtcgccgtcgaggtggcccaaggcggaagtgcacgcgctgatccagctgcgcacggagatggagacgcggtaccaggactccgggcccaagggcccgctgtgggaggacatctcgtcggggatgcggcggctcgggtacaaccggagcgccaagcgctgcaaggagaagtgggagaacatcaacaagtacttcaagaaggtgaaggagagcaacaagaagcgccccgaggactccaaaacctgcccctactaccaccagctcgacgcgctctaccgcagcaaggcgctcgcgtcgtcgtcgtccggcgccggcgctggcgccgggccggcagcgacaacaagtgggtctttcttgaccatggtccatcactagctgcatgcatgcatagatgccaaagcgtacagagcttgctgtacgtacgtgtcctcgatcttgcacaggtaaaaagaaaatggacacaccgaacagcatcaaaaccatgcatttttactcttttcgatccatggacaacaccgagctctttccttgttcatcttttcatatctctggatccaatctaatcctgcacatacacatgcatatgcatgcatagaggacacgtacgtgagattcaccgtacatatacgtatagatggtggtgctatattggaggagaaagctgatgagggtgtggggggtacatatcgtgtgttactgcaatacactacacagtttgttgtatggtacgtacaacaaagactcaaagagacatcttgagctgatggaaacatatacatgtgctcatgcatgcgggaatttctttctttcttcttcttttttcttttttgcacccccttttaagaagagttgttaccgaactgtccattctgtaatttattataaattcgttaattattacaaatactgtggttatattaatggcttttaaattatactgtgtacaacaagagacttggtaagtgtaaaatccttgaggtggttctcc

SEQ ID NO: 6189 - DNA, 3534 bp, Zea Mays
cgccgatggatgcccatgctcaccggtcttcccccgccccctcaccgccctattctagctatttagtgctgctagcctagctctactgctacaactacagtaccagtagtacgctactagcctgccctctcctttccgctcgctcgtggtcgcgggcatctcatctccctccctcctcttcctcttctcccctgtgccagccttgtacaactgcctgctcctgtgccactcccaatcccccccttccatccaccaccaccacctcctcccccctccgcccttttctttccccttttcctcacgcccctctttccagtttgtgctgtctgctgtgctgtgctgtgctgtgctcgccggccggctggcctgatctttccaactccccccctctcccccctcctaacctcaccacgcctccagtagcgctagccagcagccacctccatgcgcgctagctagctcctggcacagctccagcttctccgatccacctccataattctgccgtgcggccaccagcagcagctccggccgggaaaggcgcaagattccgccttgggttccttgcgcgcgcgcgggtaattaagctaccttgctagctagcaagctcgctccacgcgccggccggccggcatgcagcagccggccatgccgcctccattctcgcctgccgcggcgggccagcacgccacgcccatcagcagccgcccgccggagccacacccacacccacacccacagcagcaaggcgacgagctcggcggtgggtcggcggcttttttccggaggcagcagcttggtcgtcgtcttggaccacgacggcggcgcacccgcgggcgacggcgggccttccggcggcaaccggtggccgcggcaggagacgctggcgctgctcaagatccgctccgagatggacgccgcgttccgggaggccgccctcaagggacccctctgggaccaagtctccaggaggctggaggccatgggctacaagcggagcgccaagaagtgccgcgagaagttcgagaacgtcgataagtactacaagcgcaccaaggacggccgcgcgggccgtggcgacggcaaggcataccgcttcttctccgagctcgaggccctccacggcgccgcgccggcggtggcgtcgctcgcgcgtcggcctgtggccatggcgcccgcgccaccaccaccggtcacggccctcgtgggcgcgtccaccggcatggcgccgaccgccttgcatgccgagccaccgccgatgccgcagcctgcagctccggctccaacggggacggggacggggactgggactggcagtgtcactgctaccatcgcgccccctgcaggcgccgccgccagcgacgcggcggcggcggcggcatgcatgatgacgcctggtgacgtcagcttctcctcgggctcggacggggaggacacggatgagaccggcggcggcagcgggaagcggaagcgggacggcggggaggacgaggacggcttcggcggcagcatcagcagcaagatgatgcggttcttcgagggcctgatgcggcaggtgatggagcggcaggaggagatgcagcggcggttcatcgaggccatcgagcggcgggagcaggaccggatgatccgcgaggaggcgtggcggcgccaggaggtggcgcgcctcgcccgcgagcaggacgcgctcgcccaggaacgcgccatggccgtgtcccgcgacgccgccgtcgtctccttcatacagcgggtcaccggccagaacatccccatgcccgtgccctcgcccgtcgcgcctccgccggccttcatcaccgcgctcacgcatgcgccgccgctgcagcccacgccggtcgcttccgctgcaccggcagcgccagccccggcgcaagcgcaacaccaaccgccgccgccagctcatcagctgtcgccgaagaaaccgcaaactgtaatgccgttgacaccacaggcgccccaacaaccgcaggtacagccacgccaggcgccgtcgccgtcgccgtcgccggcgacgcatccgcagggcaataaggagatcgtcgtccgcgctccgccgccggcggagtcgcaggacacggcggggttcggtggcggcgcgccgtcgccgtcgaggtggcccaaggcggaagtgcacgcgctgatccagctgcgcacggagatggagacgcggtaccaggactccgggcccaagggcccgctgtgggaggacatctcgtcggggatgcggcggctcgggtacaaccggagcgccaagcgctgcaaggagaagtgggagaacatcaacaagtacttcaagaaggtgaaggagagcaacaagaagcgccccgaggactccaaaacctgcccctactaccaccagctcgacgcgctctaccgcagcaaggcgctcgcgtcgtcgtcgtccgggcccggtgcagctccggcgctgccgccgccgccgccgccgccgcagcgcccagatcagcaggctgctgctgcggcgccgcccgtcaccgtcgtgctagccccggtgccactgtcccagacggggcctcacggcaacggaaacggcaacggcaatgggtgcgcgggcaggggcagctcggacaatggcggcggcggctccgggggcatgcagaagcagcaggcgagcaacggcggggttgctgccgccaggttctccgccgtggatggcgccggtggcaatggcgttgcgacgaacaagaagaaggcatcgtcaggaaggaggaggcggtggcggcggagacgaggccacagccggtgtcgatgaacgacagctacgtggacagcgacagcagcatggacgacgacgaggaggacgacttttacgatgacgatgatgagggcgacgttggcgacggcgggaacaataagatgcagtacgagatccagttccagcagcagcatcagcatgttcagccgcagcagcagcagaaccagagcggcggcggagtccggccgaacgcgagcggcagcgccggcgctggcgccgggccggcagcgacaacaagtgggtctttcttgaccatggtccatcactagctgcatgcatgcatagatgccaaagcgtacagagcttgctgtacgtacgtgtcctcgatcttgcacaggtaaaaagaaaatggacacaccgaacagcatcaaaaccatgcatttttactcttttcgatccatggacaacaccgagctctttccttgttcatcttttcacatatcgtgtgttactgcaatacactacacagtttgttgtatggtacgtacaacaaagactcaaagagacatcttgagctgatggaaacatatacatgtgctcatgcatgcgggaatttctttctttcttcttcttttttcttttttgcacccccttttaagaagagttgttaccgaactgtccattctgtaatttattataaattcgttaattattacaaatactgtggttatattaatggcttttaaattatactgtgtacaacaagagacttggtaagtgtaaaatccttgaggtggttctcc

SEQ ID NO: 6190 - DNA, 2460 bp, Zea Mays
cacgagcccaacttgcacccgcaccaccaggctcacagccttacctgatccttgacaattctgctccctcgccgccgccgccgccgccgccgcccgcccgtcgtcgctgcgcttcggtacccgcgaagcaaggccccgcctcccgtgtacccgccgccgaagaagggagaggagcagatgaaagcggggaggaagaacctgcggcgggcgtgcgacgagggcgccgccgtcacgctcgccgagggagagagcatcatgcaggtcctcacgctgcgcggctccaacgtcatcgagggagtttcgtggtcgtggatgccagcgggagggaccaggcgctggaatcggggagcaagatcgcgtgcgttgtttcgcgagtcctcttccacgaacaagttcgggccctgcagaagtctggtaactggccggccattttcaactcagctccgactccgaatgaagcttcagaggcgggagcagaagcacaggctgcccaggttgacgaggaaccagattccgatgaagaagacgacgatcttccaccacttgaggcgaacacgaacaggaataggccgtatgaattgtattctgattcagacagtggttctgacgcttgaaaagtaccaaggccatccatcctgtgcgttttgtctccaaggtattcgtgatgtgtgaatggaatggctggacctggatggctggattcatatgtgccatgtcatgtatgttagttagcatgctgttattctgcaatggaatctgtgttttctgatactagtcattaagctagatcaaggaagctgggtttgtttccactgagggtccgttcggttcttgggggactggccacccggaactattcctagccagattggttatctaatttatataaggtttgattagatggaataattccgggccaaacgaacaggccctgaagccgccgctgccgacctggtaaggtccaagtccgaatggtccgctgccgacctggtaaggtccaagtccgaatggtgggaagagaatcgtccttgccgtagttgcaagaattttatgaaaactcggatggtttgagcctttgaggtcgaaaccagagggtacttttctttggggttagcttggaatgtgaaactgtggacggggacggcagctttcatttgtactatttaattaaccagcgatgatcgattgagcaagtcagacagtgggactggctggtacacgcagaagatggagaaaaggaacgaattggtcttggttcatttgatcatctctggaaacaaagaaaaaagcacgcccgtgaaatctccgcgaaacatgtacaaaatttccgaaactacacgacagccgaagcaaagaaggcgccggcggtcaccagaaggcgcgcttccgccggaaacgcctggccgtggcgaggaggccaacgccgaggcacacggcccacacgcccacctccatcgcccaccgcaccgtctccatctcgacctcctgctcctcctcctcctccgcgtccccgaccacctcccacccgtcgtcgtcgcactcgcagcggcaccagccgccgaggcccgtggtggcgtcctcctccggtatcccctccagccgggtggctccgcaccgcatccggccccggccggccgcgcgggccctgtcccgcatcagcacgccgccctccgcgagcaccaccacctccgcgacgcacacctccggcgaggccggcgcccggcggcactccacgcgccaccccccctcgcgccgcgcggagaagacgccctccgccgcgacctcctccccggcggcggcggcgagcacctcgaaccgcgcgccctcggcggcggcgacgcggtcggcgctcgcgtacgcgtcggcggcgacccggcggagcgtgaccttggcgggcgcggctggcgggagcgcgcggccgttgagtcccagcgccgcgcccccgatggccgggtggtaggccagcgtgagctccgcgggcgtcgtggcggagcaggaggagaggcggaggtagaaagcgcggatgtcgaggcgccgggacgggggcgggcggaggaagccgccctctatcgccgtggcgcggcacatcgcggaaaccggtcgctgaaccagtgaacctgcgtcgtcttggtggtgtcctcgtgatcaccgaagcgcaaggcagcttgtgctctgctgctgggatcttttgctaataaagcggagcgcgggggaggtaggcgtcgggtcgtcccgtggttttccgcgtggcgcccggggttttcttttcgtggctgagtcggccgaaacgaagaggagcacacggtttggtttgctgtgggttcccgacttttgtctctgcctgcagcagctggggctggggctgggctgggcagcgtttagctgacgtctgcgtgatagagaccgtcgtccaggctgggtgcccgactgcacgggacaggtgtgcactgagcctgaaac

SEQ ID NO: 6191 - DNA, 2599 bp, Zea Mays
cacgagcccaacttgcacccgcaccaccaggctcacagccttacctgatccttgacaattctgctccctcgccgccgccgccgccgccgccgcccgcccgtcgtcgctgcgcttcggtacccgcgaagcaaggccccgcctcccgtgtacccgccgccgaagaagggagaggagcagatgaaagcggggaggaagaacctgcggcgggcgtgcgacgagggcgccgccgtcacgctcgccgagggagagagcatcatgcaggtcctcacgctgcgcggctccaacgtcatcgaggtgatggacggcgtgggcgtcaggtccctggccttgttccccgccaagttccagaagagcttctggatcaagaacgggagtttcgtggtcgtggatgccagcgggagggaccaggcgctggaatcggggagcaagatcgcgtgcgttgtttcgcgagtcctcttccacgaacaagttcgggccctgcagaagtctggtaactgcattttgctcatcttgacttatggaattgggtgttctgaccagttcgtcccttcttatgttaggccggccattttcaactcagctccgactccgaatgaagcttcagaggcgggagcagaagcacaggctgcccaggttgacgaggaaccagattccgatgaagaagacgacgatcttccaccacttgaggcgaacacgaacaggaataggccgtatgaattgtattctgattcagacagtggttctgacgcttgaaaagtaccaaggccatccatcctgtgcgttttgtctccaaggtattcgtgatgtgtgaatggaatggctggacctggatggctggattcatatgtgccatgtcatgtatgttagttagcatgctgttattctgcaatggaatctgtgttttctgatactagtcattaagctagatcaaggaagctgggtttgtttccactgagggtccgttcggttcttgggggactggccacccggaactattcctagccagattggttatctaatttatataaggtttgattagatggaataattccgggccaaacgaacaggccctgaagccgccgctgccgacctggtaaggtccaagtccgaatggtccgctgccgacctggtaaggtccaagtccgaatggtgggaagagaatcgtccttgccgtagttgcaagaattttatgaaaactcggatggtttgagcctttgaggtcgaaaccagagggtacttttctttggggttagcttggaatgtgaaactgtggacggggacggcagctttcatttgtactatttaattaaccagcgatgatcgattgagcaagtcagacagtgggactggctggtacacgcagaagatggagaaaaggaacgaattggtcttggttcatttgatcatctctggaaacaaagaaaaaagcacgcccgtgaaatctccgcgaaacatgtacaaaatttccgaaactacacgacagccgaagcaaagaaggcgccggcggtcaccagaaggcgcgcttccgccggaaacgcctggccgtggcgaggaggccaacgccgaggcacacggcccacacgcccacctccatcgcccaccgcaccgtctccatctcgacctcctgctcctcctcctcctccgcgtccccgaccacctcccacccgtcgtcgtcgcactcgcagcggcaccagccgccgaggcccgtggtggcgtcctcctccggtatcccctccagccgggtggctccgcaccgcatccggccccggccggccgcgcgggccctgtcccgcatcagcacgccgccctccgcgagcaccaccacctccgcgacgcacacctccggcgaggccggcgcccggcggcactccacgcgccaccccccctcgcgccgcgcggagaagacgccctccgccgcgacctcctccccggcggcggcggcgagcacctcgaaccgcgcgccctcggcggcggcgacgcggtcggcgctcgcgtacgcgtcggcggcgacccggcggagcgtgaccttggcgggcgcggctggcgggagcgcgcggccgttgagtcccagcgccgcgcccccgatggccgggtggtaggccagcgtgagctccgcgggcgtcgtggcggagcaggaggagaggcggaggtagaaagcgcggatgtcgaggcgccgggacgggggcgggcggaggaagccgccctctatcgccgtggcgcggcacatcgcggaaaccggtcgctgaaccagtgaacctgcgtcgtcttggtggtgtcctcgtgatcaccgaagcgcaaggcagcttgtgctctgctgctgggatcttttgctaataaagcggagcgcgggggaggtaggcgtcgggtcgtcccgtggttttccgcgtggcgcccggggttttcttttcgtggctgagtcggccgaaacgaagaggagcacacggtttggtttgctgtgggttcccgacttttgtctctgcctgcagcagctggggctggggctgggctgggcagcgtttagctgacgtctgcgtgatagagaccgtcgtccaggctgggtgcccgactgcacgggacaggtgtgcactgagcctgaaac

SEQ ID NO: 6192 - DNA, 2753 bp, Zea Mays
gcttgctcgggttaatgaggtgcttaaggggtgaatttttttgtaaaagtcgagactgttcaaggaaacagacataatttttgtaccatatgggcgttgcacgcttgaacgcgaggaaccaatcagacggactgtgaacgatgcaatgcttactgttcgcgtggttaattgctacggcccagttttgtattcatgcctaataacaactaaaaaaggccacgagcccaacttgcacccgcaccaccaggctcacagccttacctgatccttgacaattctgctccctcgccgccgccgccgccgccgccgcccgcccgtcgtcgctgcgcttcggtacccgcgaagcaaggccccgcctcccgtgtacccgccgccgaagaagggagaggagcagatgaaagcggggaggaagaacctgcggcgggcgtgcgacgagggcgccgccgtcacgctcgccgagggagagagcatcatgcaggtcctcacgctgcgcggctccaacgtcatcgaggtgatggacggcgtgggcgtcaggtccctggccttgttccccgccaagttccagaagagcttctggatcaagaacgggagtttcgtggtcgtggatgccagcgggagggaccaggcgctggaatcggggagcaagatcgcgtgcgttgtttcgcgagtcctcttccacgaacaagttcgggccctgcagaagtctggtaactggccggccattttcaactcagctccgactccgaatgaagcttcagaggcgggagcagaagcacaggctgcccaggttgacgaggaaccagattccgatgaagaagacgacgatcttccaccacttgaggcgaacacgaacaggaataggccgtatgaattgtattctgattcagacagtggttctgacgcttgaaaagtaccaaggccatccatcctgtgcgttttgtctccaaggtattcgtgatgtgtgaatggaatggctggacctggatggctggattcatatgtgccatgtcatgtatgttagttagcatgctgttattctgcaatggaatctgtgttttctgatactagtcattaagctagatcaaggaagctgggtttgtttccactgagggtccgttcggttcttgggggactggccacccggaactattcctagccagattggttatctaatttatataaggtttgattagatggaataattccgggccaaacgaacaggccctgaagccgccgctgccgacctggtaaggtccaagtccgaatggtccgctgccgacctggtaaggtccaagtccgaatggtgggaagagaatcgtccttgccgtagttgcaagaattttatgaaaactcggatggtttgagcctttgaggtcgaaaccagagggtacttttctttggggttagcttggaatgtgaaactgtggacggggacggcagctttcatttgtactatttaattaaccagcgatgatcgattgagcaagtcagacagtgggactggctggtacacgcagaagatggagaaaaggaacgaattggtcttggttcatttgatcatctctggaaacaaagaaaaaagcacgcccgtgaaatctccgcgaaacatgtacaaaatttccgaaactacacgacagccgaagcaaagaaggcgccggcggtcaccagaaggcgcgcttccgccggaaacgcctggccgtggcgaggaggccaacgccgaggcacacggcccacacgcccacctccatcgcccaccgcaccgtctccatctcgacctcctgctcctcctcctcctccgcgtccccgaccacctcccacccgtcgtcgtcgcactcgcagcggcaccagccgccgaggcccgtggtggcgtcctcctccggtatcccctccagccgggtggctccgcaccgcatccggccccggccggccgcgcgggccctgtcccgcatcagcacgccgccctccgcgagcaccaccacctccgcgacgcacacctccggcgaggccggcgcccggcggcactccacgcgccaccccccctcgcgccgcgcggagaagacgccctccgccgcgacctcctccccggcggcggcggcgagcacctcgaaccgcgcgccctcggcggcggcgacgcggtcggcgctcgcgtacgcgtcggcggcgacccggcggagcgtgaccttggcgggcgcggctggcgggagcgcgcggccgttgagtcccagcgccgcgcccccgatggccgggtggtaggccagcgtgagctccgcgggcgtcgtggcggagcaggaggagaggcggaggtagaaagcgcggatgtcgaggcgccgggacgggggcgggcggaggaagccgccctctatcgccgtggcgcggcacatcgcggaaaccggtcgctgaaccagtgaacctgcgtcgtcttggtggtgtcctcgtgatcaccgaagcgcaaggcagcttgtgctctgctgctgggatcttttgctaataaagcggagcgcgggggaggtaggcgtcgggtcgtcccgtggttttccgcgtggcgcccggggttttcttttcgtggctgagtcggccgaaacgaagaggagcacacggtttggtttgctgtgggttcccgacttttgtctctgcctgcagcagctggggctggggctgggctgggcagcgtttagctgacgtctgcgtgatagagaccgtcgtccaggctgggtgcccgactgcacgggacaggtgtgcactgagcctgaaac

SEQ ID NO: 6193 - DNA, 1278 bp, Zea Mays
gcggcgaggtcggtggcggagggctggaggcctccaaatatccgagaagtccggcccatagtccctctcagaccattggtcgaagctgttggtcggcggcgccagaaatatcagacgcgaggggggacctcttcgcaaaatatatagcccgcaccgaggccaagcctgccgtgccgtgccgtgccgtgcgcgacccaaaccctgtgcagtgctcccatcggattcttgcctcccacgccgccgccgccgccgccgccaccgccggattccgcgatggccgacccgcggccgtactccacgatgtacgggaccgacgaccgacgcgacgccgccatcccggcctccgcctccgagcgccgcctttacaacccgtaccaggacctcaacatgccctaccggcagctctacgacctccccacctccccggagttcctcttccaggaggaggcggccgcgcagcgccggtcctggggcgagaacctcacctactacacgggcgtcggctacctcggcggcgccgtggctggggccacgctggggctccgcgacgccgcccgcggcgccgagcccggcgagcccgccaagatccgcgccaaccgcgtcctcaactcctgcggctcctcgggccgccgcgtcggtaacacgctcggggtcatcggcctcatgtacgccgggatcgagagcgccatggtcgccgcgcgcgaccgcgacgactggatcaacagcgtcgcggccggcctaggcaccggcgcgctcttccgggccgccaacgggccgcgctcggcggtcgtcgccggggccgttggtggcgttctagctggcgccgccgcggccgccaagcaggttgggaagagatacgtccctgcgctctgaatcccattgcggtactctccctgctcttgctgccgtgatcaaagtcaaaaccaattcgtcgcttggatgtcgtttctttaattatttgggaggaggcatgttcttctcaacactcctatatattgttgacagccatatgcttgtactacttatgtcaacgatctgctctcatcagatcacgaaagttttgatctgccttgcaatgtaacattagctgctagctggtagcgacacagtaatactgccttttgcattatgctggagaattcatgacattgtgaaatgtgtcgctagattgtcgccagtgttctatcactatgttttttgccttatatcacttggtgtatgcttttatggcagacacgagtaagtataaaagtggggctgtatcaagagactatagag

SEQ ID NO: 6194 - DNA, 2570 bp, Zea Mays
gcaagctaccatttccagcattctaagcttatatgaggatcttgtggcagcatgggtaccagccaagcatgtatggttgcggaaccgtccattgggcaaggaactgatttctgctttaggaaaacaaaggcttttcagcttttgttcatatgacttttcatttctacattttggcacatccgcggaggttcttgatcacctggcgggttcctattctggacttgtaggtcgaaggcatatgtgttcactaccagagaccactgcttgtgatattgcagcgacagctattattttgtgtacaaagatttcttctggagtctcaataggagaggatacattggtttatgattcagtactttccggtagaatacggatcggctcgcaatgtattattgtctcggtgaatatacgtgagtttgatggtagcgcttgtttcacattacctgatcgacattgcctctgggaagtacctttggcaaactctgcggggagggttttggtttactgtggtcttcacgataatccaaaagtttctattcagaaggatgggacgttctgtggcaagccatggataaatgtcttggaagatcttagaatccaggatacggatctgtggggttcaactagccaggacaaatgcttatggactgcaaagctttttcctgtcatgtctctcccagaaatgcttaatgtgggcatgtggcttatgggatcagaatgcgacccagatgggagaatagcttccttgtggcaaaaatcacagaggatcagcctggaagagctgcatcgtgctattgattacagacaactttgcaccgattcgagcaagcatcaggcaaatcttgcagctgacatagccaaggcttgcatgaactatggcttactcggtcgtaatctgtttcaactttgtgaggaaatgttacaaaaagatacatgtttagcagtctatgaagaattactttcattttttccaagtcacagtgaacagtatcctggggttcttcctcagagcagagaatatcaggtcaagatggatctgcttagagcttctggagatctttccactgcatgtacggtggaagagaaagtgtgggcttccattgcaagcgaaactgcgtcggcgataaaatatggatccaaagagccatctagcggcaagatgtcttcaaaccatgaaagcttgcatccaaggaagactgttgtagaattaccagtccgtgtggactttgttgggggttggagtgatacacctccgtggagcttggagcgtccaggttgtgttttgaatatggcgataagtttgcaaggaagccttccagtcggtgctatgatagagacaacagaggaccaccttggagtaaggatcgaagacgacgctggtagacatgtttatatcgataatctggcatctatttcttctccattcaaagaaagtgatccattccgtctcgtcaagtccgctcttattgttactggaatccttggccacgagatattgtcgaaatcaggcctgaacatcaggacatggtcgaatgttcctcgtggaagtggactgggaacttctagtatattatcagctgctgttgttaagggactgttccaagtgatggaggacgacgaaagtgacgacagtgttgctagagccgtgctagtggtggaacaaataatgggcacaggtggtgggtggcaggaccaaattgggggcctatatcctgggatcaagtgcacccagagttttccaggacaaccgttacggttgcaagttgttccagtgctgaccactcctcagctgatccaggaattagaagaacgtctcctgattgtattcactggccaagtaaggctcgcccaccaagtcctgcagaaagtcgtgactcggtacctccgccgcgacagcatcctgatatccagcatcaagaggctagcggaactagccaagatcgggagagaggcgctgatgaacggtgagctggacgagctcggcggcatcctgctggaggcctggaggttgcaccaggagctggaccctttctgcagcaacaggcccgtggacgagctgttcgccttcgccgacccttactgctgcgggtacaaactggtcggagctggtggcggtggcttcgcgttgctgcttgccaagaacccgagctgcgccagagagcttcgacgggcgcttgaagagtccgacaccttcgatgtgaaggtgtacgattggaacgtcgccatgccacggtgaagagtagctggctcaaagggattgtgtacactgtattgctaccatagacgctgttatcattttttgtgtgtcagacgacctagggtggtggggtggttgtgtgactctgatccaaaagtcggctgttatcaagtgagcaggctgtcggtttggttggcttttccaacgcggtcatgccaaaaaaatcgctgatccaatgtctcgtcaaacagttcccgtttcgtccaggcggacggcggacaccacagcagggtactacggtactgttgccggatcgatggcgatagtaggtgtcgttgtcgtcaactcctccggccaaacccgtccttttttt

SEQ ID NO: 6195 - DNA, 3976 bp, Zea Mays
ctccggtagaactagaagagagactaacccagctgcggcccgatccgagtccgggggcccaaggcgcgggaggcgacggcgatggacgcgcgcccgcgacggcggagggcgcgcacggcggaggaggcggcggcgacgctgcgaaaggcgtggtgccggctgcggctgtccgcgcgcgacccggcgcgcgtgccgccctgggacgccgtcgtgctcacggccgccagccctaagcaggccgcgctctacaaccgccagctcgagcgcgcccgcgccctcggccgcttcccggcctccaccgcggccatcgccgtccccgaccccgacggcgcccgcatcggctccggcgccgccacgctccacgccgtcgctgcccttgttcgccacctcgccgcccaggcttccaaggaagagatcggcgaattccttctcgaaggcggaaatggtggttcgggggatgaggccacgatcgccgcggcagcgggattcatggcgaagaagcacgtgctcttgcttcacgccgggggcgacagcaagagggttccgtgggcgaaccccatggggaaggcgtttctccctctgccttacctggccggggacaatcccgatggacctgttccgctcctgttcgatcacattcttgccatctcctccagtgcaaggcaagctttcaacaaccaaggttgtagcccagacaaaattgactgatcagtgcacttatacaatgcccaaagaaaagaagggactgccacatctgtttccgtttctaattgcccgtagatgaccaggtgggatcttcataatgaccggggatgttctcccgtgctttgatgcctccaatctatatcttcctgacgatgctgcttgtattgtgacggtgcccaccactctggatgtggctgctaatcatggagtggttgtagcatcaaaggacgctgggatcgatcaggagacctactctctttgcttggttgatgatctcctgcagaagccgacagtgagcgagcttgcagagggccatgccatcctagatgacgggagagcattgcttgacacaggaataatagccgcaacgggtaaagcatggcaggaccttgttacccttgcacattcatctagccattccgtggttaaggagctcatgacttgtaacaaagagctaagcttatatgaggatcttgtggcagcatgggtaccagccaagcatgtatggttgcggaaccgtccattgggcaaggaactgatttctgctttaggaaaacaaaggcttttcagcttttgttcatatgacttttcatttctacattttggcacatccgcggaggttcttgatcacctggcgggttcctattctggacttgtaggtcgaaggcatatgtgttcactaccagagaccactgcttgtgatattgcagcgacagctattattttgtgtacaaagatttcttctggagtctcaataggagaggatacattggtttatgattcagtactttccggtagaatacggatcggctcgcaatgtattattgtctcggtgaatatacgtgagtttgatggtagcgcttgtttcacattacctgatcgacattgcctctgggaagtacctttggcaaactctgcggggagggttttggtttactgtggtcttcacgataatccaaaagtttctattcagaaggatgggacgttctgtggcaagccatggataaatgtcttggaagatcttagaatccaggatacggatctgtggggttcaactagccaggacaaatgcttatggactgcaaagctttttcctgtcatgtctctcccagaaatgcttaatgtgggcatgtggcttatgggatcagaatgcgacccagatgggagaatagcttccttgtggcaaaaatcacagaggatcagcctggaagagctgcatcgtgctattgattacagacaactttgcaccgattcgagcaagcatcaggcaaatcttgcagctgacatagccaaggcttgcatgaactatggcttactcggtcgtaatctgtttcaactttgtgaggaaatgttacaaaaagatacatgtttagcagtctatgaagaattactttcattttttccaagtcacagtgaacagtatcctggggttcttcctcagagcagagaatatcaggtcaagatggatctgcttagagcttctggagatctttccactgcatgtacggtggaagagaaagtgtgggcttccattgcaagcgaaactgcgtcggcgataaaatatggatccaaagagccatctagcggcaagatgtcttcaaaccatgaaagcttgcatccaaggaagactgttgtagaattaccagtccgtgtggactttgttgggggttggagtgatacacctccgtggagcttggagcgtccaggttgtgttttgaatatggcgataagtttgcaaggaagccttccagtcggtgctatgatagagacaacagaggaccaccttggagtaaggatcgaagacgacgctggtagacatgtttatatcgataatctggcatctatttcttctccattcaaagaaagtgatccattccgtctcgtcaagtccgctcttattgttactggaatccttggccacgagatattgtcgaaatcaggcctgaacatcaggacatggtcgaatgttcctcgtggaagtggactgggaacttctagtatattatcagctgctgttgttaagggactgttccaagtgatggaggacgacgaaagtgacgacagtgttgctagagccgtgctagtggtggaacaaataatgggcacaggtggtgggtggcaggaccaaattgggggcctatatcctgggatcaagtgcacccagagttttccaggacaaccgttacggttgcaagttgttccagtgctgaccactcctcagctgatccaggaattagaagaacgtctcctgattgtattcactggccaagtaagttcatcatttctgcttgaagcataaaattcatttttttactccattgcttgtgaccctgcacgcgctatatctagaagtgaatgaactaaagcactaatatgtccatctttctcaaacttgtatctagcataatgaggtcctaggtattaggcatccacaattgctgttttcattgatggtggccacgatgtccatgtgccgttatgattgttgtttaacgtcttcgacaatattgctgttcctccctaaacaaatctgtataggtaaggctcgcccaccaagtcctgcagaaagtcgtgactcggtacctccgccgcgacagcatcctgatatccagcatcaagaggctagcggaactagccaagatcgggagagaggcgctgatgaacggtgagctggacgagctcggcggcatcctgctggaggcctggaggttgcaccaggagctggaccctttctgcagcaacaggcccgtggacgagctgttcgccttcgccgacccttactgctgcgggtacaaactggtcggagctggtggcggtggcttcgcgttgctgcttgccaagaacccgagctgcgccagagagcttcgacgggcgcttgaagagtccgacaccttcgatgtgaaggtgtacgattggaacgtcgccatgccacggtgaagagtagctggctcaaagggattgtgtacactgtattgctaccatagacgctgttatcattttttgtgtgtcagacgacctagggtggtggggtggttgtgtgactctgatccaaaagtcggctgttatcaagtgagcaggctgtcggtttggttggcttttccaacgcggtcatgccaaaaaaatcgctgatccaatgtctcgtcaaacagttcccgtttcgtccaggcggacggcggacaccacagcagggtactacggtactgttgccggatcgatggcgatagtaggtgtcgttgtcgtcaactcctccggccaaacccgtccttttttt

SEQ ID NO: 6196 - DNA, 3687 bp, Zea Mays
ctgataaccagtcaatgctccggtagaactagaagagagactaacccagctgcggcccgatccgagtccgggggcccaaggcgcgggaggcgacggcgatggacgcgcgcccgcgacggcggagggcgcgcacggcggaggaggcggcggcgacgctgcgaaaggcgtggtgccggctgcggctgtccgcgcgcgacccggcgcgcgtgccgccctgggacgccgtcgtgctcacggccgccagccctaagcaggccgcgctctacaaccgccagctcgagcgcgcccgcgccctcggccgcttcccggcctccaccgcggccatcgccgtccccgaccccgacggcgcccgcatcggctccggcgccgccacgctccacgccgtcgctgcccttgttcgccacctcgccgcccaggcttccaaggaagagatcggcgaattccttctcgaaggcggaaatggtggttcgggggatgaggccacgatcgccgcggcagcgggattcatggcgaagaagcacgtgctcttgcttcacgccgggggcgacagcaagagggttccgtgggcgaaccccatggggaaggcgtttctccctctgccttacctggccggggacaatcccgatggacctgttccgctcctgttcgatcacattcttgccatctcctccagtgcaaggcaagctttcaacaaccaaggttgtagcccagacaaaattgactgatcagtgcacttatacaatgcccaaagaaaagaagggactgccacatctgtttccgtttctaattgcccgtagatgaccaggtgggatcttcataatgaccggggatgttctcccgtgctttgatgcctccaatctatatcttcctgacgatgctgcttgtattgtgacggtgcccaccactctggatgtggctgctaatcatggagtggttgtagcatcaaaggacgctgggatcgatcaggagacctactctctttgcttggttgatgatctcctgcagaagccgacagtgagcgagcttgcagagggccatgccatcctagatgacgggagagcattgcttgacacaggaataatagccgcaacgggtaaagcatggcaggaccttgttacccttgcacattcatctagccattccgtggttaaggagctcatgacttgtaacaaagaggcaagctaccatttccagcattctaagcttatatgaggatcttgtggcagcatgggtaccagccaagcatgtatggttgcggaaccgtccattgggcaaggaactgatttctgctttaggaaaacaaaggcttttcagcttttgttcatatgacttttcatttctacattttggcacatccgcggaggttcttgatcacctggcgggttcctattctggacttgtaggtcgaaggcatatgtgttcactaccagagaccactgcttgtgatattgcagcgacagctattattttgtgtacaaagatttcttctggagtctcaataggagaggatacattggtttatgattcagtactttccggtagaatacggatcggctcgcaatgtattattgtctcggtgaatatacgtgagtttgatggtagcgcttgtttcacattacctgatcgacattgcctctgggaagtacctttggcaaactctgcggggagggttttggtttactgtggtcttcacgataatccaaaagtttctattcagaaggatgggacgttctgtggcaagccatggataaatgtcttggaagatcttagaatccaggatacggatctgtggggttcaactagccaggacaaatgcttatggactgcaaagctttttcctgtcatgtctctcccagaaatgcttaatgtgggcatgtggcttatgggatcagaatgcgacccagatgggagaatagcttccttgtggcaaaaatcacagaggatcagcctggaagagctgcatcgtgctattgattacagacaactttgcaccgattcgagcaagcatcaggcaaatcttgcagctgacatagccaaggcttgcatgaactatggcttactcggtcgtaatctgtttcaactttgtgaggaaatgttacaaaaagatacatgtttagcagtctatgaagaattactttcattttttccaagtcacagtgaacagtatcctggggttcttcctcagagcagagaatatcaggtcaagatggatctgcttagagcttctggagatctttccactgcatgtacggtggaagagaaagtgtgggcttccattgcaagcgaaactgcgtcggcgataaaatatggatccaaagagccatctagcggcaagatgtcttcaaaccatgaaagcttgcatccaaggaagactgttgtagaattaccagtccgtgtggactttgttgggggttggagtgatacacctccgtggagcttggagcgtccaggttgtgttttgaatatggcgataagtttgcaaggaagccttccagtcggtgctatgatagagacaacagaggaccaccttggagtaaggatcgaagacgacgctggtagacatgtttatatcgataatctggcatctatttcttctccattcaaagaaagtgatccattccgtctcgtcaagtccgctcttattgttactggaatccttggccacgagatattgtcgaaatcaggcctgaacatcaggacatggtcgaatgttcctcgtggaagtggactgggaacttctagtatattatcagctgctgttgttaagggactgttccaagtgatggaggacgacgaaagtgacgacagtgttgctagagccgtgctagtggtggaacaaataatgggcacaggtggtgggtggcaggaccaaattgggggcctatatcctgggatcaagtgcacccagagttttccaggacaaccgttacggttgcaagttgttccagtgctgaccactcctcagctgatccaggaattagaagaacgtctcctgattgtattcactggccaacatcctgatatccagcatcaagaggctagcggaactagccaagatcgggagagaggcgctgatgaacggtgagctggacgagctcggcggcatcctgctggaggcctggaggttgcaccaggagctggaccctttctgcagcaacaggcccgtggacgagctgttcgccttcgccgacccttactgctgcgggtacaaactggtcggagctggtggcggtggcttcgcgttgctgcttgccaagaacccgagctgcgccagagagcttcgacgggcgcttgaagagtccgacaccttcgatgtgaaggtgtacgattggaacgtcgccatgccacggtgaagagtagctggctcaaagggattgtgtacactgtattgctaccatagacgctgttatcattttttgtgtgtcagacgacctagggtggtggggtggttgtgtgactctgatccaaaagtcggctgttatcaagtgagcaggctgtcggtttggttggcttttccaacgcggtcatgccaaaaaaatcgctgatccaatgtctcgtcaaacagttcccgtttcgtccaggcggacggcggacaccacagcagggtactacggtactgttgccggatcgatggcgatagtaggtgtcgttgtcgtcaactcctccggccaaacccgtccttttttt

SEQ ID NO: 6197 - DNA, 3870 bp, Zea Mays
cagcttcccaactgataaccagtcaatgctccggtagaactagaagagagactaacccagctgcggcccgatccgagtccgggggcccaaggcgcgggaggcgacggcgatggacgcgcgcccgcgacggcggagggcgcgcacggcggaggaggcggcggcgacgctgcgaaaggcgtggtgccggctgcggctgtccgcgcgcgacccggcgcgcgtgccgccctgggacgccgtcgtgctcacggccgccagccctaagcaggccgcgctctacaaccgccagctcgagcgcgcccgcgccctcggccgcttcccggcctccaccgcggccatcgccgtccccgaccccgacggcgcccgcatcggctccggcgccgccacgctccacgccgtcgctgcccttgttcgccacctcgccgcccaggcttccaaggaagagatcggcgaattccttctcgaaggcggaaatggtggttcgggggatgaggccacgatcgccgcggcagcgggattcatggcgaagaagcacgtgctcttgcttcacgccgggggcgacagcaagagggttccgtgggcgaaccccatggggaaggcgtttctccctctgccttacctggccggggacaatcccgatggacctgttccgctcctgttcgatcacattcttgccatctcctccagtgcaaggcaagctttcaacaaccaaggtgggatcttcataatgaccggggatgttctcccgtgctttgatgcctccaatctatatcttcctgacgatgctgcttgtattgtgacggtgcccaccactctggatgtggctgctaatcatggagtggttgtagcatcaaaggacgctgggatcgatcaggagacctactctctttgcttggttgatgatctcctgcagaagccgacagtgagcgagcttgcagagggccatgccatcctagatgacgggagagcattgcttgacacaggaataatagccgcaacgggtaaagcatggcaggaccttgttacccttgcacattcatctagccattccgtggttaaggagctcatgacttgtaacaaagagcatgggtaccagccaagcatgtatggttgcggaaccgtccattgggcaaggaactgatttctgctttaggaaaacaaaggcttttcagcttttgttcatatgacttttcatttctacattttggcacatccgcggaggttcttgatcacctggcgggttcctattctggacttgtaggtcgaaggcatatgtgttcactaccagagaccactgcttgtgatattgcagcgacagctattattttgtgtacaaagatttcttctggagtctcaataggagaggatacattggtttatgattcagtactttccggtagaatacggatcggctcgcaatgtattattgtctcggtgaatatacgtgagtttgatggtagcgcttgtttcacattacctgatcgacattgcctctgggaagtacctttggcaaactctgcggggagggttttggtttactgtggtcttcacgataatccaaaagtttctattcagaaggatgggacgttctgtggcaagccatggataaatgtcttggaagatcttagaatccaggatacggatctgtggggttcaactagccaggacaaatgcttatggactgcaaagctttttcctgtcatgtctctcccagaaatgcttaatgtgggcatgtggcttatgggatcagaatgcgacccagatgggagaatagcttccttgtggcaaaaatcacagaggatcagcctggaagagctgcatcgtgctattgattacagacaactttgcaccgattcgagcaagcatcaggcaaatcttgcagctgacatagccaaggcttgcatgaactatggcttactcggtcgtaatctgtttcaactttgtgaggaaatgttacaaaaagatacatgtttagcagtctatgaagaattactttcattttttccaagtcacagtgaacagtatcctggggttcttcctcagagcagagaatatcaggtcaagatggatctgcttagagcttctggagatctttccactgcatgtacggtggaagagaaagtgtgggcttccattgcaagcgaaactgcgtcggcgataaaatatggatccaaagagccatctagcggcaagatgtcttcaaaccatgaaagcttgcatccaaggaagactgttgtagaattaccagtccgtgtggactttgttgggggttggagtgatacacctccgtggagcttggagcgtccaggttgtgttttgaatatggcgataagtttgcaaggaagccttccagtcggtgctatgatagagacaacagaggaccaccttggagtaaggatcgaagacgacgctggtagacatgtttatatcgataatctggcatctatttcttctccattcaaagaaagtgatccattccgtctcgtcaagtccgctcttattgttactggaatccttggccacgagatattgtcgaaatcaggcctgaacatcaggacatggtcgaatgttcctcgtggaagtggactgggaacttctagtatattatcagctgctgttgttaagggactgttccaagtgatggaggacgacgaaagtgacgacagtgttgctagagccgtgctagtggtggaacaaataatgggcacaggtggtgggtggcaggaccaaattgggggcctatatcctgggatcaagtgcacccagagttttccaggacaaccgttacggttgcaagttgttccagtgctgaccactcctcagctgatccaggaattagaagaacgtctcctgattgtattcactggccaagtaagttcatcatttctgcttgaagcataaaattcatttttttactccattgcttgtgaccctgcacgcgctatatctagaagtgaatgaactaaagcactaatatgtccatctttctcaaacttgtatctagcataatgaggtcctaggtattaggcatccacaattgctgttttcattgatggtggccacgatgtccatgtgccgttatgattgttgtttaacgtcttcgacaatattgctgttcctccctaaacaaatctgtataggtaaggctcgcccaccaagtcctgcagaaagtcgtgactcggtacctccgccgcgacagcatcctgatatccagcatcaagaggctagcggaactagccaagatcgggagagaggcgctgatgaacggtgagctggacgagctcggcggcatcctgctggaggcctggaggttgcaccaggagctggaccctttctgcagcaacaggcccgtggacgagctgttcgccttcgccgacccttactgctgcgggtacaaactggtcggagctggtggcggtggcttcgcgttgctgcttgccaagaacccgagctgcgccagagagcttcgacgggcgcttgaagagtccgacaccttcgatgtgaaggtgtacgattggaacgtcgccatgccacggtgaagagtagctggctcaaagggattgtgtacactgtattgctaccatagacgctgttatcattttttgtgtgtcagacgacctagggtggtggggtggttgtgtgactctgatccaaaagtcggctgttatcaagtgagcaggctgtcggtttggttggcttttccaacgcggtcatgccaaaaaaatcgctgatccaatgtctcgtcaaacagttcccgtttcgtccaggcggacggcggacaccacagcagggtactacggtactgttgccggatcgatggcgatagtaggtgtcgttgtcgtcaactcctccggccaaacccgtccttttttt

SEQ ID NO: 6198 - DNA, 2813 bp, Zea Mays
atggcgtccccgtgccacgaggaatctgggagagggagaggacccatcgccatggccatggccagaggtcgcatcgccatgggtggcagtggcctccactgtgcatctgcaatccactgcggaaagagaagaggaacttgttgctctacgcaatttgcggatactttagggaatcgtgattcgaacaatatttcattagagaatgccaaatcatacaagatagaagcattcaaggctcaaatgcagctaccattcccgaaacttttgtgtctaatgacgatgcaagctgccaaagatccgcgcgtcgacgagaggggcggagtcggcgacgagcagatggccggaggcggccccgccgcgtcggcgctttcaagcccctggagggctctgctccagcgagcgctggacgccaacgcccacctcaggctacggtgggcgccgccggcaggccggcgaaccgcaccgtcgtgttcaggggttttcaggaactctgtgataagattcagattaacacggacgcccgaaccaacaagattggtgagatcaagagctgcccctttggtgagatttgttggtacttcacagatagctgggagcaattccgtatcagtggcagcatagatgtgattgatgcttctactacagaccctgccaagctccagcacaaggagaaagcatggttttcaagttcagtgaagtcgagatcgcagtacttaggaccacagccaggcattccggttctagatgatgagcatgttaaggacgttcatctcgatcctttagctggcccagtagatgccttttgccttctggttcttgatccggaaaaggttgattatttgaatctgaaaagcaatcaaaggttgatctttacaagaagacaaaaggatgatggatccaatgattggatggcagtaaaaaagataaagactgtaaggtatttaggaaggagtcaaagcaggctgtggctattcatgtttgtcaaagccgttggtcttgagatttgtttgaagatgagcgtggctcgtgtttgccactcgtgcttgtttttgtgcataagttatctgtgtgagcagaatgcagagacagcatgtgttggctttaataaactaccagcatattccatgggaagtattaaagctgtgtctacacttgcaattgcaacgatgtgctgagaacaagccgttggatggttggagaacttcaggtccgctgcgcaagtcatgaatgtggtcttggaaatcaaagctgattgctgttatcctgcaaaaaccgtcaggcagacacaccacatgatctgccctttttatctaacagtgcagactgccgagcaataaacacatattgattaccgaaagaaccctttggctgtagtgggcagtgggctcctgattatgaacagttccagatgaaagcgtgctaatggcattatgtcgttgcaaaagtaaatggtagtgaactgtcgcagccatgttttgtctgaggccccacccagttgcaaagcgtaagtgttgatgccaaatctagaacttgtcacgggggaccgaatgactattggttcatcttgactactaccgcgtctcaatcatctggcactcgagaggaatagataatcatggtcacctttgaaggccagtcaaaatgctactccattgcggctgattggagaggtcaaaggtggctgttaaattggatattcggcttttgcatcgaggacttttggcagccttttcttcctccatctctctactccatctggtattgtggcggtgccaaacataagtcatggctcatcacttttgcaaagcatgcaagggacatgtttgggcataaagcagatgtttgaggtcaacagcaagtctgagctgcaagttgttaatggtgggttcgttaaaaaacgactgtgaaggccttctctggtttcgtctttggacagtggtccctttttgcctattgggcctttactggtctaaaggcctggaagatgtgggccatgcacagcttggcatactcacctagtggataactctcggtctccactctgcagaaggtgttctgaaggcctggaagatgtgggccatgcacagcttggcatactcacctagtgggtaacactcgttctccactctgcagaagatagggtgtggttatcatgcacaaacacaacaagaggaaggaagaattgcagatagcggcggcacgctctccatccgtcccggtgtcccacaaagccaagcagcgagttcctggagacacgggcacccatccaagggccaggatccaaatgcctggcaatgattgggatgggcgggggtcatggtcatcgccccgcccgtgagaccagaaagaaactcatcagaatgggatggaagggaaggatcgcccactcagtcatggtacccgctcttccttttagtcggggcctgtgctgtgtcctcctggtcgatgcatccaacggaacaagacaattcgtccactcaactcgtgcgtgctggtacttgcattgcatgctgccagtgcgccgtgcatgtttggtgacaccagcggataataaactagagcctcgcccggcgacggagacggtggacggagcagagccgcagagcacgcgtatctcaccgacaccagtgcatatgatgggcatgccatgctggtgacatactgctgtggtggtgcaggaggacaaaaggcaagcgcacgtcgtagctagcgtactgttccttccgccaccggtcgacaccaaagtacgcagcacaggccatgtaataatggtacagtacagcttcaatgttcagagagagtccagacttgag

SEQ ID NO: 6199 - DNA, 3019 bp, Zea Mays
atggcgtccccgtgccacgaggaatctgggagagggagaggacccatcgccatggccatggccagaggtcgcatcgccatgggtggcagtggcctccactgtgcatctgcaatccactgcggaaagagaagaggaacttgttgctctacgcaatttgcggatactttagggaatcgtgattcgaacaatatttcattagagaatgccaaatcatacaagatagaagcattcaaggctcaaatgcagctaccattcccgaaacttttgtgtctaatgacgatgcaagctgccaaagatccgcgcgtcgacgagaggggcggagtcggcgacgagcagatggccggaggcggccccgccgcgtcggcgctttcaagcccctggagggctctgctccagcgagcgctggacgccaacgcccacctcaggctacggtgggcgccgccggcaggccggcgaaccgcaccgtcgtgttcaggggttttcaggaactctgtgataagattcagattaacacggacgcccgaaccaacaaggtgggggttgctgtgctctgcgccgattgacatttttttttctgctcgctgataccatgtgtcattttgattcaacagattggtgagatcaagagctgcccctttggtgaggtgtgctgtgtagaacactagaactgccacatgtacatcactcaagatggcaagttgatttagccctgcccctgaacttttgtgtaaccctgcagatttgttggtacttcacagatagctgggagcaattccgtatcagtggcagcatagatgtgattgatgcttctactacagaccctgccaagctccagcacaaggagaaagcatggttttcaagttcagtgaagtcgagatcgcagtacttaggaccacagccaggcattccggttctagatgatgagcatgttaaggacgttcatctcgatcctttagctggcccagtagatgccttttgccttctggttcttgatccggaaaaggttgattatttgaatctgaaaagcaatcaaaggttgatctttacaagaagacaaaaggatgatggatccaatgattggatggcagtaaaaggatttgttattttttgttaccctcaaatatagaagataaagactgtaaggtatttaggaaggagtcaaagcaggctgtggctattcatgtttgtcaaagccgttggtcttgagatttgtttgaagatgagcgtggctcgtgtttgccactcgtgcttgtttttgtgcataagttatctgtgtgagcagaatgcagagacagcatgtgttggctttaataaactaccagcatattccatgggaagtattaaagctgtgtctacacttgcaattgcaacgatgtgctgagaacaagccgttggatggttggagaacttcaggtccgctgcgcaagtcatgaatgtggtcttggaaatcaaagctgattgctgttatcctgcaaaaaccgtcaggcagacacaccacatgatctgccctttttatctaacagtgcagactgccgagcaataaacacatattgattaccgaaagaaccctttggctgtagtgggcagtgggctcctgattatgaacagttccagatgaaagcgtgctaatggcattatgtcgttgcaaaagtaaatggtagtgaactgtcgcagccatgttttgtctgaggccccacccagttgcaaagcgtaagtgttgatgccaaatctagaacttgtcacgggggaccgaatgactattggttcatcttgactactaccgcgtctcaatcatctggcactcgagaggaatagataatcatggtcacctttgaaggccagtcaaaatgctactccattgcggctgattggagaggtcaaaggtggctgttaaattggatattcggcttttgcatcgaggacttttggcagccttttcttcctccatctctctactccatctggtattgtggcggtgccaaacataagtcatggctcatcacttttgcaaagcatgcaagggacatgtttgggcataaagcagatgtttgaggtcaacagcaagtctgagctgcaagttgttaatggtgggttcgttaaaaaacgactgtgaaggccttctctggtttcgtctttggacagtggtccctttttgcctattgggcctttactggtctaaaggcctggaagatgtgggccatgcacagcttggcatactcacctagtggataactctcggtctccactctgcagaaggtgttctgaaggcctggaagatgtgggccatgcacagcttggcatactcacctagtgggtaacactcgttctccactctgcagaagatagggtgtggttatcatgcacaaacacaacaagaggaaggaagaattgcagatagcggcggcacgctctccatccgtcccggtgtcccacaaagccaagcagcgagttcctggagacacgggcacccatccaagggccaggatccaaatgcctggcaatgattgggatgggcgggggtcatggtcatcgccccgcccgtgagaccagaaagaaactcatcagaatgggatggaagggaaggatcgcccactcagtcatggtacccgctcttccttttagtcggggcctgtgctgtgtcctcctggtcgatgcatccaacggaacaagacaattcgtccactcaactcgtgcgtgctggtacttgcattgcatgctgccagtgcgccgtgcatgtttggtgacaccagcggataataaactagagcctcgcccggcgacggagacggtggacggagcagagccgcagagcacgcgtatctcaccgacaccagtgcatatgatgggcatgccatgctggtgacatactgctgtggtggtgcaggaggacaaaaggcaagcgcacgtcgtagctagcgtactgttccttccgccaccggtcgacaccaaagtacgcagcacaggccatgtaataatggtacagtacagcttcaatgttcagagagagtccagacttgag

SEQ ID NO: 6200 - DNA, 2984 bp, Zea Mays
atggcgtccccgtgccacgaggaatctgggagagggagaggacccatcgccatggccatggccagaggtcgcatcgccatgggtggcagtggcctccactgtgcatctgcaatccactgcggaaagagaagaggaacttgttgctctacgcaatttgcggatactttagggaatcgtgattcgaacaatatttcattagagaatgccaaatcatacaagatagaagcattcaaggctcaaatgcagctaccattcccgaaacttttgtgtctaatgacgatgcaagctgccaaagatccgcgcgtcgacgagaggggcggagtcggcgacgagcagatggccggaggcggccccgccgcgtcggcgctttcaagcccctggagggctctgctccagcgagcgctggacgccaacgcccacctcaggcactccacctacttccaactcgtacgcttcgatcgcctgtttgccttcctccggattgggggaaacgagattggtgagatcaagagctgcccctttggtgagatttgttggtacttcacagatagctgggagcaattccgtatcagtggcagcatagatgtgattgatgcttctactacagaccctgccaagctccagcacaaggagaaagcatggttttcaagttcagtgaagtcgagatcgcagtacttaggaccacagccaggcattccggttctagatgatgagcatgttaaggacgttcatctcgatcctttagctggcccagtagatgccttttgccttctggttcttgatccggaaaaggttgattatttgaatctgaaaagcaatcaaaggttgatctttacaagaagacaaaaggatgatggatccaatgattggatggcagtaaaagttagtccttaagctgctgcaaaaactttatttgtgagcttctcttggtaactagactatcatgattcttctgtgttttcatatcatttgaaatgttaggtgcatatcattatgtatatttgagaggccttttcatagtcatacatttatatattgggaatgctttgtaatctcagggatttgttattttttgttaccctcaaatatagaagataaagactgtaaggtatttaggaaggagtcaaagcaggctgtggctattcatgtttgtcaaagccgttggtcttgagatttgtttgaagatgagcgtggctcgtgtttgccactcgtgcttgtttttgtgcataagttatctgtgtgagcagaatgcagagacagcatgtgttggctttaataaactaccagcatattccatgggaagtattaaagctgtgtctacacttgcaattgcaacgatgtgctgagaacaagccgttggatggttggagaacttcaggtccgctgcgcaagtcatgaatgtggtcttggaaatcaaagctgattgctgttatcctgcaaaaaccgtcaggcagacacaccacatgatctgccctttttatctaacagtgcagactgccgagcaataaacacatattgattaccgaaagaaccctttggctgtagtgggcagtgggctcctgattatgaacagttccagatgaaagcgtgctaatggcattatgtcgttgcaaaagtaaatggtagtgaactgtcgcagccatgttttgtctgaggccccacccagttgcaaagcgtaagtgttgatgccaaatctagaacttgtcacgggggaccgaatgactattggttcatcttgactactaccgcgtctcaatcatctggcactcgagaggaatagataatcatggtcacctttgaaggccagtcaaaatgctactccattgcggctgattggagaggtcaaaggtggctgttaaattggatattcggcttttgcatcgaggacttttggcagccttttcttcctccatctctctactccatctggtattgtggcggtgccaaacataagtcatggctcatcacttttgcaaagcatgcaagggacatgtttgggcataaagcagatgtttgaggtcaacagcaagtctgagctgcaagttgttaatggtgggttcgttaaaaaacgactgtgaaggccttctctggtttcgtctttggacagtggtccctttttgcctattgggcctttactggtctaaaggcctggaagatgtgggccatgcacagcttggcatactcacctagtggataactctcggtctccactctgcagaaggtgttctgaaggcctggaagatgtgggccatgcacagcttggcatactcacctagtgggtaacactcgttctccactctgcagaagatagggtgtggttatcatgcacaaacacaacaagaggaaggaagaattgcagatagcggcggcacgctctccatccgtcccggtgtcccacaaagccaagcagcgagttcctggagacacgggcacccatccaagggccaggatccaaatgcctggcaatgattgggatgggcgggggtcatggtcatcgccccgcccgtgagaccagaaagaaactcatcagaatgggatggaagggaaggatcgcccactcagtcatggtacccgctcttccttttagtcggggcctgtgctgtgtcctcctggtcgatgcatccaacggaacaagacaattcgtccactcaactcgtgcgtgctggtacttgcattgcatgctgccagtgcgccgtgcatgtttggtgacaccagcggataataaactagagcctcgcccggcgacggagacggtggacggagcagagccgcagagcacgcgtatctcaccgacaccagtgcatatgatgggcatgccatgctggtgacatactgctgtggtggtgcaggaggacaaaaggcaagcgcacgtcgtagctagcgtactgttccttccgccaccggtcgacaccaaagtacgcagcacaggccatgtaataatggtacagtacagcttcaatgttcagagagagtccagacttgag

SEQ ID NO: 6201 - DNA, 3025 bp, Zea Mays
atggcgtccccgtgccacgaggaatctgggagagggagaggacccatcgccatggccatggccagaggtcgcatcgccatgggtggcagtggcctccactgtgcatctgcaatccactgcggaaagagaagaggaacttgttgctctacgcaatttgcggatactttagggaatcgtgattcgaacaatatttcattagagaatgccaaatcatacaagatagaagcattcaaggctcaaatgcagctaccattcccgaaacttttgtgtctaatgacgatgcaagctgccaaagatccgcgcgtcgacgagaggggcggagtcggcgacgagcagatggccggaggcggccccgccgcgtcggcgctttcaagcccctggagggctctgctccagcgagcgctggacgccaacgcccacctcaggcactccacctacttccaactcgctacggtgggcgccgccggcaggccggcgaaccgcaccgtcgtgttcaggggttttcaggaactctgtgataagattcagattaacacggacgcccgaaccaacaagattggtgagatcaagagctgcccctttggtgagatagctgggagcaattccgtatcagtggcagcatagatgtgattgatgcttctactacagaccctgccaagctccagcacaaggagaaagcatggttttcaagttcagtgaagtcgagatcgcagtacttaggaccacagccaggcattccggttctagatgatgagcatgttaaggacgttcatctcgatcctttagctggcccagtagatgccttttgccttctggttcttgatccggaaaaggttgattatttgaatctgaaaagcaatcaaaggttgatctttacaagaagacaaaaggatgatggatccaatgattggatggcagtaaaagttagtccttaagctgctgcaaaaactttatttgtgagcttctcttggtaactagactatcatgattcttctgtgttttcatatcatttgaaatgttaggtgcatatcattatgtatatttgagaggccttttcatagtcatacatttatatattgggaatgctttgtaatctcagggatttgttattttttgttaccctcaaatatagaagataaagactgtaaggtatttaggaaggagtcaaagcaggctgtggctattcatgtttgtcaaagccgttggtcttgagatttgtttgaagatgagcgtggctcgtgtttgccactcgtgcttgtttttgtgcataagttatctgtgtgagcagaatgcagagacagcatgtgttggctttaataaactaccagcatattccatgggaagtattaaagctgtgtctacacttgcaattgcaacgatgtgctgagaacaagccgttggatggttggagaacttcaggtccgctgcgcaagtcatgaatgtggtcttggaaatcaaagctgattgctgttatcctgcaaaaaccgtcaggcagacacaccacatgatctgccctttttatctaacagtgcagactgccgagcaataaacacatattgattaccgaaagaaccctttggctgtagtgggcagtgggctcctgattatgaacagttccagatgaaagcgtgctaatggcattatgtcgttgcaaaagtaaatggtagtgaactgtcgcagccatgttttgtctgaggccccacccagttgcaaagcgtaagtgttgatgccaaatctagaacttgtcacgggggaccgaatgactattggttcatcttgactactaccgcgtctcaatcatctggcactcgagaggaatagataatcatggtcacctttgaaggccagtcaaaatgctactccattgcggctgattggagaggtcaaaggtggctgttaaattggatattcggcttttgcatcgaggacttttggcagccttttcttcctccatctctctactccatctggtattgtggcggtgccaaacataagtcatggctcatcacttttgcaaagcatgcaagggacatgtttgggcataaagcagatgtttgaggtcaacagcaagtctgagctgcaagttgttaatggtgggttcgttaaaaaacgactgtgaaggccttctctggtttcgtctttggacagtggtccctttttgcctattgggcctttactggtctaaaggcctggaagatgtgggccatgcacagcttggcatactcacctagtggataactctcggtctccactctgcagaaggtgttctgaaggcctggaagatgtgggccatgcacagcttggcatactcacctagtgggtaacactcgttctccactctgcagaagatagggtgtggttatcatgcacaaacacaacaagaggaaggaagaattgcagatagcggcggcacgctctccatccgtcccggtgtcccacaaagccaagcagcgagttcctggagacacgggcacccatccaagggccaggatccaaatgcctggcaatgattgggatgggcgggggtcatggtcatcgccccgcccgtgagaccagaaagaaactcatcagaatgggatggaagggaaggatcgcccactcagtcatggtacccgctcttccttttagtcggggcctgtgctgtgtcctcctggtcgatgcatccaacggaacaagacaattcgtccactcaactcgtgcgtgctggtacttgcattgcatgctgccagtgcgccgtgcatgtttggtgacaccagcggataataaactagagcctcgcccggcgacggagacggtggacggagcagagccgcagagcacgcgtatctcaccgacaccagtgcatatgatgggcatgccatgctggtgacatactgctgtggtggtgcaggaggacaaaaggcaagcgcacgtcgtagctagcgtactgttccttccgccaccggtcgacaccaaagtacgcagcacaggccatgtaataatggtacagtacagcttcaatgttcagagagagtccagacttgag

SEQ ID NO: 6202 - DNA, 3561 bp, Zea Mays
ctttgccctccccttcctgtccctccctggcgagcctccaaatcctcctgcccccaaccgatcccagagttcgcggtccccccccatccatcccactcccaccatcatcacccatccgccatcgcccggccccgcctctctctctctcctccgtccccctcgtcgtcctctgctttttattactcttctccactcattagcttttggttgttgttggttggttcccttcttgcgagttgcgagaacccaccccacccccaaggcgacgacacacacacagagagaggcaagggacggagagggcgaggacgccagccgcagtgggcgcgccacaagcggagcggggggcgcacgcacgcacgcgactctcccgagatccaagacccgcgagatccgcttgccctcgtcgccagccagagcccggagcggatacgtgtccatggcggccggagaggagcaagaagagttctttgactccagggaggtgctgtcgccggcgtccgtctcgtcgtcgccgtcgagttccggtcgccacgacgacggcgggtggctcttcgcccagcagctgctcgaggtctgggtccgggacccgggcagcgtccacgagcgccgccagaggttcgtcaagtccctgggcctcatggatccgagcccccacggcgcgcggcccggcgaggagacgtgctcgaggcctgaggccagagaagaaatcctaccggcaagccccagcaccgagctgttctcggccgtccctacctttgcgagcatgggaggggagccgacagcctccggcggcgacggcgctggcacggaagaggagccggagtgcgtgttcaagaacctggacgatggcacagtgttcgtggtcgacgagatgggaaaggacgggagcttccggagcctcagggagaggctctccaaccggacagtaacagctgcagaattcgagcaggcctttggctcatcacctttcatccgtgagctgatgaggagggtggacgattccgacgaaccctccaccccggagaagactgtgctgaggagaaggaggcggcggcggattgggtggctacgaaggctgggcatcggtgtctgtgttgtcgacgccgacgcagaggaggaagacgatgaggtcaattcgacatcatccacttcttcccggggttgctctaggaaggttgatagggtcaaggtgagaccttacaagaagcggtcaaaggaattatctgcagtgtacaagggccaagtcatcaaggcacatgaaggtgctattgtgaccatgaagttcagctccgatggccagttgctggctactggaggtgaggatggggttgtccgcgtttggcgggtggtggaaggcaagaggcctgatgaccgtcattttgttgacgatgatccttcatacctttgcgctatccgaggaccctgtgcatgaattccgtgggcaccatgatgccatcttggatctttcatggtcaaaaaatagggaattgctttctgcgtccaaggacaaaactgttcgattatggaaagttgggtgcgatagctgcctgaaggttttctcccataataactatgtgacatgtgtacagtttaaacctaccaatgacaattatttcatcagtggttgtattgacgggatggtacgtatttgggatgttcctagatgcctagttgtggactgggctgacagcaaagagataattacagcagtttgttaccgtcctgatggaaagggtgcagtggttgggacaataacaggaaactgccattgctatgaagcatcagaaaaccatctagcactggagtcacaagtccccctgtatggcagaaagaaatctccacttaaaagaatagttggattccagtattgcccatctgatccaaagaaactgatggtgacatctggtgactcacaagttcgcattctcgatggggctcatgtcgtttccagctacaaaggattacgaagtccaagtcaagtccctgcagcatttacaccagatggagatcacattattgctgctagcgatgactctagtatctatatgtggaattatgcaaaccaacttgccccagtcacgagccgtgtgaaaaccgtatggtcatatgagcacttcttctgcaatgacgtgtccgttgcaataccatggaacgccttgcctgcaaggagttctatttctcttgcttgcaacatccccctttcacggcaagaggtctctgaggagctccacaactcgcaagagtctgtgtcatgctgcagtgctgaaggctcacctaaagctgatagctcgtgccggctgccatccggcaatttcactcttagcaatgcattctccgcggagttggcaccaagggggaaagcaacatggccagaagagcagctgccatcatctgattcagtgacaccgtcgtcgtcgtctgctttgcgtaaatctcagtataagttcctgaagacttcttgccagagtgccgccacgcatgcctggggccaggtcatagtcactgcaggttgggatggaaacatcaggtcgttccagaactatggtttacctatgcaagtgtgacacatggtacaagacatgcatctctttgctaattgcttggtcagtggggtatcccaggaatggcagacgagaagtcgcttgcggaacttttacgcctccaggaacttggtttgctgaagggcgacgccccgtccagattatggttacagtacaaagagtttacatgggtgtgtggctgtgctgtgttgctcgtggaccagaagttgtatgtagtccagtggtcctgcgagatctcggcggcacattgcgagagaagggccggggaagatggatcccctcgcagacccaactaactttgcgcgaagagtggttgtatggctgcaatttcattgcattgctgtttgctgcttttctttgttttggcctccctttggggggatctgcagtaaatatatatagagtggatggatgaacatattttgtttgctcgattgagttcccctcgccctgatgcaaggcgagcgggggaggtagttgagatcactgttggatagggatgcacatactggattcatttcatttgttcatcacatcacatgccgccgccaccattcatatcatggcctgcctgcctgcctgcctttatggcagcggagctgtgcgcagctgatgcttccgttttccctgtgttgagactcacgccattgcccattgctgctttgccttgcggtggagggcatctggacatggggtcaggtggctgtggcctgtgggggacctctgtgcagcgcaggcctttctggatagggctggtgcagttggtcctgatgggttttcctcctagcgccagggagcgtagcggcctgggcgtgggaacatggggggactcatggccatggctgtttcagagctggctgggggccatgtgcccagatcttggccttttacgctcctgcgtcgttctgttccttttcttagatcctccgcatctttggtgtgatctgcgtcggccaagaagttgacattgtataatttcactctttctttccctttt

SEQ ID NO: 6203 - DNA, 1230 bp, Zea Mays
gaagatgctatgtagttatcacttccatgttgacactataacctaatttattagatggaacatatatgtgaataagtaggaaactattaaagtaagtgtgcataacttaatgtgacatatatactactctattaagaacctaatgtggacacctggtgctaccacggcttcaccatccgcgctgatgctctatgcccgccacacaagtcccgactggttcgcccgccaaaacgtgccccgcctcgacggcttcaccctccacgctgacgctctaggcccaccacacgagtcccaactggttctcctgcctcggcgccgtgcagtatgggccccacatccagcgtccgtgcaacgctctctcagctactaccttgtggatcccctgtgcaaaaaaaaatagtgcaaagcgagcactcgaatccacggtcccctactctagaaatttggagctaaccaccagaccacacgtaacttaatgtttagaaataaacaataattatatttgaataaatatctcaatagctatttatatgatatataataacggtagcaaagcataggcaactggctagtttacaaataagaaaccaatataccatcatcaaggtcagtagtacagctccaagagcgagggatacgatcccgtatattgaaaataaagggcgtgttcggctggctacaagccgacactgttgcagctgtttggactgctgcagctgcaatccatagagagaaaaatactgtagaagccgcagccgcagccggattgcagccgcagcaagccgcagcgaacaagctgaaaagaatgtcctagttataatctaggggcgggaaacatgattacatgggactgggagcagcagcaactgaacaacacgataatggcagaaggatggcaagccataagataagaatacctcttgtcagtgctcttgatagcagcattagcttcctcttgcgtctcatactgtacaaacgcaaagttcctttgaacgcgaatgttagtgtgtatggggtcaaaattgataacaaagagggttctcgttgcctttacatccccagtaggtctaccacgactctttggcaccggttcaacttgctgaacgatttaaagatataaatggggtcaattaacagatttataaatgtttttcaaaatggaagtgacaaaaaatatccatccaggcatagagcaacagacaaggaattaccctggaccatccaacagag

SEQ ID NO: 6204 - DNA, 2891 bp, Zea Mays
gggaggatcaccacttcaccagaccaataccaaaagtcacattacaacttcagctctcgaaaattgacaacatcgcaaatgtacagaaacagttatcactcatttgagctttcagcatgaagcaaatattagacaaacatgtcgtgtgccgctcaatagcaacaatatgcttaatccaaggaacatcatggctaatgttagctagtagtacaaggttatatcataccgtgcaacgattttacaagccaatatactacaccaatttattcacggaaacatggtgggccgttatatttcgaaaaaccgcggactcttcaaaattatacctcgctactgggtatcctttgctcccaacaaaaaaaaaagtaccagaaacccccaaaggagatgtgcttgcttacttccatgtggacaaatcacgaatttactctcgagattcacccgttgctttagccctgatctcaagatctctgatacggtcacataacacagaactcgactgctcactttccttgtccaccataggagaattgacttcaggactcaccgcaggactcgactgctcacattccttgtctgctataggagaatcgactccaggacttagcacagaactcgactgctcagtttccttatctgtgataggagaatcgactccaggacttggctctggtccgcccgataggtttaagggctggacttctgcagttgtgggctgagattccaagcgaggaagatttaagaagagtcttacagccggattccggagaacagcaccgtaaacaagtgagaaaaagtttgatgtgacccagtaaaagaaaattgcctgccaaagaaatgaaagattaatggcagcgcaaatgcatgagttgtggtgttatagttccacaagacatcaaagctgagcatatttgacatgagatgaatagtagattttggattgccctcagcataagcataaatttatttggaagtgagaacaacaggcacactcggcactacaaagtatgaactgcccttaaggttaccaccagcatttcattcagcgcagcatattttgacaccattttggagtaaaacaattggccatagttcctagagcagtagcaaaacaaaaatacatgcgccaaatctaaaatacaaaagagacttgttcgaggaaaaaaacaaaaaagactacctctctaactctcagatgattttaaggattcaatacacctcaccttaagttcaggtgtcgtgcatcttaattttgaatgtattaacaaaagtaggcagccacaacttcctgtcatggtgtctgatagtagataactatagacaaccctaattcagattagtactgagtacattttcccaggcaaggtataacctagtcagtttccgaaaccaaactgtctgcacaagaataggttatggaagtacataatcaaagaagcccatagaatgttcatttatttagtttgagaaggccacatctagcgtttaggagggggtagccagaatgagaacttgatgttattcaaaaaaaaatgaacccttaaatgtaatttcttataagggcctgtttggatcctttcattttggaacaaatggaatctacttcatagactaggctatttggcttggaatttgacatttcacaacttttcatagtttagataataagcttgtcttaaattcatgggatgagtatgtttctattctgtaacttatagcatgctctttggcttgctcctctacaacagaactgcaggacataagtatctcccccatgtggctaatgacagtacacaagtatattccgcatgtggccatattaacttaattggtctgtgtctaaattgtgtttattagaatggatgtcaattccaaggatccaaatggggccaagtgttttcagagttttgtacctctggaaagttcattgtaaataaagggaaacataacagtgaattgatgcttacttaaaaacctgagtagtttcacggttacgtacctttggaaagcctattgtaaatggaacaaacaaaactccaaaaaaccgggagaactttttcattggttttaacatatgattcccttccatgccatcttgcatattaagctgaaacatatatttttaggaaaaaaacactaatatcttgacaacaaaataacagataaacacagtgaataaaatgcaaacctctactgtagccaaaaaggtcagtgatgttaacactgggaggattaataaattatcaggagttgtcaaatcagtaaaccaatacacaccacctcctttcatagaagggactttctcaaccatatttgatatctaaaattgaaatagaaaacatatagattagaaataagaaataaggttaattctactgctacatgaaataataagtcggtgacaatgcaattgctgattagtattttagatgcaacaatgatgtggtgtaaactataaacttacagcaaagaaaaagctcataaatataggtccctgtatgaatagacccttcaatggtgtcaatggagtcactccatgtctgaagcaagaagtaatgaaacaattattttagtaatatatcttatacagcttgtatgacaagaggaatgaaaatactaacagaaaaagataacctaaggggcagtcaagctagttaggatgttcaatgatttagagtgagggaggttgttttcatattgcatgcacagacaatagcatgagcaaacataataacattcaaaaagattctgtggagctaatcaattaaaggagtgagttaagtgctaggcattccagctcgtaaaattatgatcgtgtaacatgatataaaaaatatttggaaccacacagaaatggaaaatagtaaactatcttgcagtttcagattgac

SEQ ID NO: 6205 - DNA, 794 bp, Zea Mays
gttatttccataagacgagagcaccactgaatttcattacctaagtaaatgtcgctatggatcttgcttgggtcatcttgagaagctaaagcctaacctgctcctggatatccatttgcatcagcatgtagagactctgtatatggagattcgccacaaagcgatcatacagtacacacttccttttatatctgttgacctcaacacgatggcagccgcctttaagacttcggtctccatgctgcagaaggagctggccgcactgattactgaggacaaaatacaggcccggatagactcccacaacaagatcctttacgcaaggcatgctgaccagagaaatgcaactttccagcgtgtccttcaaaccggcaatgactttgagagagatgtcaagtccatgcttctgcgtgccaacctcctcaagcatgattacattcagaagacaagcggaccaaggaagatgtaaagattgcgggcgtcgctgctaggcaaggcttcctgctgcatgcctctccacttttttttttgaagaattgttctgtgacataaaagggaccgaagtctgtctaaatgccctccccctctttctttttattggttgatgaaagttattgtcgaagtaatgtatggttgagcatctggatgtgattatttgtcatgctcgttttctaggcaagatttagttttgaacttgccgggtacctaggaaaggggtacccaaggcgaggcccataaacctctctctggcctatttaccgaccaagttcttgtcgagcaagtcttcgaggcgg

SEQ ID NO: 6206 - DNA, 1265 bp, Zea Mays
ggaaatcctaccccttgtacccttcctcagagtacctggctacctgctgtgtaacggcgtggtgtttccttactaacttaatcaaagagagcatcagaatgggctacaatgacattggtgatttcttctatgcccatggccaactttcagatgctttcaaaagctacatcaggactcgggactattgcaccacttccaaacatatagttcagatgtgcatgaatgtgattctggttagcattgagctggggcaatatgcacatgtttcaaactatgtcagcaaagcagagcaaacccccgactctctggatcctaccattgttgcaaagctgaaggcagctgcaggattagccaacttggaaacaaagaaatacaaatttgctgctcgtaagtttgttgagacaggaattgaactaggaaacaacttctctgaagtcatagctcctcaagacgtggcagtctatggtgccctttgtgcacttgcttcttttgaccgttcagacctgaagagcaaagtcattgacaatatcaacttccgtaactttctggagctggtgcctgaagtaagggagctggttaatgatttttatgcaagcatgtagagactctgtatatggagattcgccacaaagcgatcatacagtacacacttccttttatatctgttgacctcaacacgatggcagccgcctttaagacttcggtctccatgctgcagaaggagctggccgcactgattactgaggacaaaatacaggcccggatagactcccacaacaagatcctttacgcaaggcatgctgaccagagaaatgcaactttccagcgtgtccttcaaaccggcaatgactttgagagagatgtcaagtccatgcttctgcgtgccaacctcctcaagcatgattacattcagaagacaagcggaccaaggaagatgtaaagattgcgggcgtcgctgctaggcaaggcttcctgctgcatgcctctccacttttttttttgaagaattgttctgtgacataaaagggaccgaagtctgtctaaatgccctccccctctttctttttattggttgatgaaagttattgtcgaagtaatgtatggttgagcatctggatgtgattatttgtcatgctcgttttctaggcaagatttagttttgaacttgccgggtacctaggaaaggggtacccaaggcgaggcccataaacctctctctggcctatttaccgaccaagttcttgtcgagcaagtcttcgaggcgg

SEQ ID NO: 6207 - DNA, 1751 bp, Zea Mays
gcaagccacggcccacggcatcgtcgcctccctccctcccttctcggcgtctcctctgattccttcctctcctctcgccccacgcccctctccatctgctcccgctccgcctcgcctagggttttgcccccaaacctagcctcccccgaatctcccacgccatggacgtcgagggcgaggtccccgccgccgccgcggcggcggtggcgaacggcctgggcggcgcgggcgcggaggaggcctctccggcgccggtctcggctgagcagctcgacgtggaggcgtacgcggcgcagtactcggggcggacccgcctcgtgcgcctcctctttgtcgccgaccggtgcggggtggaggcgatgcagctcgaggcgctgcggatggcttacgacgagatcaagcgcggggaggacgtgcagctccaccgcgacgtcgtcaccaagatcggcggccgcctcggtccgcgctacggcctcgaccaggcgtgggtcttcagcgtctcccgccgcgccgaccagcgcaaggagaagctcgagagcgagctcaatggatacaggactaacttaatcaaagagagcatcagaatgggctacaatgacattggtgatttcttctatgcccatggccaactttcagatgctttcaaaagctacatcaggactcgggactattgcaccacttccaaacatatagttcagatgtgcatgaatgtgattctggttagcattgagctggggcaatatgcacatgtttcaaactatgtcagcaaagcagagcaaacccccgactctctggatcctaccattgttgcaaagctgaaggcagctgcaggattagccaacttggaaacaaagaaatacaaatttgctgctcgtaagtttgttgagacaggaattgaactaggaaacaacttctctgaagtcatagctcctcaagacgtggcagtctatggtgccctttgtgcacttgcttcttttgaccgttcagacctgaagagcaaagtcattgacaatatcaacttccgtaactttctggagctggtgcctgaagtaagggagctggttaatgatttttatgcaagcatgtagagactctgtatatggagattcgccacaaagcgatcatacagtacacacttccttttatatctgttgacctcaacacgatggcagccgcctttaagacttcggtctccatgctgcagaaggagctggccgcactgattactgaggacaaaatacaggcccggatagactcccacaacaagatcctttacgcaaggcatgctgaccagagaaatgcaactttccagcgtgtccttcaaaccggcaatgactttgagagagatgtcaagtccatgcttctgcgtgccaacctcctcaagcatgattacattcagaagacaagcggaccaaggaagatgtaaagattgcgggcgtcgctgctaggcaaggcttcctgctgcatgcctctccacttttttttttgaagaattgttctgtgacataaaagggaccgaagtctgtctaaatgccctccccctctttctttttattggttgatgaaagttattgtcgaagtaatgtatggttgagcatctggatgtgattatttgtcatgctcgttttctaggcaagatttagttttgaacttgccgggtacctaggaaaggggtacccaaggcgaggcccataaacctctctctggcctatttaccgaccaagttcttgtcgagcaagtcttcgaggcgg

SEQ ID NO: 6208 - DNA, 1705 bp, Zea Mays
agacaagataagataagcccaggacaagctatcaccaaacgggagggcgaggggcaacaggacacacacactgacctagcaccagctcgatctcacaggatggttacgctatgccatccgattcggatccgagcaagcgggagcaccgcgagctggcggaggagaaatgcggcggcggcggcgaaggtcctctgctccgtgcagcaaatgccgccgccgccgccggcggccacggctgcccagagcacgatcaaggtactccacctccactccaccgccgtgcatgctccgtgttcttgctggaggatccagccagccagctgcctatcatatatatgtgcccaccaggtcgttatcgttggggcaacgaaagagatcgggaggacggccgtcgttgcggtgagcaaggccaggggaatggagctcgcgggcgcgatcgactcgcagtgcattggcgaggacgcgggacagataagtggcatggacgagccgctggagatccctgtgctgaacgacctcaccatggttctgggctccatagcgcagtcgagagcaaccggcgtggtggtcgacttcagcgagccttcagctgtttacgacaatgtcaagcaggcagcggcgtttggtctgagcagcgtcgtctacgttccgaaaatcgagctagagacagtgactgaactgtcagcgttctgcgagaagggctgcttggttgcgccaacgctgtcgattgggtccgtgctccttcagcaagcggctatacaggcctcgttccactacagcaacgttgagattgtggaatcgagaccaaacccatcggatcttccatcgcaagatgcaatccagattgcaaacaacatatcagaccttggtcagatatacaacagggaagatatggattccagcagtccagccagaggccagctgctcggggaagacggagtgcgcgtgcacagcatggttctccctggtctcgtctccagcacgtcgatcaacttctctggcccaggagagatgtacaccttacggcatgacgttgcgaatgttcagtgcctgatgccaggactgatcctggcgatacggaaggtggtgcggttcaagaacttgatttatgggctagagaagttcttgtagtgaacaacaaacaaccaatgcaaaacatcgacaggcaacaggcaaggcagatatcatctgacgtcgcaacaaccaaaacgacagagatttggaaaataaaggctgcacagaagacgtctggggttttgtgtgcaccaggctgcgcagagaacgtctgtcattttgtgtgcaccactacggcactacctgctgagcgcgatttttataaaaaaggcatgggagggagatcatacacaggaaaagtcacgaaggaaaaaggggtcacatggacatacaggtattggtagcataaccaaaacaatggatctgattctgcgattcggttccatcggcatatgcttgttcagaagaaagttgcatcgggacttgaagaaaaggagggtctagtttgcgttttgtaaccgagactgcgtaattcggcatgcgtatggcaatccaaattgcgccagactaatccagattcaattttataaaatggataaaacataaaaaagacatataacattcctctccccccgtttcttattagcgttctataattttttataccgctgcaaaagcgggcatgtttgct

SEQ ID NO: 6209 - DNA, 1596 bp, Zea Mays
agacaagataagataagcccaggacaagctatcaccaaacgggagggcgaggggcaacaggacacacacactgacctagcaccagctcgatctcacaggatggttacgctatgccatccgattcggatccgagcaagcgggagcaccgcgagctggcggaggagaaatgcggcggcggcggcgaaggtcctctgctccgtgcagcaaatgccgccgccgccgccggcggccacggctgcccagagcacgatcaagagatcgggaggacggccgtcgttgcggtgagcaaggccaggggaatggagctcgcgggcgcgatcgactcgcagtgcattggcgaggacgcgggacagataagtggcatggacgagccgctggagatccctgtgctgaacgacctcaccatggttctgggctccatagcgcagtcgagagcaaccggcgtggtggtcgacttcagcgagccttcagctgtttacgacaatgtcaagcaggcagcggcgtttggtctgagcagcgtcgtctacgttccgaaaatcgagctagagacagtgactgaactgtcagcgttctgcgagaaggcaagcgtgggctgcttggttgcgccaacgctgtcgattgggtccgtgctccttcagcaagcggctatacaggcctcgttccactacagcaacgttgagattgtggaatcgagaccaaacccatcggatcttccatcgcaagatgcaatccagattgcaaacaacatatcagaccttggtcagatatacaacagggaagatatggattccagcagtccagccagaggccagctgctcggggaagacggagtgcgcgtgcacagcatggttctccctggtctcgtctccagcacgtcgatcaacttctctggcccaggagagatgtacaccttacggcatgacgttgcgaatgttcagtgcctgatgccaggactgatcctggcgatacggaaggtggtgcggttcaagaacttgatttatgggctagagaagttcttgtagtgaacaacaaacaaccaatgcaaaacatcgacaggcaacaggcaaggcagatatcatctgacgtcgcaacaaccaaaacgacagagatttggaaaataaaggctgcacagaagacgtctggggttttgtgtgcaccaggctgcgcagagaacgtctgtcattttgtgtgcaccactacggcactacctgctgagcgcgatttttataaaaaaggcatgggagggagatcatacacaggaaaagtcacgaaggaaaaaggggtcacatggacatacaggtattggtagcataaccaaaacaatggatctgattctgcgattcggttccatcggcatatgcttgttcagaagaaagttgcatcgggacttgaagaaaaggagggtctagtttgcgttttgtaaccgagactgcgtaattcggcatgcgtatggcaatccaaattgcgccagactaatccagattcaattttataaaatggataaaacataaaaaagacatataacattcctctccccccgtttcttattagcgttctataattttttataccgctgcaaaagcgggcatgtttgct

SEQ ID NO: 6210 - DNA, 2290 bp, Zea Mays
ttgtagtcagagaagtcaaacataaatgcgcccccacttgtcccttttccctcctcctcctgactcctccagctcctctcgtacaccacgtccctctctgggctgtggtggctcccaagcacacggcccgcacgagcagttggaacagattcctcgaccgcgtcgccccggaacccagttcttggcatccggtgcctagcttcgtcgcccctccggcaaggaccacctccagccctccacctcgcgaggttgcacttgctgctagtgagctagtatatttctgaaaccggaaacccgcgacacgggaccgagttcttgggagcggattcggctcgctgcagcaggctgaggctaccggcccgctcttctccacggcggcggagagccagccagtagttgcgactggaggcgggcatgggcgcgggcgcgtcgggcctggcgggcgcggagcccggcggcaaggtggcgcgcggcgccgggctgggcgacctcccggagctgtgcaccgcggaggtgctgctccgcctcggcgcgccggacatatgccggctcgcgcggctcaacctagcgttccgcggcgccgcgggcgcggacttcgtgtgggaggccaagctgccggggaactacgcccggctcctgcgcttcgtggacgaggccgaggaggagggagggagtgggcgggattggagcgcggtggggaggaaggacgtctttgcgaggctcgccagacctgtgccgttcgacggtggcaaaagggaattctggctggagaagaacgaaggtgggatctgcatggccttgtcgtcgaaagcgctggtcattactgggattgacgatagaagatactggattaacatgccaacatctgaatctaggtaaattaatatgaactcacttcttttcctcccgttttgttcgacttctaccatattgaaatttcactccctcttcgtttttttacgaacagttagctagggctgtatcgtgtttattgtcggagccatgctcaaagctcaatagtgcgtgtatatgaccatcgtagtgacgtggtgagacatggagtgagggccgtaggggtgagagagaggaaggctaccggtgagtgacacagtaatgaatgccttgttgcgacagttgagaatagcgaaagcaataaaagtgaaaccttttattctcttttacgattgacttgataaaaaattaaattcggaaatgaactttatgctagccgctacactggtgaggtaagcatggacgccagcaaaaattgacaggagatataattggtagagaacagcaccatgtgtgggtctgaaattttcaacagctcagtatatatatctccttcatttccctatgaagtcgtgatttttcagcaccatctgactctgaccaccggatttttatgggcaaataaattgttttcttttggacaaaaggcacagataaattccggaattacctgtgcgttggaataccagtccatcgtggcggcacctaagaaacacgttccactccactgcatacctgcagcaaatctggtggttcgaggtggtgggagaggtggacttctgcttcccggcggggacggcctacagcctctacttcaggctccacctcggcaagtcctccacgcgcttcggccgccgggtctgcagctcggagcaggtccacggctgggacaagaagcccgtgcggttccagctctccacgtcggacggccagcacgccgtgtcccagtgctacctggacgagcctggacgctggatcctgtaccacgtcggcgatttcgacgcgccgccgagctctggtcagccgaccaggctcaagttttcgttagcgcagatcgactgcacccacacgaaaggtggcctctgtgtcgattcggtgctcgtgtatcccaaggggtttcagccggaacgggtggtcagggctcggaaatgaccgtgtgtgggcatttggtagctatagaggcactgcgcattagagcgagctgtcgagagatatgagtagcctgccatttttttttagcttgggctaattgtattctgaaagcgtttatacatagcatagtagcacactggactttttttttgtttgatagcattagtgtgtgcgcgttactttgccatttctcatgaaggccatggcaaataaggaacctttgtacgtgtacctagctccggtacatcgcgtttgcatcggcacacaatgaagccaggaaggtctcctgttttatttccaaacaaaaactgggtcgtttttttttcgtgacctaccaaacatcgag

SEQ ID NO: 6211 - DNA, 880 bp, Zea Mays
ataaatgcgcccccacttgtcccttttccctcctcctcctgactcctccagctcctctcgtacaccacgtccctctctgggctgtggtggctcccaagcacacggcccgcacgagcagttggaacagattcctcgaccgcgtcgccccggaacccagttcttggcatccggtgcctagcttcgtcgcccctccggcaaggaccacctccagccctccacctcgcgaggttgcacttgctgctagtgagctagtatatttctgaaaccggaaacccgcgacacgggaccgagttcttgggagcggattcggctcgctgcagcaggctgaggctaccggcccgctcttctccacggcggcggagagccagccagtagttgcgactggaggcgggcatgggcgcgggcgcgtcgggcctggcgggcgcggagcccggcggcaaggtggcgcgcggcgccgggctgggcgacctcccggagctgtgcaccgcggaggtgctgctccgcctcggcgcgccggacatatgccggctcgcgcggctcaacctagcgttccgcggcgccgcgggcgcggacttcgtgtgggaggccaagctgccggggaactacgcccggctcctgcgcttcgtggacgaggccgaggaggagggagggagtgggcgggattggagcgcggtggggaggaaggacgtctttgcgaggctcgccagacctgtgccgttcgacggtggcaaaagggaattctggctggagaagaacgaaggtgggatctgcatggccttgtcgtcgaaagcgctggtcattactgggattgacgatagaagatactggattaacatgccaacatctgaatctagccgctacactggtgaggtaagcatgg

SEQ ID NO: 6212 - DNA, 886 bp, Zea Mays
aaacaacacggacgcacacgcgcgcgcgcagggaatcaatcacgcacacgcgcacgcaccgccacccttcccgaaaagtctcctcacctcccggtcccggcctcccttcctctctctccccccctctcaaacatccccgcgccgatggatctccgcctcgcccactaggcctccggcgcgaccgagggtgggcagggggatggggctcctcgggcggaggacgttgctgcggctcctcgccctcgcttccgcggccgtcgccgtcgccgtcaccgtggaagcctacgagggcgacgctgatccgctctacaggcctgaacatgaaggtttgtactgtgataatcattgctcagtgtctcctatgggcactgtgggctgtcatgactcggcatccttcacggctgaagatcatatttgttgccatcggaggtgcggctgcggtacttctggaagcttctgacattcctccgcgatggggatatgtggatggccgtgctatatgccttgctgtggctatccccctttcgtacctttggtggagctttgccaaggaagatgcggagatgcgaacgtcagcaatcctgaagaaggcacgttaacaagtcgcctgtgtgataatttcatgcctgcgcccagccattgtaaagataaaagtttcacttgtaatcttaggtaactactaacttagcatgtgaattaccgtcttatttttgttccacgatgttcttgtcccagttcagaaggccatgttgtttaaggggccacttctattctttaatttatacagcaactgccacttggtaggctcgtgctcatcaactataatctcagaagattgttaccatgggttatcagtgagtggctatcataataatgtctttttttt

SEQ ID NO: 6213 - DNA, 1849 bp, Zea Mays
gtcatcgtcgtcgtcgcatcacgcccccgaccgatctgctcccccaaacaacacggacgcacacgcgcgcgcgcagggaatcaatcacgcacacgcgcacgcaccgccacccttcccgaaaagtctcctcacctcccggtcccggcctcccttcctctctctccccccctctcaaacatccccgcgccgatggatctccgcctcgcccactaggcctccggcgcgaccgagggtgggcagggggatggggctcctcgggcggaggacgttgctgcggctcctcgccctcgcttccgcggccgtcgccgtcgccgtcaccgtggaagcctacgagggcgacgctgatccgctctacaggcgaaccttcggggttactccgttttaggcctcgctggacatcccagtgctgtccgtctcggtgcctctggtggtttcagcgaaggcgagcggttccggaaaggaataaaaatggtgctgtctgtcttcgcctcttggctactggcattgggggtgtataagttctgattacgctacatgattcagagttatatattatcaccttttcatggtacggtcccaaaggttgagctagcacaactacctcattttcccatatttttaccagagcttgtgtggaaggatgccaaaagacaggctccctgaaggagacttctattaaacattgtatggtgccaaccgatggccaacctgttgacaagtcatggtacacgcatgagccactgtacttgcaatggaaggactggaactgcaagagtgaatgcagataccactgtatgatggaaagggagaatgaaagggcaaagcttggcctccagcctgttaagtatcatggaaaatggcctttgaagcgtgcctctgtgtttcaggaacctttatctgcagctctctctgcgcttactcttgttgtgcaatttaatgggtggctatcatttttcctcttgctttattataaacttcctctgcggccagaaactcacaagacatactatgaatacactggcttgtggcacatctatgggctccttgccatgaattcatggttctggagtgccatatatcacagttgtgacacaatttggacagaaaaactatatttttcatcagatgctgcctttctggggtattccctcattttggcgatactgcggactttaaatttaagagacgaagcatctagagttatggttgccgctcctattctagcatttgtgacaacccacattctgtacctcaacttctacgaacttgacaaaggcctgaacatgaaggtttgtactgtgataatcattgctcagtgtctcctatgggcactgtgggctgtcatgactcggcatccttcacggctgaagatcatatttgttgccatcggaggtgcggctgcggtacttctggaagcttctgacattcctccgcgatggggatatgtggatggccgtgctatatgccttgctgtggctatccccctttcgtacctttggtggagctttgccaaggaagatgcggagatgcgaacgtcagcaatcctgaagaaggcacgttaacaagtcgcctgtgtgataatttcatgcctgcgcccagccattgtaaagataaaagtttcacttgtaatcttaggtaactactaacttagcatgtgaattaccgtcttatttttgttccacgatgttcttgtcccagttcagaaggccatgttgtttaaggggccacttctattctttaatttatacagcaactgccacttggtaggctcgtgctcatcaactataatctcagaagattgttaccatgggttatcagtgagtggctatcataataatgtctttttttt

SEQ ID NO: 6214 - DNA, 2148 bp, Zea Mays
ggctaatgatgtcacaatgcagatagtgtgtaaaaggtttttgagaagaggaatataatcatggttatcatgcagagcagtgactcttcacataatggttcacataatggaattgtagaaaatagtccgtacagaattccatatgacagacatgcagaaggtgatcaacttggtgcttcatggtattttagtagaaaagaaatagaggagaattccgtatcgaggagggacggcattgatctgaagaaagagtcttatcttcgcaagtcatattgcacatttctgcaggatttggggatgaggcttaaagtgcctcaagtgacaattgctactgctatagtgttctgtcatcggttttttcttcgtcaatctcatgcgaaaaatgacagacggacaattgcaacagtatgtatgttcttggcgggaaaagttgaagaaacacccagacctctgaaggatgtcatacttctttcatacgagatcatccacaaaaaggatcctgctgcagttcaacgaataaaacataaggaagtatatgaacaacagaaggaacttattttacttggggaacgtgttgttcttgtaacacttggttttgattttaatgtgaaccatccttacaagcccttggttgaagcaataaaaaaatttgaggttgctcaaaatgcacttgcgcaagttgcctggaattttgtcaatgatgggctccgcacttcactttgcctgcaatttaaaccgcaccatattgcggctggcgcaatcttcctggctgcgaagtttcttaaagtcaagcttccatcagatggcgagaaggtctggtggcaagagtttgatgtaactccgcggcagttggaagaggttagcaaccagatgttggaactctatgagcagaaccgtgttcaaccaccaccatcacaaggtaatgatactgaaggcagttctgtaactgctgtgaatcaacgtgctctgggtaaagttccaggagtagttgatgaacctcctgcccatgaacataaccaagcaaccaggcaatcgagccagcagaacatgtcaggccaccatggctatgatcaccctcatccggagaagcgaaactatagggtacccccaaatgaagcaagggatgacagtgctaacagcagcgagggtcccaacgtgtcagcctcgatgatggatgcaatgaaaaagataaacaaggataaggtgaaagcggccctggagaagcggagatcaaaaggtgacctttcgagaaaggttgatgtgatggatgatgatgacctcattgagagggagctggaacatggcgtggagttggcggttgaggatgagaaggtcaagcaggagagaaggcagagctggcctcatccttcacaccgtgtagaccaccggagcaccgaccgtgagaataccgaagagggtgagctatccatggacagtcaggaacaccattctccggagcatgacaatcggaagagaaaggatgcgcatgagcaccggaactatgatcgtgatgaaagggaccttaaaaggctaaggtcatgagcatcacacatcctgtgggagtctcgtgttgtttgggctgtaacatgacgttgatatgcttatttggtgtgctgggggatttggactgttacatacaagttaagatggtttccccacggatcatgtttgtgttagtccatgttggcaattgagatggcgctgtgacttgagtattgcaaacagtaaggaagcggcatccgacggctatctgaagtgtgtatttgattccaaggttacctgaaccctaatggaagcatgcgattttattattcgcccgtctatcttggtactggggaggagatcgtgcatagactaattgttgattttttatgccatgtaatgtccatgctctctacctaaattatggattgttttggccttttagatacacagtttttattatacgttcatatataggtaaaaacatatctagaaaagtaaaaaaaagtgtagcatgcagtgccgttcgtttgcccggtctacgtgggcatgcagtataccacctattttgtcgcagcctgcattttctttaagcatggtacatatgcaagcttattgctatcattgtacacatacatggtgtgagagaaatggaatagaatgctc

SEQ ID NO: 6215 - DNA, 2147 bp, Zea Mays
ctcaaaaagcataaaagtgattcatgcatagcagagtttttgagaagaggaatataatcatggttatcatgcagagcagtgactcttcacataatggttcacataatggaattgtagaaaatagtccgtacagaattccatatgacagacatgcagaaggtgatcaacttggtgcttcatggtattttagtagaaaagaaatagaggagaattccgtatcgaggagggacggcattgatctgaagaaagagtcttatcttcgcaagtcatattgcacatttctgcaggatttggggatgaggcttaaagtgcctcaagtgacaattgctactgctatagtgttctgtcatcggttttttcttcgtcaatctcatgcgaaaaatgacagacggacaattgcaacagtatgtatgttcttggcgggaaaagttgaagaaacacccagacctctgaaggatgtcatacttctttcatacgagatcatccacaaaaaggatcctgctgcagttcaacgaataaaacataaggaagtatatgaacaacagaaggaacttattttacttggggaacgtgttgttcttgtaacacttggttttgattttaatgtgaaccatccttacaagcccttggttgaagcaataaaaaaatttgaggttgctcaaaatgcacttgcgcaagttgcctggaattttgtcaatgatgggctccgcacttcactttgcctgcaatttaaaccgcaccatattgcggctggcgcaatcttcctggctgcgaagtttcttaaagtcaagcttccatcagatggcgagaaggtctggtggcaagagtttgatgtaactccgcggcagttggaagaggttagcaaccagatgttggaactctatgagcagaaccgtgttcaaccaccaccatcacaaggtaatgatactgaaggcagttctgtaactgctgtgaatcaacgtgctctgggtaaagttccaggagtagttgatgaacctcctgcccatgaacataaccaagcaaccaggcaatcgagccagcagaacatgtcaggccaccatggctatgatcaccctcatccggagaagcgaaactatagggtacccccaaatgaagcaagggatgacagtgctaacagcagcgagggtcccaacgtgtcagcctcgatgatggatgcaatgaaaaagataaacaaggataaggtgaaagcggccctggagaagcggagatcaaaaggtgacctttcgagaaaggttgatgtgatggatgatgatgacctcattgagagggagctggaacatggcgtggagttggcggttgaggatgagaaggtcaagcaggagagaaggcagagctggcctcatccttcacaccgtgtagaccaccggagcaccgaccgtgagaataccgaagagggtgagctatccatggacagtcaggaacaccattctccggagcatgacaatcggaagagaaaggatgcgcatgagcaccggaactatgatcgtgatgaaagggaccttaaaaggctaaggtcatgagcatcacacatcctgtgggagtctcgtgttgtttgggctgtaacatgacgttgatatgcttatttggtgtgctgggggatttggactgttacatacaagttaagatggtttccccacggatcatgtttgtgttagtccatgttggcaattgagatggcgctgtgacttgagtattgcaaacagtaaggaagcggcatccgacggctatctgaagtgtgtatttgattccaaggttacctgaaccctaatggaagcatgcgattttattattcgcccgtctatcttggtactggggaggagatcgtgcatagactaattgttgattttttatgccatgtaatgtccatgctctctacctaaattatggattgttttggccttttagatacacagtttttattatacgttcatatataggtaaaaacatatctagaaaagtaaaaaaaagtgtagcatgcagtgccgttcgtttgcccggtctacgtgggcatgcagtataccacctattttgtcgcagcctgcattttctttaagcatggtacatatgcaagcttattgctatcattgtacacatacatggtgtgagagaaatggaatagaatgctc

SEQ ID NO: 6216 - DNA, 1674 bp, Zea Mays
acatcatttcttaaacaagggttcattatagatgatggacaagctgaagttgcccagtgcatggtaacattagagatgcaaaatcttggatcagatggtggatgttatgcttctcaatgcacagagatattgcggtgcaaatacttagaggagatggtggacggagtgatgctgcccactccacaggaacactactgatacgagaacttaaaacaaatggtggacaacatgatgcggtccagtgcatatcaagtctacatgtgcaaaagcttagagaaaatcaaatcaagctttatgggtcctcgtccttcctagaatctattgtagatgacacaagaggtgattttactcactacacaatagactgcaatggcataaagctcagtgcaccacaacattgctaagacaggagtttcaagctgcacgtgatagcatgcaagaggttatggtgagaaattcagttgaagctaccacatccttgacaagtacacaacaagggagacacatgagaactggattattcaatgtgtcaactgtgacaccatttccccggcaattttgatcttgccacgtcaaggtcttctccgagtgagtgaattcacattgatagagattgggcatttcgtggacctagaggacaaatcacatccaaaatttgttgatgtggctcctatcaagtgcaccgtgttcccctcttcaagaatcaagagtttgatgctgccgccaaagagatcaccaaggcattaacaactgttggtatctctcatattattgacactactgcaatttctattgggaggagatatgggaggaccgatgagattggtgttccatttgttgtggcaatggattcaacaaacgtgacgatccgagagagggatgacaaggagcagatccgtgtggacatcaacgaggtggcgtccgtggtgaaatagctgatagaaggccaaagcacctgtgcagatgtttttgcaaagcatactgcccatatataaatagacatgggatttgagcctgatgcacacacagtggagatggccaggggtgctggaatcagtaagattgaaataacaaaccgtcccagggaagcagttaagggagcagacattgtgtacacagatgtttgggccagtatgggacaaaaggaagaagttgattatagaaaacagaagttccagggattcacggtggatgaaaccctgatggagattgctggcccataggcctaccttatgcactgtttgcttgctgagagagaggagtggaggtgactgatggcggcggcgccattgaggctcccaattcaatcgtgttcccccaggttgagaacagaatgcacgctcagaacgccatcatgcttcacgtgctcggtgcttaactctcctattgcacaccactacaccagtgacacgctcctcttagattattgggcattgttgtcttgctgaagcattgaggctgttttggctttagggcatatatgagagcttagttcagacgaactgtttagtaaggtgataacggttcttcagggtgggagtttgttgtgctgtaaaggtttggtaacctgaataaaaataaacttatgtgttagtttcattcgagaatcgtgacagttttaactttgaaaggcacgtttggccgagaccctggatcagttttgcctggctccat

SEQ ID NO: 6217 - DNA, 1809 bp, Zea Mays
ggcacatcatttcttaaacaagggttcattatagatgatggacaagctgaagttgcccagtgcatggtaacattagagatgcaaaatcttggatcagatggtggatgttatgcttctcaatgcacagagatattgcggtgcaaatacttagaggagatggtggacggagtgatgctgcccactccacaggaacactactgatacgagaacttaaaacaaatggtggacaacatgatgcggtccagtgcatatcaagtctacatgtgcaaaagcttagagaaaatcaaatcaagctttatgggtcctcgtccttcctagaatctattgtagatgacacaagaggtgattttactcactacacaatagactgcaatggcataaagctcagtgcaccacaacattgctaagacaggagtttcaagctgcacgtgatagcatgcaagaggttatggtgagaaattcagttgaagctaccacatccttgacaagtacacaacaagggagacacatgagaactggattattcaatgtgtcaactgtgacaccatttccccggcaattttgatcttgccacgtcaaggtcttctccgagtgagtgaattcacattgatagagattgggcatttcgtggacctagaggacaaatcacatccaaaatttgttgatgtggctcctatcaagtgcaccgtgttcccctcttcaagaatcaagagtttgatgctgccgccaaagagatcaccaaggcattaacaactgttggtatctctcatattattgacactactgcaatttctattgggaggagatatgggaggaccgatgagattggtgttccatttgttgtggcaatggattcaacaaacgtgacgatccgagagagggatgacaaggagcagatccgtgtggacatcaacgaggtggcgtccgtggtgaaatagctgatagaaggccaaagcacctgtgcagatgtttttgcaaagcatactgcccatatataaatagacatggatattttggacttggcaaaatatgcatctgtacctgtcataaatggtctcactgactataaccatccatgccagataatggctgatgcacttactatgcttgagcagattggtcgtattgaaaacactaagggatttgagcctgatgcacacacagtggagatggccaggggtgctggaatcagtaagattgaaataacaaaccgtcccagggaagcagttaagggagcagacattgtgtacacagatgtttgggccagtatgggacaaaaggaagaagttgattatagaaaacagaagttccagggattcacggtggatgaaaccctgatggagattgctggcccataggcctaccttatgcactgtttgcttgctgagagagaggagtggaggtgactgatggcggcggcgccattgaggctcccaattcaatcgtgttcccccaggttgagaacagaatgcacgctcagaacgccatcatgcttcacgtgctcggtgcttaactctcctattgcacaccactacaccagtgacacgctcctcttagattattgggcattgttgtcttgctgaagcattgaggctgttttggctttagggcatatatgagagcttagttcagacgaactgtttagtaaggtgataacggttcttcagggtgggagtttgttgtgctgtaaaggtttggtaacctgaataaaaataaacttatgtgttagtttcattcgagaatcgtgacagttttaactttgaaaggcacgtttggccgagaccctggatcagttttgcctggctccat

SEQ ID NO: 6218 - DNA, 3283 bp, Zea Mays
attataatgggaaattggtggactgcatggaagatacccgtaggacccacgatgccgcgtgtgcagcagcagcaggacaccccgccgcggggaggcgccaccccaagaagcgtcgtcgcagggacatggattccccatcactaactctgacccctaatgcatcatgctggtcatcctcattcaggccgctgcggcggagtgcgcgacaggtgaaggcagcagcgaggatgatggtgacgccgcgtggaaggcagccattgactccatcgtctccgttggattcagcgtcccttcgtccaacggcatggtgaaggcagcctctagcggcaacgacgaggtgaacaaccacgtggatctggaagagccgcgtgagaggaaactaaagggtcctggcttaagttgtatcagccaaacaggctcctaaggatttccttcaaatcattgattttgacaaggatacaataatgaaggttcttaatcgagccattgaggttaaggcattgataaagtctggagacaagagcttccaaccgttcaaagggaaaacaatggtcatgatttttgccaagccatcaatgaggacccgtgtttcatttgagacaggattctttttacttggtgggcatgctatttatttgggtccagatgttatccagatgggcaagcgtggcctgtttcataatgagacacataccactttttcataatgcaaggcttcgcttttgccaaaaggaattttagtctgttcatgttgtttatctcttatgtacagctacaacgcccaagaagattgaaaggggaaaatgcgcagtactcgatctacttatcctgcaagaagcaacttcaatgataagaacaagcttggggaaggcgggtttagtaccgtgtacaagttgtacaggtaagcaacacaactcagtatgcaagggagcgaagcgtagcatcgtctgcgctcttcttccttcgcatcaaggtggatgaattttatagggaaaggtcacagatagaaataaaataccggtgaagaacttgtcccggtgtagtatacaaagactggaccagctgcacaatgagatgcaagtatcggtcaatcttcaacacgagaagcttgtcagactattggggttctgcatgcaccgggacgagatgatgctcgactatgcacatatgaagaacggaagccttgacaggtttctatttgactaagcaatgatagtagatattgttgatctgtcaatgatgatgatgaggtggttgtcacagaagaacacaatattgatagaaatggtgtttatgcgaaggcatttttcttacttgacaagtgacaatgacattcttgaaagagagcatattttcttacgaacaagggagattctattcaggcacatcatttcttaaacaagggttcattatagatgatggacaagctgaagttgcccagtgcatggtaacattagagatgcaaaatcttggatcagatggtggatgttatgcttctcaatgcacagagatattgcggtgcaaatacttagaggagatggtggacggagtgatgctgcccactccacaggaacactactgatacgagaacttaaaacaaatggtggacaacatgatgcggtccagtgcatatcaagtctacatgtgcaaaagcttagagaaaatcaaatcaagctttatgggtcctcgtccttcctagaatctattgtagatgacacaagaggtgattttactcactacacaatagactgcaatggcataaagctcagtgcaccacaacattgctaagacaggagtttcaagctgcacgtgatagcatgcaagaggttatggtgagaaattcagttgaagctaccacatccttgacaagtacacaacaagggagacacatgagaactggattattcaatgtgtcaactgtgacaccatttccccggcaattttgatcttgccacgtcaaggtcttctccgagtgagtgaattcacattgatagagattgggcatttcgtggacctagaggacaaatcacatccaaaatttgttgatgtggctcctatcaagtgcaccgtgttcccctcttcaagaatcaagagtttgatgctgccgccaaagagatcaccaaggcattaacaactgttggtatctctcatattattgacactactgcaatttctattgggaggagatatgggaggaccgatgagattggtgttccatttgttgtggcaatggattcaacaaacgtgacgatccgagagagggatgacaaggagcagatccgtgtggacatcaacgaggtggcgtccgtggtgaaatagctgatagaaggccaaagcacctgtgcagatgtttttgcaaagcatactgcccatatataaatagacatggatattttggacttggcaaaatatgcatctgtacctgtcataaatggtctcactgactataaccatccatgccagataatggctgatgcacttactatgcttgagcagattggtcgtattgaaaacactaaggttttctatgttggagatgggaacaacattgtgcactcatggctgttattggctgatgtgcttccttttcactttgtatgtgcttgtcccaagggatttgagcctgatgcacacacagtggagatggccaggggtgctggaatcagtaagattgaaataacaaaccgtcccagggaagcagttaagggagcagacattgtgtacacagatgtttgggccagtatgggacaaaaggaagaagttgattatagaaaacagaagttccagggattcacggtggatgaaaccctgatggagattgctggcccataggcctaccttatgcactgtttgcttgctgagagagaggagtggaggtgactgatggcggcggcgccattgaggctcccaattcaatcgtgttcccccaggttgagaacagaatgcacgctcagaacgccatcatgcttcacgtgctcggtgcttaactctcctattgcacaccactacaccagtgacacgctcctcttagattattgggcattgttgtcttgctgaagcattgaggctgttttggctttagggcatatatgagagcttagttcagacgaactgtttagtaaggtgataacggttcttcagggtgggagtttgttgtgctgtaaaggtttggtaacctgaataaaaataaacttatgtgttagtttcattcgagaatcgtgacagttttaactttgaaaggcacgtttggccgagaccctggatcagttttgcctggctccat

SEQ ID NO: 6219 - DNA, 3827 bp, Zea Mays
ctactagtttgcaaagcacgttgggccttgagagcccatatatcccggtacagcaagcaattcagggagcggaagcggccgatccgcggggcgacgaaccgggtacacacgacacgacaaagagaggatgcatgcaccaccatgcgcgggagggggaagaggagtcagtgagacgaggccgcggaaccccgtgccatcggatcgaggcagacgatgcccgtgcaggacgacgacgagagcgtctcttggttggtgcatggctccgccggggacgcgccggcggtgctgctgcacggcagcctggacatctggatccacgaggcgaggaaccttcccaacaaggacatcctgtccaagaggatgcgggacctgctgtgcaagccgtcggagggcatgaccagcgacccgtacgtgacggtgcaggtcgcctccgcggtggtggcgcgcaccttcgtcatccccgacgacgagaaccccgtgtgggcgcagcagttcctggtgcccgtcgcgcacgaggccgccaccgtcaacttcgtcgtcaaggacagcgacgtcgtgggcgcggagctcatcggcgtcgtcgccgtccgcgccgaccagctgcaggccggggacatggtcgagggcgcgtacccggtcctggagcgcaacggcaaggagtgcgcgccgggggccgtgctccggctgtccgtgcagtacgtgcccgtggcgaggctcaccatgtaccaccacggcgtcaccccgggcccggacttcgccggcgtgcccaggacctacttcccgctgcgccggggcgggaaggtcacgctgtaccaggacgcgcacgtgcccgacggaacgctgccggaggtaaggctcggcaacggcgactgctaccggcacggccagtgctggcgcgacgtctacgacgccatatgccaggcccggaggctcatctacatcaccgggtggtccgtgttccacaccatccacctggtgcgcgacggccacgacgacatggcgctcggcgacctgctcaggaggaagtcgcaggagggcgtgcgggtgctgctgctcgtgtgggacgatcccacgtcccggagactccttggcatcaagatggaaggttacatgggcacaagggatgaggagacccggagatttttcaagcactcttcggtccagatactgctttgcccacgatctgcagggaagaggcacagctgggtgaagcaacaggaaacaggcactatctttactcatcaccagaagacagtgatcttggatgctgatgctgggaatcatagaaggaagattgttgcttttgtgggaggacttgatctatgtggaggccggtcgcataatgattcgctgctgtggatcaacaagatacctgatattatcgctattgacgacgaaatctattcaaacgacgatgatccagagagatgggacgtgcagattttccggtcaattgattcgaattctgtcaagggttttccaaaagatccacgggaggccactagtaagaatcttgtttgtgggaaaaatgtactgattgatatgagcgtgcatacagcatatgtgaatgccatccgaggtgctcaacatttcatctatattgagaaccagtacttccttggctcttcatttaactgggattcacatagagatgttgaaaatgacaatgcaaatgatgtatgagataatctataaggccttgaaagaagtaggactagatggtacatatgagccacaggattacctgaatttcttctgccttggtaaccgtgaagctgaggacactacttgcacatctagtggaccattctcagccagtaacccacaggaccaagctcggaagaataggagattcatggtgtatgtgcactcgaaaggcatgattgtggatgatgaatatgtgataattggatccgctaacatcaaccagagatccatggaaggaactagagatacagagattgcaatggctgcataccaaccccagcatacatgggcaaatatgctttctgctcctcgtggacagattttcgggtacaggatgtctctatgggcagagcacattggagccattgaggagagcttcaccagaccggagagcctagagtgcacgaggcaggtgcgtcacatcggacagcagaactgggagaaattcatctccagccatgtgaccgagatgaagggccacctgctcaagtaccccgtcagcatcgattccaggggcaaggtgaatcctctgtctgggtgtgccacattcccagatcttggcgggaacatctgcggctccttcctgaatatccaagagaacctcacaatatgagcagtgcttataggtcacccaagtcactgcagtgacattgaccccaccttcagcattgtatcagcagaaaagaaaactccatatttcctgaatcgattcaagagatcacctagctttctgtaggaaggtcaacaccagagattaataggttagtaccttgtaaccaacaacagggtcatcagtggttcgtcagttcagttcgcatggtgcatccaagcaaaatctaaatgtgactgctattttatatctaactcttccatctgatacataccacctattttacatttaactccttcgacctaaaataccagttactactttggccccattcatccatgagggtgaagaggtcggaacgatgttcctttatctaaaaaatcagttactactggattttgaccaacatgattattacattggacatgttcccatttttttgaagttaaacaatagtgcatctggctctatacttttgtaagtaaggcctcctttgggttgaagtataaattcctgaatcttgcgtttttcttgtgtttttgaactaattcatgtaaaattttttatagcattccaaaggagacctaaaagtagtttctgcataagataaaaaaggattgtagctcacctgcaggtgctactaacctactacttacaatcatctgacatatataatggaaagaatatccggattcgaatcggactaccttatccgacaacgaccgaatcgagtttaccaaaggaattcgacattttcaaaattggctaacccagcgtttggaagtcagtattgcagcgtggaattcggaattggcatttgtctgtacgaatactgttgtttggttggcgccggaattcgacggtggaattgcacgtcaataccgaggtggaattgcagcacacacgccgtcaattccgagggctacccctctgatttgcacagaattgaggtccatttcaataccgaggtagaattggtatttggatccatttcaattctatggatgtctacatccaaacggagcctaagcgcatttcgaaggagtagctcaaatatgttagtgaaacaaccgtcatttaattaatcaatctgataaatctcgcaagcaccgtagtagcagcaggaatccgaaataaggggaaccggacgtcgatagaacgagataatcacctgtagacgcccaccgggcgaacctccgagttccgccgctaccaggaaccgggagcaagcacctgtctccccactgattgattcatccgttgcggagcaacgccacgtaatcgaccccaacctccgtttcttcaccatgagctgcacactggtgcgtcgagattatggaacgaactcggttcagcgagtgttaggaggcgggcgaggggggacactgcagcatcggggtccggattagtattctagtagggcgcgcgacaggtgatatccgacgaaaggggaggcgaggccgcggaaggagcagaaccccatcgacgacgatggacggacgcatcggaa

SEQ ID NO: 6220 - DNA, 731 bp, Zea Mays
ctgcaagcaggtatgaccagaagaaaggtgattgatatgcttctgttcaacgcgacggaggagctgaacaacatagtcgaacatgcaaagcagcgccatcatgtgattgggcagtatgtgatcggccaagagggcctggtgcacgagctggggtcgaaggatctagggaactctgactttctgaagaaattctacacaagcaattacttctgatctgtgttgcagatttacaacatctggtatactccgggtggtgctctgaataagacgacactgaggacctatcaggaccgattgtttcgcactggaggttttgatctatttggctcttgaatcctctgttcaatgtgatactgctgtcagctgtttgtcttgtttactgttgtacttatcaaattgatgttgatgttttagtcgattcgagtaatcgagtctacaagattgaactttgttgctacagcgagtaccgagcagtgccccccccccccccctttttttttttagaaacagccctcagcttttagtagagaaagggactaaacatgtcttccaacataaaaactaagggcctatttgttttagcttttttgttttttgttaagcatgttcgcttggttttaatttataatgggttctactccttctacagtgttttttttttggtattgtgtccgcaggatttcaagctatgattcttgttccaacataatacttgccatgcaatggctgaa

SEQ ID NO: 6221 - DNA, 416 bp, Zea Mays
ctctttccggcccaaccacgaaccactcctcctacagaaatcacctgccggcctggcctttccgtagctacaaccgaagccaccaccagcagtccagcacgactagcggaataatatccaccggcgacgggaacgggaggcggcgcggccggagattcgaagcgatggcgttcacgatgcgggcagtgaaggtgcctccgaactcggcctcgctggaggaggcccggcaccgcgtcttcgatttcttcaagcaggcatgccgctctatccccaccgtcatggagatctacaacctcgacgacgttgtcacgccctctcagctccgctcgaccatcgctaaggagatccgtaaaaaccagaacgtcaccaaccccaagaagccagttgaaaggataagaataggtggcgttagctgg

SEQ ID NO: 6222 - DNA, 463 bp, Zea Mays
aaactgcgtcgccctctttccggcccaaccacgaaccactcctcctacagaaatcacctgccggcctggcctttccgtagctacaaccgaagccaccaccagcagtccagcacgactagcggaataatatccaccggcgacgggaacgggaggcggcgcggccggagattcgaagcgatggcgttcacgatgcgggcagtgaaggtgcctccgaactcggcctcgctggaggaggcccggcaccgcgtcttcgatttcttcaagcaggcatgccgctctatccccaccgtcatggagatctacaacctcgacgacgttgtcacgccctctcagctccgctcgaccatcgctaaggagatccgtaaaaaccagaacgtcaccaaccccaagaggcgtgctccaagaaagagtggcatttcagacaccttgctgattcagatagcaggtttgaactttgaagaag

SEQ ID NO: 6223 - DNA, 1734 bp, Zea Mays
ccgaaatcccccctctagtcaactaacacgacttttctccacagtttttgcgtttgccttttaacatgctgatggatcgattggaaatgcaggacgactcgaagagatccaataggcccaaatattctaagtttacgcagcaagagcttccagcatgcaagccactgctaactccagcaattgtcatttccgccttcttactggttggcatcctattcgtcccaattggtctcgcatcgctttctgcgtcacaagagattgtggagctggtagatagatacgatacaagttgtgtgcccgtggctgacaaagttgggttcattcagaacactaaaacggacaaatcatgcacaagaactctaactatccctaagcatatgaagagcccaattcaaatatattaccagatcggtgacttctatcaaaaccatcgacggtatgtgaaaagtcgcagtgataaacaattgcgatataaagatgctgcacacttgacaaaagattgtgagcctgaagtttatagtgctggcggtgccccaatcgttccatgtggcctcgttgcttggagtttgttcaatgatacatatacaatttcggtcaacaagaaagctattgtagtgaataaaaaggatatagcctggcagagtgacaagaagaaaaaatttggcagtgatgtttatcccagtaactttcagaacggaaatcttataggtggcgctaagctaaatgagagcataccgctaagtgagcaagaagatctcattgtttggatgagaactgctgccctcccaactttcagaaagctttatggaagaattgagacagatattatggaaaatgatgaactcacagtggttatacagaacaactataacacatacagttttggagggtcaaaagcactggtcctctcaactacatcttggattggaggcaaaaataatttcattggtttcgcatatctgattgttggtggtttttgccttttccttgcactggtttttgtagttctctacatgattaagccaaggactcttggagacacctctttcttgtcatggaataggggtaccatggactatccaagctaatacatcgaaacattctctttataaaaatagtggaaggacccattgccaattggactgcactgcagagtctcatgcattgctcacctcaaagaatgacactgcaaacaaaggtggaaacgatgttactcctatctgttacggatgcactacctgtgtctgataaaggaaagtacaattctagcatatgatacctcaaacttgattaattatagataaaagaagttcagcttgtgtttcagaaacgtcatgctgagtacaattctagcatatgataacttactgcagcttggtaattacgatttactagctgcacattcccaaatctgcagcatgtgcgttcaacgatgaggtgtttggacgaaggagttttgcaccttcttccattgttaagagcagtagatggtgaggaagtacctggagaggtcgtggtgtcgacggagaagctggcgagggggatgacgaacgacttaatcctccccgtgcagtacttcgtcttggatgccatcttggacgtgttctgcagtacggtgagcatgagcacttctcagaatccggtggagcaagcaggcaagctgcatgcagctccgtctccgaacgagacctacctgcatgagaaggtagctcttgccatcgccggagttcttga

SEQ ID NO: 6224 - DNA, 1700 bp, Zea Mays
gggacaacaaagttaaagcggcgaaagaagcgtgctgatggatcgattggaaatgcaggacgactcgaagagatccaataggcccaaatattctaagtttacgcagcaagagcttccagcatgcaagccactgctaactccagcaattgtcatttccgccttcttactggttggcatcctattcgtcccaattggtctcgcatcgctttctgcgtcacaagagattgtggagctggtagatagatacgatacaagttgtgtgcccgtggctgacaaagttgggttcattcagaacactaaaacggacaaatcatgcacaagaactctaactatccctaagcatatgaagagcccaattcaaatatattaccagatcggtgacttctatcaaaaccatcgacggtatgtgaaaagtcgcagtgataaacaattgcgatataaagatgctgcacacttgacaaaagattgtgagcctgaagtttatagtgctggcggtgccccaatcgttccatgtggcctcgttgcttggagtttgttcaatgatacatatacaatttcggtcaacaagaaagctattgtagtgaataaaaaggatatagcctggcagagtgacaagaagaaaaaatttggcagtgatgtttatcccagtaactttcagaacggaaatcttataggtggcgctaagctaaatgagagcataccgctaagtgagcaagaagatctcattgtttggatgagaactgctgccctcccaactttcagaaagctttatggaagaattgagacagatattatggaaaatgatgaactcacagtggttatacagaacaactataacacatacagttttggagggtcaaaagcactggtcctctcaactacatcttggattggaggcaaaaataatttcattggtttcgcatatctgattgttggtggtttttgccttttccttgcactggtttttgtagttctctacatgattaagccaaggactcttggagacacctctttcttgtcatggaataggggtaccatggactatccaagctaatacatcgaaacattctctttataaaaatagtggaaggacccattgccaattggactgcactgcagagtctcatgcattgctcacctcaaagaatgacactgcaaacaaaggtggaaacgatgttactcctatctgttacggatgcactacctgtgtctgataaaggaaagtacaattctagcatatgatacctcaaacttgattaattatagataaaagaagttcagcttgtgtttcagaaacgtcatgctgagtacaattctagcatatgataacttactgcagcttggtaattacgatttactagctgcacattcccaaatctgcagcatgtgcgttcaacgatgaggtgtttggacgaaggagttttgcaccttcttccattgttaagagcagtagatggtgaggaagtacctggagaggtcgtggtgtcgacggagaagctggcgagggggatgacgaacgacttaatcctccccgtgcagtacttcgtcttggatgccatcttggacgtgttctgcagtacggtgagcatgagcacttctcagaatccggtggagcaagcaggcaagctgcatgcagctccgtctccgaacgagacctacctgcatgagaaggtagctcttgccatcgccggagttcttga

SEQ ID NO: 6225 - DNA, 1843 bp, Zea Mays
tcatagggacgtggctaatcgcgatcctgctgtctccttggaggttccggacgcatgtgaccgtggaattccattcctcgtgcgcgattaggttgagacgtcgtgatcctcgtgcgcccgccgtacaaacccgtgatcctaattgtgctgatggatcgattggaaatgcaggacgactcgaagagatccaataggcccaaatattctaagtttacgcagcaagagcttccagcatgcaagccactgctaactccagcaattgtcatttccgccttcttactggttggcatcctattcgtcccaattggtctcgcatcgctttctgcgtcacaagagattgtggagctggtagatagatacgatacaagttgtgtgcccgtggctgacaaagttgggttcattcagaacactaaaacggacaaatcatgcacaagaactctaactatccctaagcatatgaagagcccaattcaaatatattaccagatcggtgacttctatcaaaaccatcgacggtatgtgaaaagtcgcagtgataaacaattgcgatataaagatgctgcacacttgacaaaagattgtgagcctgaagtttatagtgctggcggtgccccaatcgttccatgtggcctcgttgcttggagtttgttcaatgatacatatacaatttcggtcaacaagaaagctattgtagtgaataaaaaggatatagcctggcagagtgacaagaagaaaaaatttggcagtgatgtttatcccagtaactttcagaacggaaatcttataggtggcgctaagctaaatgagagcataccggtatgtgagagagtttctgtgtcttcaacactaagtgagcaagaagatctcattgtttggatgagaactgctgccctcccaactttcagaaagctttatggaagaattgagacagatattatggaaaatgatgaactcacagtggttatacagaacaactataacacatacagttttggagggtcaaaagcactggtcctctcaactacatcttggattggaggcaaaaataatttcattggtttcgcatatctgattgttggtggtttttgccttttccttgcactggtttttgtagttctctacatgattaagccaaggactcttggagacacctctttcttgtcatggaataggggtaccatggactatccaagctaatacatcgaaacattctctttataaaaatagtggaaggacccattgccaattggactgcactgcagagtctcatgcattgctcacctcaaagaatgacactgcaaacaaaggtggaaacgatgttactcctatctgttacggatgcactacctgtgtctgataaaggaaagtacaattctagcatatgatacctcaaacttgattaattatagataaaagaagttcagcttgtgtttcagaaacgtcatgctgagtacaattctagcatatgataacttactgcagcttggtaattacgatttactagctgcacattcccaaatctgcagcatgtgcgttcaacgatgaggtgtttggacgaaggagttttgcaccttcttccattgttaagagcagtagatggtgaggaagtacctggagaggtcgtggtgtcgacggagaagctggcgagggggatgacgaacgacttaatcctccccgtgcagtacttcgtcttggatgccatcttggacgtgttctgcagtacggtgagcatgagcacttctcagaatccggtggagcaagcaggcaagctgcatgcagctccgtctccgaacgagacctacctgcatgagaaggtagctcttgccatcgccggagttcttga

SEQ ID NO: 6226 - DNA, 1804 bp, Zea Mays
ctccagtctccctctcctctcttcgtcctcactcctcgacgtttcgtcggggtctctcgccgtcgctctctctgctctccaccatcctcctccccctcccctcgacctctcatcctcctcctgcttccccgcccggtcaacccataatccaaggcatccctggacgactcgaagagatccaataggcccaaatattctaagtttacgcagcaagagcttccagcatgcaagccactgctaactccagcaattgtcatttccgccttcttactggttggcatcctattcgtcccaattggtctcgcatcgctttctgcgtcacaagagattgtggagctggtagatagatacgatacaagttgtgtgcccgtggctgacaaagttgggttcattcagaacactaaaacggacaaatcatgcacaagaactctaactatccctaagcatatgaagagcccaattcaaatatattaccagatcggtgacttctatcaaaaccatcgacggtatgtgaaaagtcgcagtgataaacaattgcgatataaagatgctgcacacttgacaaaagattgtgagcctgaagtttatagtgctggcggtgccccaatcgttccatgtggcctcgttgcttggagtttgttcaatgatacatatacaatttcggtcaacaagaaagctattgtagtgaataaaaaggatatagcctggcagagtgacaagaagaaaaaatttggcagtgatgtttatcccagtaactttcagaacggaaatcttataggtggcgctaagctaaatgagagcataccgctaagtgagcaagaagatctcattgtttggatgagaactgctgccctcccaactttcagaaagctttatggaagaattgagacagatattatggaaaatgatgaactcacagtggttatacagaacaactataacacatacagttttggagggtcaaaagcactggtcctctcaactacatcttggattggaggcaaaaataatttcattggtttcgcatatctgattgttggtggtttttgccttttccttgcactggtttttgtagttctctacatgattaagccaaggactcttggagacacctctttcttgtcatggaataggggtaccatggactatccaagctaatacatcgaaacattctctttataaaaatagtggaaggacccattgccaattggactgcactgcagagtctcatgcattgctcacctcaaagaatgacactgcaaacaaaggtggaaacgatgttactcctatctgttacggatgcactacctgtgtctgataaaggaaagtacaattctagcatatgatacctcaaacttgattaattatagataaaagaagttcagcttgtgtttcagaaacgtcatgctgagtacaattctagcatatgataacttactgcagcttggtaattacgatttactagctgcacattcccaaatctgcagcatgtgcgttcaacgatgaggtgtttggacgaaggagttttgcaccttcttccattgttaagagcagtagatggtgaggaagtacctggagaggtcgtggtgtcgacggagaagctggcgagggggatgacgaacgacttaatcctccccgtgcagtacttcgtcttggatgccatcttggacgtgttctgcagtacggtgagcatgagcacttctcagaatccggtggagcaagcaggcaagctgcatgcagctccgtctccgaacgagacctacctgcatgagaaggtagctcttgccatcgccggagttcttga

SEQ ID NO: 6227 - DNA, 1242 bp, Zea Mays
ggacgcatgtgaccgtggaattccattcctcgtgcgcgattaggttgagacgtcgtgatcctcgtgcgcccgccgtacaaacccgtgatcctaattgtgctgatggatcgattggaaatgcaggacgactcgaagagatccaataggcccaaatattctaagtttacgcagcaagagcttccagcatgcaagccactgctaactccagcaattgtcatttccgccttcttactggttggcatcctattcgtcccaattggtctcgcatcgctttctgcgtcacaagagattgtggagctggtagatagatacgatacaagttgtgtgcccgtggctgacaaagttgggttcattcagaacactaaaacggacaaatcatgcacaagaactctaactatccctaagcatatgaagagcccaattcaaatatattaccagatcggtgacttctatcaaaaccatcgacggtatgtgaaaagtcgcagtgataaacaattgcgatataaagatgctgcacacttgacaaaagattgtgagcctgaagtttatagtgctggcggtgccccaatcgttccatgtggcctcgttgcttggagtttgttcaatgatacatatacaatttcggtcaacaagaaagctattgtagtgaataaaaaggatatagcctggcagagtgacaagaagaaaaaatttggcagtgatgtttatcccagtaactttcagaacggaaatcttataggtggcgctaagctaaatgagagcataccgctaagtgagcaagaagatctcattgtttggatgagaactgctgccctcccaactttcagaaagctttatggaagaattgagacagatattatggaaaatgatgaactcacagtggttatacagaacaactataacacatacagttttggagggtcaaaagcactggtcctctcaactacatcttggattggaggcaaaaataatttcattggtttcgcatatctgattgttggtggtttttgccttttccttgcactggtttttgtagttctctacatgattaagccaaggactcttggagacacctctttcttgtcatggaataggggtaccatggactatccaagctaatacatcgaaacattctctttataaaaatagtgggcattgttcatttgatacaaccagtccagtttatttcaattattaattgtgtcagcattaatcccttttatggccaaaagaggatgtgtc

SEQ ID NO: 6228 - DNA, 1179 bp, Zea Mays
ggacgcatgtgaccgtggaattccattcctcgtgcgcgattaggttgagacgtcgtgatcctcgtgcgcccgccgtacaaacccgtgatcctaattgtgctgatggatcgattggaaatgcaggacgactcgaagagatccaataggcccaaatattctaagtttacgcagcaagagcttccagcatgcaagccactgctaactccagcaattgtcatttccgccttcttactggttggcatcctattcgtcccaattggtctcgcatcgctttctgcgtcacaagagattgtggagctggtagatagatacgatacaagttgtgtgcccgtggctgacaaagttgggttcattcagaacactaaaacggacaaatcatgcacaagaactctaactatccctaagcatatgaagagcccaattcaaatatattaccagatcggtgacttctatcaaaaccatcgacggtatgtgaaaagtcgcagtgataaacaattgcgatataaagatgctgcacacttgacaaaagattgtgagcctgaagtttatagtgctggcggtgccccaatcgttccatgtggcctcgttgcttggagtttgttcaatgatacatatacaatttcggtcaacaagaaagctattgtagtgaataaaaaggatatagcctggcagagtgacaagaagaaaaaatttggcagtgatgtttatcccagtaactttcagaacggaaatcttataggtggcgctaagctaaatgagagcataccgctaagtgagcaagaagatctcattgtttggatgagaactgctgccctcccaactttcagaaagctttatggaagaattgagacagatattatggaaaatgatgaactcacagtggttatacagaacaactataacacatacagttttggagggtcaaaagcactggtcctctcaactacatcttggattggaggcaaaaataatttcattggtttcgcatatctgattgttggtggtttttgccttttccttgcactggtttttgtagttctctacatgattaagccaaggactcttggagacacctctttcttgtcatggaataggggtaccatggactatccaagctaatacatcgaaacattctctttataaaaatagtgggagtcgtggctaacattaatattctcc

SEQ ID NO: 6229 - DNA, 1389 bp, Zea Mays
ctgctgtctccttggaggttccggacgcatgtgaccgtggaattccattcctcgtgcgcgattaggttgagacgtcgtgatcctcgtgcgcccgccgtacaaacccgtgatcctaattgtgctgatggatcgattggaaatgcaggacgactcgaagagatccaataggcccaaatattctaagtttacgcagcaagagcttccagcatgcaagccactgctaactccagcaattgtcatttccgccttcttactggttggcatcctattcgtcccaattggtctcgcatcgctttctgcgtcacaagagattgtggagctggtagatagatacgatacaagttgtgtgcccgtggctgacaaagttgggttcattcagaacactaaaacggacaaatcatgcacaagaactctaactatccctaagcatatgaagagcccaattcaaatatattaccagatcggtgacttctatcaaaaccatcgacggtatgtgaaaagtcgcagtgataaacaattgcgatataaagatgctgcacacttgacaaaagattgtgagcctgaagtttatagtgctggcggtgccccaatcgttccatgtggcctcgttgcttggagtttgttcaatgatacatatacaatttcggtcaacaagaaagctattgtagtgaataaaaaggatatagcctggcagagtgacaagaagaaaaaatttggcagtgatgtttatcccagtaactttcagaacggaaatcttataggtggcgctaagctaaatgagagcataccgctaagtgagcaagaagatctcattgtttggatgagaactgctgccctcccaactttcagaaagctttatggaagaattgagacagatattatggaaaatgatgaactcacagtggttatacagaacaactataacacatacagttttggagggtcaaaagcactggtcctctcaactacatcttggattggaggcaaaaataatttcattggtttcgcatatctgattgttggtggtttttgccttttccttgcactggtttttgtagttctctacatgattaagccaaggactcttggagacacctctttcttgtcatggaataggggtaccatggactatccaagctaatacatcgaaacattctctttataaaaatagtgggattataggatccatgggtgtggatatgctcctagtgcacatttcaggaccaatctctgtgaccccttcatcctgtgttattatagttccactgatcaacaaccttgttctggagaaatcataaatcaattaaatgaaaggaaagaggtagcgaaatgaaaacacaggtcatgcctttgcaagattcctgaagtaaattgttatgtagttccccg

SEQ ID NO: 6230 - DNA, 1028 bp, Zea Mays
aaataattgtgagacacaaatctattgatgtaacttttacatgctaattgatgtaacttttacatgctaaacgtgtgtataattcggctaactgttagccaaattgtacaaagttttgacggtttcaaatcataatacgtccaccgttttctgctgggcacatgcaacaattaacctttttttagctcatgagttcattctgctaggtgggtcaccttctgtttcagtcatgtgacccttttagtttgcctgcctttcggtcgcaaactttggccgtcctcagggttgatccggatcgtccgttacaacactgatgatggtgccaatgtgctgcactaactggttcctttttctactcccctcttcacgaaacacgtgaggctagctcgtttgcggagaggaaaaagaaaagctcatgaattcgatgccaagatcgagcggaaacgggcgcgcgagcaagacaggctcgccagcaaactggcagcggtgagccaccgagcggaggcgaagagggaggccgcggaggcgaggcgggaccaggaagccgcgagaacggaggagcaggcggctcagatccgagaaaccgggcacacgccttcctctttctcatgctggtgctggtgcctgtgactctgattccttcactgcatgaccagcacagcacgtcacccgactgtaacatagcatgacccgtgagactgtgatctccggccatggtagaaaaatttgctcactgtacgacttgtgtagtgccttggtctaatggtgtccagttttttggtacctcgcgattaatatgggctgttaggccggttgggctgtggacggtagataaggcccgtagaggatttttggagatgggctcggatcgtcagctcggcctaggaattggatcgcaggcaaatcccaacggctcctgtcgttccttcccatgaacaggaggaaaaccttctggttcttttttttcttcagaaaggaggatcccccatttcattatgaaataggaaaccagttgcagacgacttaca

SEQ ID NO: 6231 - DNA, 1705 bp, Zea Mays
ctgagaatgagatcttcttgtcgcttccgcccgttgtttcagcttttcttcggttcgaattcagtagtttctcgtccggcggattctccccagctaagctgcgagcgatgcttcgcgggctagagaaacaccagcgcaacagcggcgaggacacgtcgccggaggccaacgactccggcgagctcgacgaccggaggagcttggaatgctccacctccaccgagatgtcgagcaacagcggccacaggtcaaggaaccgggccccggacgacgacagcttcgactcggagagcagctcgtcggggccgcccacggtgaagaggtcggccgcggtggccgctttgctgccgcccttctctcgcccaacgccgtccaagtgggacgacgccgagaagtggatttccagccccacgtccaaccgtactggccgtgccgggcctaccgctggaactatgccaaagaagtccgcattggcatttcctgaacatggagcccgccagccagccgttgctaaggtggtcacggatgtgcctactatcgctggaccattggttaagaattcagatggtcttgcccatcctgatttgcttaaacttgcacacgatgcttcaatagttgatggaccagctcctgcagttaggtctgtctctatgagagacatggggaccgagatgactccaattgccagccaggagccttctcggaccgcgactcctatgattgcatccagtccaacctcctctcggacaccaactcctcaacgcaccacagaattcagtgtgagcaatatagattctaacaagatggcgatgtctgaagaggaggtccatataagtacaagacaggaaattatggatcttggcgaaaggttaggcaagactactatagctgcatgggcaagcaaggaggagaaagctgctgcacgttctacggatactgcagccgataatgctgttgatgtcaacagggagaatcgagcggcagattggcaggaggcagagaaggcaaagtatcttgcaaggtttcatagggaggaggcaaagatccaagcttgggaaaatctccagaaagcgaaaattgaagctgaaatgaaaaggatagaggccaagatcgagcggaaacgggcgcgcgagcaagacaggctcgccagcaaactggcagcggtgagccaccgagcggaggcgaagagggaggccgcggaggcgaggcgggaccaggaagccgcgagaacggaggagcaggcggctcagatccgagaaaccgggcacacgccttcctctttctcatgctggtgctggtgcctgtgactctgattccttcactgcatgaccagcacagcacgtcacccgactgtaacatagcatgacccgtgagactgtgatctccggccatggtagaaaaatttgctcactgtacgacttgtgtagtgccttggtctaatggtgtccagttttttggtacctcgcgattaatatgggctgttaggccggttgggctgtggacggtagataaggcccgtagaggatttttggagatgggctcggatcgtcagctcggcctaggaattggatcgcaggcaaatcccaacggctcctgtcgttccttcccatgaacaggaggaaaaccttctggttcttttttttcttcagaaaggaggatcccccatttcattatgaaataggaaaccagttgcagacgacttaca

SEQ ID NO: 6232 - DNA, 1425 bp, Zea Mays
tgaagaaccggaggagcaggtccatacttcatctataacacgcagcaacagacgcagaattcttgcgtctcgctcggtcgctagcgcgcaatctgccgccgccgctaaatcgcattaaattaattaacaaatcccaccgccacaaatctacaactacaagacccacacacccgtcggtaaatgcaaagatcgcaagtccacggcccaccccccaaatcggccaatctccacttcttaagcctccctgttgcctcgcacggcctccgcctcctcgtcgtccggcctcccgcgccaccaccggggcctcgccgccacgaatggagtacgagcgcatccacgagccgctcccgcgccgtcagtccggcggattctccccagctaagctgcgagcgatgcttcgcgggctagagaaacaccagcgcaacagcggcgaggacacgtcgccggaggccaacgactccggcgagctcgacgaccggaggagcttggaatgctccacctccaccgagatgtcgagcaacagcggccacaggtcaaggaaccgggccccggacgacgacagcttcgactcggagagcagctcgtcggggccgcccacggtgaagaggtcggccgcggtggccgctttgctgccgcccttctctcgcccaacgccgtccaagtgggacgacgccgagaagtggatttccagccccacgtccaaccgtactggccgtgccgggcctaccgctggaactatgccaaagaagtccgcattggcatttcctgaacatggagcccgccagccagccgttgctaaggtggtcacggatgtgcctactatcgctggaccattggttaagaattcagatggtcttgcccatcctgatttgcttaaacttgcacacgatgcttcaatagttgatggaccagctcctgcagttaggtctgtctctatgagagacatggggaccgagatgactccaattgccagccaggagccttctcggaccgcgactcctatgattgcatccagtccaacctcctctcggacaccaactcctcaacgcaccacagaattcagtgtgagcaatatagattctaacaagatggcgatgtctgaagaggaggtccatataagtacaagacaggaaattatggatcttggcgaaaggttaggcaagactactatagctgcatgggcaagcaaggaggagaaagctgctgcacgttctacggatactgcagccgataatgctgttgatgtcaacagggagaatcgagcggcagattggcaggaggcagagaaggcaaagtatcttgcaaggtttcatagggaggaggcaaagatccaagcttgggaaaatctccagaaagcgaaaattgaagctgaaatgaaaaggatagagagacaatttaagagaagctcaacctggagaatctgac

SEQ ID NO: 6233 - DNA, 1408 bp, Zea Mays
cttcgcattccccaatccggccgcctcgacggatttcgactgcttccagatagctcggtcttccgataatagcatcgctcgcgcgcctccgtttgcttcgcattcttaaaacctagcatatgatttgattccgccagctgcttggtccggaaccgaggaggtggcgagggagtgggggtcacccggccatggcgacgatggacgcacgactgcaccttccacgccctcgccgcgctctacggcgtcgtttcattcctagccctagtaagccgaatccccccgcacgttttttgtttttttacccacctcctgcttagcttagcttgcaattggggctccgctttggtttggagccatgagttaaggcggggacgacggttcgttcaggcggagacgagccaatgtgtgtattcggtattccaaatacggttgatacaaactgaggcagacaggcagtggttaccagtctcattagctcatttgatgtcaatttcgccagttccaactgataagaatcgagtgccgggttcctgagtatgggtggacaacggcacaacgcagaagctgttccatttcctaaacgtcattgtcaatggtgtttccactgctgctggcggctgggcgtctggggtgatcggtgtggcctagttgttgcgtcgatcttggactcttggtcgattctcacagtaagagggagccgtgcgacatggacgtcacggcgtaaacacagagtatttgcaacgccagacgtagaacaggaatcacattgctgatttcttgccggacgagaatcagaacagaaggcggcactgggaattgcttgtgatcgagagaacgtgtgataggatcatatggttggctatttcagaagagtcggtggcgaacctgcagctgctcgtgagctggaaacttgcgaggcattcggggtgtgccactgtgcgcgtaaaagcgcgcacctgtctgtgtgatgatcggtcaccccccaacccagtcccagatgacaggacgaagcaacttgagacaagcgtaagaagaacaggttggccttgtccggcaggaatcgcggccggggcctcccggaatgattggcacgtcgaccggccggccgggaacacgggccagtcggcgtccgcacgcccgtgcgcggacgccaggccgacagacagatcgaggctgcgcagcgcagggcaggacagcgccggccggccaccacccgtccgggtgggccatggactgcaacgtacgggtgtgggccattctccttggaggaagccggagtggaggccagagaaacaggcaggcagagatgggagtctggcgcggctccgtcgacagctcgtcaaatgtcgagttggaccgagtagggaaaaaaaaaacgttgggtcatttttttcgtttataagatgac

SEQ ID NO: 6234 - DNA, 2739 bp, Zea Mays
cttcgcattccccaatccggccgcctcgacggatttcgactgcttccagatagctcggtcttccgataatagcatcgctcgcgcgcctccgtttgcttcgcattcttaaaacctagcatatgatttgattccgccagctgcttggtccggaaccgaggaggtggcgagggagtgggggtcacccggccatggcgacgatggacgcacgactgcaccttccacgccctcgccgcgctctacggcgtcgtttcattcctagccctagtaagccgaatccccccgcacgttttttgtttttttacccacctcctgcttagcttagcttgcaattggggctccgctttggtttggagccatgagttaaggcggggacgacggttcgttcaggcggagacgagccaatgtgtgtattcggtattccaaatacggttgatacaaactgaggcagacaggcagtggttaccagtctcattagctcatttgatgtcaatttcgccagttccaactgataagaatcgagtgccgggttcctgagtatgggtggacaacggcacaacgcagaagctgttccatttcctaaacgtcattgtcaatggtggtgagtacgccattctcctggtcagaatctgtgcttgcgggaacttgcaacttgtgcacattgagggttagtttgggagccataaaaccgaagggaattagagggggcgagaagccagattctccttcttattcaattttgaataataaagagaatttagtccatctaatcctctccgattttctcgctcccaaactagtcccgagggtttgagtaaggtggcaaattttatttcgcttctattagctggttggaacaattgcggtaatgtgtatcaatactttcttgtagatatttcaacctgtgcttattgatttgcctggcctagcattcttcacgtcctacactttgctagtgcttttttgggctgagatttactaccaagttaggtttcagttcaacagttcattttctcactgatgggcttataagagcatgtactcgccaaagaacaggtctctttttttcagcatgtcaatggctcttggttcttaaaaggttgataagatgttttaagtttgcacctattcttaatgtgtgctaacaaaggcaaggtacacggtagttaatcctatttaaacaccagtttgcattgtaggaatcgtcttctattttggtgcttaaagatacgtcaacattctctccctttaaacaatcatgtataagcaccttgcatcatacatgtcctaacaagttttgattttttttcttgtatcaacttttatgtcaaaggattaattttgcagtaatcaatctgttgatgatgtaaagtgatcacatgaaaaaatcagggacgttgttatagtttagagaacattatcacgaatatggttcaagtgttttcgtttttctggaacaacagaggagagatgggtgctatttcatttaagagggaagaaataatataaaggagatgatgtttgaatgctagtttggatcctagagactaattttttagtcccgtcacatcggatgtttgaatactagttagaagtattaaatataatttaattacaaaactaactacacatataagcactaaacagtaagacgagtttattttaaacctaattagtccatgctttgctcatatgatgctacaataaaaatttgctaatcatgaattaattttgcttaataaatccatctcgttgtttagtcttcatctatctgttttttataattagattatattcaatatttataattatcattcaaacatctgctatattttgtaattaactaccgccaacagtggaaacaggcaaggcgcaaggcacggaccgtcagccgttgctaatcatgcggtccataccttgcgtccttgccagtttccactgctgctggcggctgggcgtctggggtgatcggtgtggcctagttgttgcgtcgatcttggactcttggtcgattctcacagtaagagggagccgtgcgacatggacgtcacggcgtaaacacagagtatttgcaacgccagacgtagaacaggaatcacattgctgatttcttgccggacgagaatcagaacagaaggcggcactgggaattgcttgtgatcgagagaacgtgtgataggatcatatggttggctatttcagaagagtcggtggcgaacctgcagctgctcgtgagctggaaacttgcgaggcattcggggtgtgccactgtgcgcgtaaaagcgcgcacctgtctgtgtgatgatcggtcaccccccaacccagtcccagatgacaggacgaagcaacttgagacaagcgtaagaagaacaggttggccttgtccggcaggaatcgcggccggggcctcccggaatgattggcacgtcgaccggccggccgggaacacgggccagtcggcgtccgcacgcccgtgcgcggacgccaggccgacagacagatcgaggctgcgcagcgcagggcaggacagcgccggccggccaccacccgtccgggtgggccatggactgcaacgtacgggtgtgggccattctccttggaggaagccggagtggaggccagagaaacaggcaggcagagatgggagtctggcgcggctccgtcgacagctcgtcaaatgtcgagttggaccgagtagggaaaaaaaaaacgttgggtcatttttttcgtttataagatgac

SEQ ID NO: 6235 - DNA, 2249 bp, Zea Mays
cttcgcattccccaatccggccgcctcgacggatttcgactgcttccagatagctcggtcttccgataatagcatcgctcgcgcgcctccgtttgcttcgcattcttaaaacctagcatatgatttgattccgccagctgcttggtccggaaccgaggaggtggcgagggagtgggggtcacccggccatggcgacgatggacgcacgactgcaccttccacgccctcgccgcgctctacggcgtcgtttcattcctagccctagtaagccgaatccccccgcacgttttttgtttttttacccacctcctgcttagcttagcttgcaattggggctccgctttggtttggagccatgagttaaggcggggacgacggttcgttcaggcggagacgagccaatttccaactgataagaatcgagtgccgggttcctgagtatgggtggacaacggcacaacgcagaagctgttccatttcctaaacgtcattgtcaatggtgatatttcaacctgtgcttattgatttgcctggcctagcattcttcacgtcctacactttgctagtgcttttttgggctgagatttactaccaagttaggtttcagttcaacagttcattttctcactgatgggcttataagagcatgtactcgccaaagaacaggtctctttttttcagcatgtcaatggctcttggttcttaaaaggttgataagatgttttaagtttgcacctattcttaatgtgtgctaacaaaggcaaggtacacggtagttaatcctatttaaacaccagtttgcattgtaggaatcgtcttctattttggtgcttaaagatacgtcaacattctctccctttaaacaatcatgtataagcaccttgcatcatacatgtcctaacaagttttgattttttttcttgtatcaacttttatgtcaaaggattaattttgcagtaatcaatctgttgatgatgtaaagtgatcacatgaaaaaatcagggacgttgttatagtttagagaacattatcacgaatatggttcaagtgttttcgtttttctggaacaacagaggagagatgggtgctatttcatttaagagggaagaaataatataaaggagatgatgtttgaatgctagtttggatcctagagactaattttttagtcccgtcacatcggatgtttgaatactagttagaagtattaaatataatttaattacaaaactaactacacatataagcactaaacagtaagacgagtttattttaaacctaattagtccatgctttgctcatatgatgctacaataaaaatttgctaatcatgaattaattttgcttaataaatccatctcgttgtttagtcttcatctatctgttttttataattagattatattcaatatttataattatcattcaaacatctgctatattttgtaattaactaccgccaacagtggaaacaggcaaggcgcaaggcacggaccgtcagccgttgctaatcatgcggtccataccttgcgtccttgccagtttccactgctgctggcggctgggcgtctggggtgatcggtgtggcctagttgttgcgtcgatcttggactcttggtcgattctcacaaatcagaacagaaggcggcactgggaattgcttgtgatcgagagaacgtgtgataggatcatatggttggctatttcagaagagtcggtggcgaacctgcagctgctcgtgagctggaaacttgcgaggcattcggggtgtgccactgtgcgcgtaaaagcgcgcacctgtctgtgtgatgatcggtcaccccccaacccagtcccagatgacaggacgaagcaacttgagacaagcgtaagaagaacaggttggccttgtccggcaggaatcgcggccggggcctcccggaatgattggcacgtcgaccggccggccgggaacacgggccagtcggcgtccgcacgcccgtgcgcggacgccaggccgacagacagatcgaggctgcgcagcgcagggcaggacagcgccggccggccaccacccgtccgggtgggccatggactgcaacgtacgggtgtgggccattctccttggaggaagccggagtggaggccagagaaacaggcaggcagagatgggagtctggcgcggctccgtcgacagctcgtcaaatgtcgagttggaccgagtagggaaaaaaaaaacgttgggtcatttttttcgtttataagatgac

SEQ ID NO: 6236 - DNA, 1484 bp, Zea Mays
cttcgcattccccaatccggccgcctcgacggatttcgactgcttccagatagctcggtcttccgataatagcatcgctcgcgcgcctccgtttgcttcgcattcttaaaacctagcatatgatttgattccgccagctgcttggtccggaaccgaggaggtggcgagggagtgggggtcacccggccatggcgacgatggacgcacgactgcaccttccacgccctcgccgcgctctacggcgtcgtttcattcctagccctagtaagccgaatccccccgcacgttttttgtttttttacccacctcctgcttagcttagcttgcaattggggctccgctttggtttggagccatgagttaaggcggggacgacggttcgttcaggcggagacgagccaatgtgtgtattcggtattccaaatacggttgatacaaactgaggcagacaggcagtggttaccagtctcattagctcatttgatgtcaatttcgccagttccaactgataagaatcgagtgccgggttcctgagtatgggtggacaacggcacaacgcagaagctgttccatttcctaaacgtcattgtcaatggtgtggaaacaggcaaggcgcaaggcacggaccgtcagccgttgctaatcatgcggtccataccttgcgtccttgccagtttccactgctgctggcggctgggcgtctggggtgatcggtgtggcctagttgttgcgtcgatcttggactcttggtcgattctcacagtaagagggagccgtgcgacatggacgtcacggcgtaaacacagagtatttgcaacgccagacgtagaacaggaatcacattgctgatttcttgccggacgagaatcagaacagaaggcggcactgggaattgcttgtgatcgagagaacgtgtgataggatcatatggttggctatttcagaagagtcggtggcgaacctgcagctgctcgtgagctggaaacttgcgaggcattcggggtgtgccactgtgcgcgtaaaagcgcgcacctgtctgtgtgatgatcggtcaccccccaacccagtcccagatgacaggacgaagcaacttgagacaagcgtaagaagaacaggttggccttgtccggcaggaatcgcggccggggcctcccggaatgattggcacgtcgaccggccggccgggaacacgggccagtcggcgtccgcacgcccgtgcgcggacgccaggccgacagacagatcgaggctgcgcagcgcagggcaggacagcgccggccggccaccacccgtccgggtgggccatggactgcaacgtacgggtgtgggccattctccttggaggaagccggagtggaggccagagaaacaggcaggcagagatgggagtctggcgcggctccgtcgacagctcgtcaaatgtcgagttggaccgagtagggaaaaaaaaaacgttgggtcatttttttcgtttataagatgac

SEQ ID NO: 6237 - DNA, 919 bp, Zea Mays
gtctcgcccgccccaccggacgttccgggtcgggggcgacgcgtaccaggtgccggcggggcggagggacggcaacgtctcctcggcgcaggaggcgggcgcgaacctgccgccgccgacggcgagcgcgagccagctgacgcaggcgttcggcgccaaggggctgagccaggccgagatggtggcgctgtcgggggcgcacacggtgggcgcggcgcgctgcagctccttcgcgccccgcctctactcgtacgggcccagcggcgcggggcaggacccgtccatggaccccgcgtacctggcggcgctggcgcagcagtgcccgccgcaggggaccggcgccgccgacccgcccctccccatggaccccgtcacgcccaccgccttcgacaccaactactacgccaacctggtcgccaggcgcggcctgctcgcctccgaccaggcgctgctcgccgacccggccaccgccgcgcaggtgctcgcctacaccaacagccccgccaccttccagaccgacttcgtcgccgccatgatcaagatgggtgccatacaggtgctcaccggcacagccggcaccgtccggaccaactgcagggtggctagctagctagctcatccatgagaatgtacctgtagactcatgtgcttaaaatcatacgacgaaactgtacgtacggcgtagagtggtgtggcggggtccaatgattcagattgtacgtacgtgtccatcgatccaactgtagttgtgtacgcagtacagtacgtgctagctacggatcagttgcttatatatagcttgtgcgtttttttacactttcttttgtccttttggtttataatttttattaagatatacaaatatttctcttcagattcggatcgaatacaaatattaaaaatggttcgttctttttca

SEQ ID NO: 6238 - DNA, 1369 bp, Zea Mays
ctttcatccctctcgcaaatctcaatcaatcatacaccacaagggcccgcacccgtctctccctctctctcctcggctccacactactaagcagtatcgatggccccctcccacatgggatgtgcatgcacccccactatgccagttgccctatatataaaaccgcctggaccgaccggagtcccactagctccactccaccacacacaccgcgcagctagctgtcaccggagcaagaaggaagaaaaaccagcggcaccgatcgatcgacgacacgcgcgcgatcgaggggtgcgacgcgtcggtgctgctggactcgtcggcgggcaaccaggcggagaaggacgcggcgcccaacgccagcctgcgcgggttcgaggtcatcgacagcgccaagacgcggctggagcaggcctgcttcggcgtcgtctcctgcgccgacgtcctcgccttcgccgcccgcgacgccctcgcgctggtcgggggcgacgcgtaccaggtgccggcggggcggagggacggcaacgtctcctcggcgcaggaggcgggcgcgaacctgccgccgccgacggcgagcgcgagccagctgacgcaggcgttcggcgccaaggggctgagccaggccgagatggtggcgctgtcgggggcgcacacggtgggcgcggcgcgctgcagctccttcgcgccccgcctctactcgtacgggcccagcggcgcggggcaggacccgtccatggaccccgcgtacctggcggcgctggcgcagcagtgcccgccgcaggggaccggcgccgccgacccgcccctccccatggaccccgtcacgcccaccgccttcgacaccaactactacgccaacctggtcgccaggcgcggcctgctcgcctccgaccaggcgctgctcgccgacccggccaccgccgcgcaggtgctcgcctacaccaacagccccgccaccttccagaccgacttcgtcgccgccatgatcaagatgggtgccatacaggtgctcaccggcacagccggcaccgtccggaccaactgcagggtggctagctagctagctcatccatgagaatgtacctgtagactcatgtgcttaaaatcatacgacgaaactgtacgtacggcgtagagtggtgtggcggggtccaatgattcagattgtacgtacgtgtccatcgatccaactgtagttgtgtacgcagtacagtacgtgctagctacggatcagttgcttatatatagcttgtgcgtttttttacactttcttttgtccttttggtttataatttttattaagatatacaaatatttctcttcagattcggatcgaatacaaatattaaaaatggttcgttctttttca

SEQ ID NO: 6239 - DNA, 4731 bp, Zea Mays
tctagagatgagctacgtcttgtctatggtgtttctgagcgtacagaaagcgatggtgcagctaatttaattcagaagttgagagctataaactatgctctgggtgaactaggacagtggtgtgcttacaaggttgcactgtcattcttgacagcactacagaatgatgaaagggccaactatcaggttgatgttaagtttcaagagtcatacttgagaaagctgtttctgtaggtgaacatgtagatgaagtcattggtgccgcagtggccgatggaaaagttaccccaagggtgcaagctttgataaaaatacttctcaagtatcagcacactgaggattttcgtgctatcatatttgtagagcgagtggttacagcattagtcctccctaaggtctttgcagaacttccatcgttgggctttatacggtgtgcaagcttgataggtcataacaataaccaggagatgcggtcgtgccaaatgcaggatacaatcacaaaatttcgtgatggccgtgttacactgttagttgcaactagtgttgcagaggaaggacttgatattaggcagtgcaatgttgtcattcgctttgaccttgcaaagactgttttggcctacattcagtctcggggtcgtgctagaaagcctggatctgactacatattgatgcttgaaagaggaaatatgtctcatgaagctttcttgagaaatgctcggaatagtgaagagacattgagaaaagaagctattgagagaactgatctcagtcatctcgatggcacttctatgctaagccctgttgatatatcacctgattctatgtatcaggttgaatcaacaggtgccgttgtcagtctgaactctgcagttggactcgtacatttttactgctcacagctgccgagtgacagatactctattcttcgaccggaatttattatgcaaaagcatgagaaaccagggggttcaacagaatattcttgcaaacttcaactcccttgtaatgccccattcgagaaacttgaaggtcctatatgcagttcaatacgcctggcccaacaagctgtttgtttagctgcttgtaagaagctacatgagatgggtgccttcacagatatgcttttacctgacagaggaagtggggaaggagaaaagactgaacaaaatgatgaaggtgatccactgcctggaacagcacgccatagagagttctttcctgaaggggttgctgaaattctacatggagaatggattttatctggaagagatggttaccaaagttcacagtttattaagttatatttgtattctgtgaactgtgtaaacattgggacttcaaaggaccctttcgttacacaactttcaaattttgctcttatttttggcaatgagctggatgcagaggttttatcgacgacgatggatctctttgttgctaggacaataataacaaaggcatctctcgtattccgtggaccaattgaaattacagaaagtcagctgatcctgcttaagagctttcatgttaggctcatgagcattgtacttgatgttgatgttgatccctcaacaactccttgggatccagcaaaagcatacctctttgttcctgtgggagctgagaaatgtatggatcttttaagagagatagattggactctagttaatagcattgtgaattctgatgcctggaacaaccctcttcagagggcacgcccagatgtctatctaggcacgaacgaaaggacacttggaggggataggagggaatatgggttcgggaagttgcgccatggaactgcatttggacagaaagcccaccctacgtatggtatcagaggagccatcgctgaattcgatgttgtcaaagcgtctggattagttcctggtcgtggatggggacattttaatgattatcaaaataaaggcaagttgttcatggcagattcatgttgggatgccaaagatcttgctggaatggttgtaactgccgcccactcaggaaaaaggttctatgtggacagtatttgctataatatgaatgcagaaaattctttccctaggaaagagggctatctgggtcccttggaatacagctcgtttgctgattactacaagcagaagtatggtgtggagttagtttataagaaacaacctcttatacgggcacgcggtgtttcatactgcaaaaatctactttctcctagatttgagcattctgaagctagcaatggagagttctcagagaatcttgacaagacatactatgtatatttaccacccgaattgtgccttgtgcatcctctccccggatcacttgttcgtggagctcagaggttaccctcaataatgagaagggtggagagcatgcttcttgcaattcaactgaaggacataattgggtatccagttcctgcaaataagatattagaagccttgactgctgcgtcatgccaggagacattctgctatgaaagagcagagctgctgggtgatgcatacttgaaatgggttgtgagtagattccttttcctaaaatatcctcaaaagcatgagggacagctcacaaggatgcggcagcagatggttagcaacatgatcctgtatcaatacgccctgaataaaaacctccaatcttatatccaagcagatcgatttgctccatcaagatgggcagctccaggagtgttacctgtatttgatgaagaaacgagagattctgaaccatccatctttgatgaggaatttactcctagcagtgagttacaaaagaacttgtatgatgactatgatggcgatagcatgcaagaagacggtgaaattgagggagattctagctgctatcgtgttctatcaagcaaaacattagcagatgttgtggaagcacttattggtgtctattatgtagctggagggaaaattgctacaaaccatctgatgaaatggatcggtattaatgcagagttggatcctcaagagatcccatcttcgaagccatataacatacctgagagcataattaaaagcatcaattttgacacattagagggtgcattgggtatcaagtttcagaataaaggcttacttgttgaagctataacacatgcatcaagaccatcatcaggtgtttcctgttaccagcgcctggaatttgttggtgatgctgtattggaccatctcattacgaagcacttattttttacttatacggacctacctccaggccgcttgactgacttgagagctgcagctgttaataatgagaactttgcaagggttgcagttaaacataagctacatgtacatcttcgccatggatcatctgcattggagacacagattcgagagtttgtgaaggatgtccaggaggagctttcgaaaccaggtttcaattcttttggccttggggattgtaaggctccaaaggttctcggagacatttttgagtctattgctggcgcaatattccttgatagtgggtgtgctacctccgtagtctggaaggtttttcagcctctgcttgatccaatggtgacgccggacacccttccgatgcaccctgtaagggagctccaagagcgctgccagcagcaagccgaaggattagaatacaaagcatcccgtacaggcaatgtagctacagttgaagtcttggttgatggcatacagattggtgtagctcagaacccacagaagaagatggcacaaaagttggcggctagaaatgcacttgttgtcttgaaagagaaggaaaccgcagcaaagaaagacactgaaaaggatggcgagaagaaaaacggttctcagttcactaggcagactctgaacgacatctgcttgagaaggcaatggccgatgccacagtacaggtgtataaacgagggtggccctgcccatgccaaaagatttgtttatgcggtaagggtaaatacatctgacagtggatggactgacgagtgcattggagagccaatgccgagtgtgaaaaaggccaaggactctgcagctgttcttctgctcgagctgctgaatcgaaattaccgtggcaagcctgatggaaaataatctttggtgatgttctgtggtggtaggtagacgtggaagcatccatcattctgattatacccccatgcagtgcttttcagcaaagcaaattaatggcctttgttgatgttcttggtggcggtattggtgatatggaggcattcaatgcaagcataagcagagctatggggagtgggattagaggattattattagttttgtctgaggtgactactaggtattttactggcgaggatgcgcctgcagctgggaactcggggttctctatcttggcctcgccgaccaaatatcacgtacgtcgacgtccgcgaacagtatatatatggtaggcttggcgggcgtgatccccttgcgcatggtacagagcaagacgctgagctggatattctgataatcccgtatactccaacagaaactacagaatggaatcaagttgtacctgcgtttctgctgctcaaaaattgcgagatggaccatggacgtgtgttgtttggcaacaacgacgcaaccagcacggacaagaaggggggacatgcagtctctcgaaacctgtcctatacaattagaaagaaaaaaaagagggaaaataaaaggaaaagaacgcgagggcagggccggccggtcggtcggtgcctgcgccgcacttttgtcatgtgcctagcac

SEQ ID NO: 6240 - DNA, 4859 bp, Zea Mays
tctagagatgagctacgtcttgtctatggtgtttctgagcgtacagaaagcgatggtgcagctaatttaattcagaagttgagagctataaactatgctctgggtgaactaggacagtggtgtgcttacaaggttgcactgtcattcttgacagcactacagaatgatgaaagggccaactatcaggttgatgttaagtttcaagagtcatacttgagaaaggtagttgatttgttacactgccagttgactgaaggggctgcaatgaaaagtgacagtaatgatgttgaaatgcataattctgaaaaccccaagccaaatgaacttgaggagggagagctacctgacagtcatgctgtttctgtaggtgaacatgtagatgaagtcattggtgccgcagtggccgatggaaaagttaccccaagggtgcaagctttgataaaaatacttctcaagtatcagcacactgaggattttcgtgctatcatatttgtagagcgagtggttacagcattagtcctccctaaggtctttgcagaacttccatcgttgggctttatacggtgtgcaagcttgataggtcataacaataaccaggagatgcggtcgtgccaaatgcaggatacaatcacaaaatttcgtgatggccgtgttacactgttagttgcaactagtgttgcagaggaaggacttgatattaggcagtgcaatgttgtcattcgctttgaccttgcaaagactgttttggcctacattcagtctcggggtcgtgctagaaagcctggatctgactacatattgatgcttgaaaggtgccgttgtcagtctgaactctgcagttggactcgtacatttttactgctcacagctgccgagtgacagatactctattcttcgaccggaatttattatgcaaaagcatgagaaaccagggggttcaacagaatattcttgcaaacttcaactcccttgtaatgccccattcgagaaacttgaaggtcctatatgcagttcaatacgcctggcccaacaagctgtttgtttagctgcttgtaagaagctacatgagatgggtgccttcacagatatgcttttacctgacagaggaagtggggaaggagaaaagactgaacaaaatgatgaaggtgatccactgcctggaacagcacgccatagagagttctttcctgaaggggttgctgaaattctacatggagaatggattttatctggaagagatggttaccaaagttcacagtttattaagttatatttgtattctgtgaactgtgtaaacattgggacttcaaaggaccctttcgttacacaactttcaaattttgctcttatttttggcaatgagctggatgcagaggttttatcgacgacgatggatctctttgttgctaggacaataataacaaaggcatctctcgtattccgtggaccaattgaaattacagaaactgatcctgcttaagagctttcatgttaggctcatgagcattgtacttgatgttgatgttgatccctcaacaactccttgggatccagcaaaagcatacctctttgttcctgtgggagctgagaaatgtatggatcttttaagagagatagattggactctagttaatagcattgtgaattctgatgcctggaacaaccctcttcagagggcacgcccagatgtctatctaggcacgaacgaaaggacacttggaggggataggagggaatatgggttcgggaagttgcgccatggaactgcatttggacagaaagcccaccctacgtatggtatcagaggagccatcgctgaattcgatgttgtcaaagcgtctggattagttcctggtcgtggatggggacattttaatgattatcaaaataaaggcaagttgttcatggcagattcatgttgggatgccaaagatcttgctggaatggttgtaactgccgcccactcaggaaaaaggttctatgtggacagtatttgctataatatgaatgcagaaaattctttccctaggaaagagggctatctgggtcccttggaatacagctcgtttgctgattactacaagcagaagtatggtgtggagttagtttataagaaacaacctcttatacgggcacgcggtgtttcatactgcaaaaatctactttctcctagatttgagcattctgaagctagcaatggagagttctcagagaatcttgacaagacatactatgtatatttaccacccgaattgtgccttgtgcatcctctccccggatcacttgttcgtggagctcagaggttaccctcaataatgagaagggtggagagcatgcttcttgcaattcaactgaaggacataattgggtatccagttcctgcaaataagatattagaagccttgactgctgcgtcatgccaggagacattctgctatgaaagagcagagctgctgggtgatgcatacttgaaatgggttgtgagtagattccttttcctaaaatatcctcaaaagcatgagggacagctcacaaggatgcggcagcagatggttagcaacatgatcctgtatcaatacgccctgaataaaaacctccaatcttatatccaagcagatcgatttgctccatcaagatgggcagctccaggagtgttacctgtatttgatgaagaaacgagagattctgaaccatccatctttgatgaggaatttactcctagcagtgagttacaaaagaacttgtatgatgactatgatggcgatagcatgcaagaagacggtgaaattgagggagattctagctgctatcgtgttctatcaagcaaaacattagcagatgttgtggaagcacttattggtgtctattatgtagctggagggaaaattgctacaaaccatctgatgaaatggatcggtattaatgcagagttggatcctcaagagatcccatcttcgaagccatataacatacctgagagcataattaaaagcatcaattttgacacattagagggtgcattgggtatcaagtttcagaataaaggcttacttgttgaagctataacacatgcatcaagaccatcatcaggtgtttcctgttaccagcgcctggaatttgttggtgatgctgtattggaccatctcattacgaagcacttattttttacttatacggacctacctccaggccgcttgactgacttgagagctgcagctgttaataatgagaactttgcaagggttgcagttaaacataagctacatgtacatcttcgccatggatcatctgcattggagacacagattcgagagtttgtgaaggatgtccaggaggagctttcgaaaccaggtttcaattcttttggccttggggattgtaaggctccaaaggttctcggagacatttttgagtctattgctggcgcaatattccttgatagtgggtgtgctacctccgtagtctggaaggtttttcagcctctgcttgatccaatggtgacgccggacacccttccgatgcaccctgtaagggagctccaagagcgctgccagcagcaagccgaaggattagaatacaaagcatcccgtacaggcaatgtagctacagttgaagtcttggttgatggcatacagattggtgtagctcagaacccacagaagaagatggcacaaaagttggcggctagaaatgcacttgttgtcttgaaagagaaggaaaccgcagcaaagaaagacactgaaaaggatggcgagaagaaaaacggttctcagttcactaggcagactctgaacgacatctgcttgagaaggcaatggccgatgccacagtacaggtgtataaacgagggtggccctgcccatgccaaaagatttgtttatgcggtaagggtaaatacatctgacagtggatggactgacgagtgcattggagagccaatgccgagtgtgaaaaaggccaaggactctgcagctgttcttctgctcgagctgctgaatcgaaattaccgtggcaagcctgatggaaaataatctttggtgatgttctgtggtggtaggtagacgtggaagcatccatcattctgattatacccccatgcagtgcttttcagcaaagcaaattaatggcctttgttgatgttcttggtggcggtattggtgatatggaggcattcaatgcaagcataagcagagctatggggagtgggattagaggattattattagttttgtctgaggtgactactaggtattttactggcgaggtactgaggtcacaactcacaaatagcagttgcaaattgcaatagaggaaatgatgataggttgatataggatattggaggcctcttattcatcgattgtataagatgtttacagaacagtgcattgatccattaaatttatattgattgatatttttatagtggatgcgcctgcagctgggaactcggggttctctatcttggcctcgccgaccaaatatcacgtacgtcgacgtccgcgaacagtatatatatggtaggcttggcgggcgtgatccccttgcgcatggtacagagcaagacgctgagctggatattctgataatcccgtatactccaacagaaactacagaatggaatcaagttgtacctgcgtttctgctgctcaaaaattgcgagatggaccatggacgtgtgttgtttggcaacaacgacgcaaccagcacggacaagaaggggggacatgcagtctctcgaaacctgtcctatacaattagaaagaaaaaaaagagggaaaataaaaggaaaagaacgcgagggcagggccggccggtcggtcggtgcctgcgccgcacttttgtcatgtgcctagcac

SEQ ID NO: 6241 - DNA, 4872 bp, Zea Mays
tctagagatgagctacgtcttgtctatggtgtttctgagcgtacagaaagcgatggtgcagctaatttaattcagaagttgagagctataaactatgctctgggtgaactaggacagtggtgtgcttacaaggttgcactgtcattcttgacagcactacagaatgatgaaagggccaactatcaggttgatgttaagtttcaagagtcatacttgagaaaggtagttgatttgttacactgccagttgactgaaggggctgcaatgaaaagtgacagtaatgatgttgaaatgcataattctgaaaaccccaagccaaatgaacttgaggagggagagctacctgacagtcatgctgtttctgtaggtgaacatgtagatgaagtcattggtgccgcagtggccgatggaaaagttaccccaagggtgcaagctttgataaaaatacttctcaagtatcagcacactgaggattttcgtgctatcatatttgtagagcgagtggttacagcattagtcctccctaaggtctttgcagaacttccatcgttgggctttatacggtgtgcaagcttgataggtcataacaataaccaggagatgcggtcgtgccaaatgcaggatacaatcacaaaatttcgtgatggccgtgttacactgttagttgcaactagtgttgcagaggaaggacttgatattaggcagtgcaatgttgtcattcgctttgaccttgcaaagactgttttggcctacattcagtctcggggtcgtgctagaaagcctggatctgactacatattgatgcttgaaaggttgaatcaacaggtgccgttgtcagtctgaactctgcagttggactcgtacatttttactgctcacagctgccgagtgacagatactctattcttcgaccggaatttattatgcaaaagcatgagaaaccagggggttcaacagaatattcttgcaaacttcaactcccttgtaatgccccattcgagaaacttgaaggtcctatatgcagttcaatacgcctggcccaacaagctgtttgtttagctgcttgtaagaagctacatgagatgggtgccttcacagatatgcttttacctgacagaggaagtggggaaggagaaaagactgaacaaaatgatgaaggtgatccactgcctggaacagcacgccatagagagttctttcctgaaggggttgctgaaattctacatggagaatggattttatctggaagagatggttaccaaagttcacagtttattaagttatatttgtattctgtgaactgtgtaaacattgggacttcaaaggaccctttcgttacacaactttcaaattttgctcttatttttggcaatgagctggatgcagaggttttatcgacgacgatggatctctttgttgctaggacaataataacaaaggcatctctcgtattccgtggaccaattgaaattacagaaactgatcctgcttaagagctttcatgttaggctcatgagcattgtacttgatgttgatgttgatccctcaacaactccttgggatccagcaaaagcatacctctttgttcctgtgggagctgagaaatgtatggatcttttaagagagatagattggactctagttaatagcattgtgaattctgatgcctggaacaaccctcttcagagggcacgcccagatgtctatctaggcacgaacgaaaggacacttggaggggataggagggaatatgggttcgggaagttgcgccatggaactgcatttggacagaaagcccaccctacgtatggtatcagaggagccatcgctgaattcgatgttgtcaaagcgtctggattagttcctggtcgtggatggggacattttaatgattatcaaaataaaggcaagttgttcatggcagattcatgttgggatgccaaagatcttgctggaatggttgtaactgccgcccactcaggaaaaaggttctatgtggacagtatttgctataatatgaatgcagaaaattctttccctaggaaagagggctatctgggtcccttggaatacagctcgtttgctgattactacaagcagaagtatggtgtggagttagtttataagaaacaacctcttatacgggcacgcggtgtttcatactgcaaaaatctactttctcctagatttgagcattctgaagctagcaatggagagttctcagagaatcttgacaagacatactatgtatatttaccacccgaattgtgccttgtgcatcctctccccggatcacttgttcgtggagctcagaggttaccctcaataatgagaagggtggagagcatgcttcttgcaattcaactgaaggacataattgggtatccagttcctgcaaataagatattagaagccttgactgctgcgtcatgccaggagacattctgctatgaaagagcagagctgctgggtgatgcatacttgaaatgggttgtgagtagattccttttcctaaaatatcctcaaaagcatgagggacagctcacaaggatgcggcagcagatggttagcaacatgatcctgtatcaatacgccctgaataaaaacctccaatcttatatccaagcagatcgatttgctccatcaagatgggcagctccaggagtgttacctgtatttgatgaagaaacgagagattctgaaccatccatctttgatgaggaatttactcctagcagtgagttacaaaagaacttgtatgatgactatgatggcgatagcatgcaagaagacggtgaaattgagggagattctagctgctatcgtgttctatcaagcaaaacattagcagatgttgtggaagcacttattggtgtctattatgtagctggagggaaaattgctacaaaccatctgatgaaatggatcggtattaatgcagagttggatcctcaagagatcccatcttcgaagccatataacatacctgagagcataattaaaagcatcaattttgacacattagagggtgcattgggtatcaagtttcagaataaaggcttacttgttgaagctataacacatgcatcaagaccatcatcaggtgtttcctgttaccagcgcctggaatttgttggtgatgctgtattggaccatctcattacgaagcacttattttttacttatacggacctacctccaggccgcttgactgacttgagagctgcagctgttaataatgagaactttgcaagggttgcagttaaacataagctacatgtacatcttcgccatggatcatctgcattggagacacagattcgagagtttgtgaaggatgtccaggaggagctttcgaaaccaggtttcaattcttttggccttggggattgtaaggctccaaaggttctcggagacatttttgagtctattgctggcgcaatattccttgatagtgggtgtgctacctccgtagtctggaaggtttttcagcctctgcttgatccaatggtgacgccggacacccttccgatgcaccctgtaagggagctccaagagcgctgccagcagcaagccgaaggattagaatacaaagcatcccgtacaggcaatgtagctacagttgaagtcttggttgatggcatacagattggtgtagctcagaacccacagaagaagatggcacaaaagttggcggctagaaatgcacttgttgtcttgaaagagaaggaaaccgcagcaaagaaagacactgaaaaggatggcgagaagaaaaacggttctcagttcactaggcagactctgaacgacatctgcttgagaaggcaatggccgatgccacagtacaggtgtataaacgagggtggccctgcccatgccaaaagatttgtttatgcggtaagggtaaatacatctgacagtggatggactgacgagtgcattggagagccaatgccgagtgtgaaaaaggccaaggactctgcagctgttcttctgctcgagctgctgaatcgaaattaccgtggcaagcctgatggaaaataatctttggtgatgttctgtggtggtaggtagacgtggaagcatccatcattctgattatacccccatgcagtgcttttcagcaaagcaaattaatggcctttgttgatgttcttggtggcggtattggtgatatggaggcattcaatgcaagcataagcagagctatggggagtgggattagaggattattattagttttgtctgaggtgactactaggtattttactggcgaggtactgaggtcacaactcacaaatagcagttgcaaattgcaatagaggaaatgatgataggttgatataggatattggaggcctcttattcatcgattgtataagatgtttacagaacagtgcattgatccattaaatttatattgattgatatttttatagtggatgcgcctgcagctgggaactcggggttctctatcttggcctcgccgaccaaatatcacgtacgtcgacgtccgcgaacagtatatatatggtaggcttggcgggcgtgatccccttgcgcatggtacagagcaagacgctgagctggatattctgataatcccgtatactccaacagaaactacagaatggaatcaagttgtacctgcgtttctgctgctcaaaaattgcgagatggaccatggacgtgtgttgtttggcaacaacgacgcaaccagcacggacaagaaggggggacatgcagtctctcgaaacctgtcctatacaattagaaagaaaaaaaagagggaaaataaaaggaaaagaacgcgagggcagggccggccggtcggtcggtgcctgcgccgcacttttgtcatgtgcctagcac

SEQ ID NO: 6242 - DNA, 4984 bp, Zea Mays
tctagagatgagctacgtcttgtctatggtgtttctgagcgtacagaaagcgatggtgcagctaatttaattcagaagttgagagctataaactatgctctgggtgaactaggacagtggtgtgcttacaaggttgcactgtcattcttgacagcactacagaatgatgaaagggccaactatcaggttgatgttaagtttcaagagtcatacttgagaaaggtagttgatttgttacactgccagttgactgaaggggctgcaatgaaaagtgacagtaatgatgttgaaatgcataattctgaaaaccccaagccaaatgaacttgaggagggagagctacctgacagtcatgctgtttctgtaggtgaacatgtagatgaagtcattggtgccgcagtggccgatggaaaagttaccccaagggtgcaagctttgataaaaatacttctcaagtatcagcacactgaggattttcgtgctatcatatttgtagagcgagtggttacagcattagtcctccctaagaacttccatcgttgggctttatacggtgtgcaagcttgataggtcataacaataaccaggagatgcggtcgtgccaaatgcaggatacaatcacaaaatttcgtgatggccgtgttacactgttagttgcaactagtgttgcagaggaaggacttgatattaggcagtgcaatgttgtcattcgctttgaccttgcaaagactgttttggcctacattcagtctcggggtcgtgctagaaagcctggatctgactacatattgatgcttgaaagaggaaatatgtctcatgaagctttcttgagaaatgctcggaatagtgaagagacattgagaaaagaagctattgagagaactgatctcagtcatctcgatggcacttctatgctaagccctgttgatatatcacctgattctatgtatcaggttgaatcaacaggtgccgttgtcagtctgaactctgcagttggactcgtacatttttactgctcacagctgccgagtgacagatactctattcttcgaccggaatttattatgcaaaagcatgagaaaccagggggttcaacagaatattcttgcaaacttcaactcccttgtaatgccccattcgagaaacttgaaggtcctatatgcagttcaatacgcctggcccaacaagctgtttgtttagctgcttgtaagaagctacatgagatgggtgccttcacagatatgcttttacctgacagaggaagtggggaaggagaaaagactgaacaaaatgatgaaggtgatccactgcctggaacagcacgccatagagagttctttcctgaaggggttgctgaaattctacatggagaatggattttatctggaagagatggttaccaaagttcacagtttattaagttatatttgtattctgtgaactgtgtaaacattgggacttcaaaggaccctttcgttacacaactttcaaattttgctcttatttttggcaatgagctggatgcagaggttttatcgacgacgatggatctctttgttgctaggacaataataacaaaggcatctctcgtattccgtggaccaattgaaattacagaaagtcagctgatcctgcttaagagctttcatgttaggctcatgagcattgtacttgatgttgatgttgatccctcaacaactccttgggatccagcaaaagcatacctctttgttcctgtgggagctgagaaatgtatggatcttttaagagagatagattggactctagttaatagcattgtgaattctgatgcctggaacaaccctcttcagagggcacgcccagatgtctatctaggcacgaacgaaaggacacttggaggggataggagggaatatgggttcgggaagttgcgccatggaactgcatttggacagaaagcccaccctacgtatggtatcagaggagccatcgctgaattcgatgttgtcaaagcgtctggattagttcctggtcgtggatggggacattttaatgattatcaaaataaaggcaagttgttcatggcagattcatgttgggatgccaaagatcttgctggaatggttgtaactgccgcccactcaggaaaaaggttctatgtggacagtatttgctataatatgaatgcagaaaattctttccctaggaaagagggctatctgggtcccttggaatacagctcgtttgctgattactacaagcagaagtaagataagttttgagtgctggaagcaaaaggagttctctcttagctctacctccttttgatttccctttttttttggcaaagtagctttatggcagcataccatgatgattcttgtttttcctctcaggtatggtgtggagttagtttataagaaacaacctcttatacgggcacgcggtgtttcatactgcaaaaatctactttctcctagatttgagcattctgaagctagcaatggagagttctcagagaatcttgacaagacatactatgtatatttaccacccgaattgtgccttgtgcatcctctccccggatcacttgttcgtggagctcagaggttaccctcaataatgagaagggtggagagcatgcttcttgcaattcaactgaaggacataattgggtatccagttcctgcaaataagatattagaagccttgactgctgcgtcatgccaggagacattctgctatgaaagagcagagctgctgggtgatgcatacttgaaatgggttgtgagtagattccttttcctaaaatatcctcaaaagcatgagggacagctcacaaggatgcggcagcagatggttagcaacatgatcctgtatcaatacgccctgaataaaaacctccaatcttatatccaagcagatcgatttgctccatcaagatgggcagctccaggagtgttacctgtatttgatgaagaaacgagagattctgaaccatccatctttgatgaggaatttactcctagcagtgagttacaaaagaacttgtatgatgactatgatggcgatagcatgcaagaagacggtgaaattgagggagattctagctgctatcgtgttctatcaagcaaaacattagcagatgttgtggaagcacttattggtgtctattatgtagctggagggaaaattgctacaaaccatctgatgaaatggatcggtattaatgcagagttggatcctcaagagatcccatcttcgaagccatataacatacctgagagcataattaaaagcatcaattttgacacattagagggtgcattgggtatcaagtttcagaataaaggcttacttgttgaagctataacacatgcatcaagaccatcatcaggtgtttcctgttaccagcgcctggaatttgttggtgatgctgtattggaccatctcattacgaagcacttattttttacttatacggacctacctccaggccgcttgactgacttgagagctgcagctgttaataatgagaactttgcaagggttgcagttaaacataagctacatgtacatcttcgccatggatcatctgcattggagacacagattcgagagtttgtgaaggatgtccaggaggagctttcgaaaccaggtttcaattcttttggccttggggattgtaaggctccaaaggttctcggagacatttttgagtctattgctggcgcaatattccttgatagtgggtgtgctacctccgtagtctggaaggtttttcagcctctgcttgatccaatggtgacgccggacacccttccgatgcaccctgtaagggagctccaagagcgctgccagcagcaagccgaaggattagaatacaaagcatcccgtacaggcaatgtagctacagttgaagtcttggttgatggcatacagattggtgtagctcagaacccacagaagaagatggcacaaaagttggcggctagaaatgcacttgttgtcttgaaagagaaggaaaccgcagcaaagaaagacactgaaaaggatggcgagaagaaaaacggttctcagttcactaggcagactctgaacgacatctgcttgagaaggcaatggccgatgccacagtacaggtgtataaacgagggtggccctgcccatgccaaaagatttgtttatgcggtaagggtaaatacatctgacagtggatggactgacgagtgcattggagagccaatgccgagtgtgaaaaaggccaaggactctgcagctgttcttctgctcgagctgctgaatcgaaattaccgtggcaagcctgatggaaaataatctttggtgatgttctgtggtggtaggtagacgtggaagcatccatcattctgattatacccccatgcagtgcttttcagcaaagcaaattaatggcctttgttgatgttcttggtggcggtattggtgatatggaggcattcaatgcaagcataagcagagctatggggagtgggattagaggattattattagttttgtctgaggtgactactaggtattttactggcgaggatgcgcctgcagctgggaactcggggttctctatcttggcctcgccgaccaaatatcacgtacgtcgacgtccgcgaacagtatatatatggtaggcttggcgggcgtgatccccttgcgcatggtacagagcaagacgctgagctggatattctgataatcccgtatactccaacagaaactacagaatggaatcaagttgtacctgcgtttctgctgctcaaaaattgcgagatggaccatggacgtgtgttgtttggcaacaacgacgcaaccagcacggacaagaaggggggacatgcagtctctcgaaacctgtcctatacaattagaaagaaaaaaaagagggaaaataaaaggaaaagaacgcgagggcagggccggccggtcggtcggtgcctgcgccgcacttttgtcatgtgcctagcac

SEQ ID NO: 6243 - DNA, 4865 bp, Zea Mays
gtctagagatgagctacgtcttgtctatggtgtttctgagcgtacagaaagcgatggtgcagctaatttaattcagaagttgagagctataaactatgctctgggtgaactaggacagtggtgtgcttacaaggttgcactgtcattcttgacagcactacagaatgatgaaagggccaactatcaggttgatgttaagtttcaagagtcatacttgagaaaggtagttgatttgttacactgccagttgactgaaggggctgcaatgaaaagtgacagtaatgatgttgaaatgcataattctgaaaaccccaagccaaatgaacttgaggagggagagctacctgacagtcatgctgtttctgtaggtgaacatgtagatgaagtcattggtgccgcagtggccgatggaaaagttaccccaagggtgcaagctttgataaaaatacttctcaagtatcagcacactgaggattttcgtgctatcatatttgtagagcgagtggttacagcattagtcctccctaaggtctttgcagaacttccatcgttgggctttatacggtgtgcaagcttgataggtcataacaataaccaggagatgcggtcgtgccaaatgcaggatacaatcacaaaatttcgtgatggccgtgttacactgttagttgcaactagtgttgcagaggaaggacttgatattaggcagtgcaatgttgtcattcgctttgaccttgcaaagactgttttggcctacattcagtctcggggtcgtgctagaaagcctggatctgactacatattgatgcttgaaagaggaaatatgtctcatgaagctttcttgagaaatgctcggaatagtgaagagacattgagaaaagaagctattgagagaactgatctcagtcatctcgatggcacttctatgctaagccctgttgatatatcacctgattctatgtatcaggttgaatcaacaggtgccgttgtcagtctgaactctgcagttggactcgtacatttttactgctcacagctgccgagtgacagatactctattcttcgaccggaatttattatgcaaaagcatgagaaaccagggggttcaacagaatattcttgcaaacttcaactcccttgtaatgccccattcgagaaacttgaaggtcctatatgcagttcaatacgcctggcccaacaagctgtttgtttagctgcttgtaagaagctacatgagatgggtgccttcacagatatgcttttacctgacagaggaagtggggaaggagaaaagactgaacaaaatgatgaaggtgatccactgcctggaacagcacgccatagagagttctttcctgaaggggttgctgaaattctacatggagaatggattttatctggaagagatggttaccaaagttcacagtttattaagttatatttgtattctgtgaactgtgtaaacattgggacttcaaaggaccctttcgttacacaactttcaaattttgctcttatttttggcaatgagctggatgcagaggttttatcgacgacgatggatctctttgttgctaggacaataataacaaaggcatctctcgtattccgtggaccaattgaaattacagaaagtcagctgatcctgcttaagagctttcatgttaggctcatgagcattgtacttgatgttgatgttgatccctcaacaactccttgggatccagcaaaagcatacctctttgttcctgtgggagctgagaaatgtatggatcttttaagagagatagattggactctagttaatagcattgtgaattctgatgcctggaacaaccctcttcagagggcacgcccagatgtctatctaggcacgaacgaaaggacacttggaggggataggagggaatatgggttcgggaagttgcgccatggaactgcatttggacagaaagcccaccctacgtatggtatcagaggagccatcgctgaattcgatgttgtcaaagcgtctggattagttcctggtcgtggatggggacattttaatgattatcaaaataaaggcaagttgttcatggcagattcatgttgggatgccaaagatcttgctggaatggttgtaactgccgcccactcaggaaaaaggttctatgtggacagtatttgctataatatgaatgcagaaaattctttccctaggaaagagggctatctgggtcccttggaatacagctcgtttgctgattactacaagcagaagtatggtgtggagttagtttataagaaacaacctcttatacgggcacgcggtgtttcatactgcaaaaatctactttctcctagatttgagcattctgaagctagcaatggagagttctcagagaatcttgacaagacatactatgtatatttaccacccgaattgtgccttgtgcatcctctccccggatcacttgttcgtggagctcagaggttaccctcaataatgagaagggtggagagcatgcttcttgcaattcaactgaaggacataattgggtatccagttcctgcaaataagatattagaagccttgactgctgcgtcatgccaggagacattctgctatgaaagagcagagctgctgggtgatgcatacttgaaatgggttgtgagtagattccttttcctaaaatatcctcaaaagcatgagggacagctcacaaggatgcggcagcagatggttagcaacatgatcctgtatcaatacgccctgaataaaaacctccaatcttatatccaagcagatcgatttgctccatcaagatgggcagctccaggagtgttacctgtatttgatgaagaaacgagagattctgaaccatccatctttgatgaggaatttactcctagcagtgagttacaaaagaacttgtatgatgactatgatggcgatagcatgcaagaagacggtgaaattgagggagattctagctgctatcgtgttctatcaagcaaaacattagcagatgttgtggaagcacttattggtgtctattatgtagctggagggaaaattgctacaaaccatctgatgaaatggatcggtattaatgcagagttggatcctcaagagatcccatcttcgaagccatataacatacctgagagcataattaaaagcatcaattttgacacattagagggtgcattgggtatcaagtttcagaataaaggcttacttgttgaagctataacacatgcatcaagaccatcatcaggtgtttcctgttaccagcgcctggaatttgttggtgatgctgtattggaccatctcattacgaagcacttattttttacttatacggacctacctccaggccgcttgactgacttgagagctgcagctgttaataatgagaactttgcaagggttgcagttaaacataagctacatgtacatcttcgccatggatcatctgcattggagacacagattcgagagtttgtgaaggatgtccaggaggagctttcgaaaccaggtttcaattcttttggccttggggattgtaaggctccaaaggttctcggagacatttttgagtctattgctggcgcaatattccttgatagtgggtgtgctacctccgtagtctggaaggtttttcagcctctgcttgatccaatggtgacgccggacacccttccgatgcaccctgtaagggagctccaagagcgctgccagcagcaagccgaaggattagaatacaaagcatcccgtacaggcaatgtagctacagttgaagtcttggttgatggcatacagattggtgtagctcagaacccacagaagaagatggcacaaaagttggcggctagaaatgcacttgttgtcttgaaagagaaggaaaccgcagcaaagaaagacactgaaaaggatggcgagaagaaaaacggttctcagttcactaggcagactctgaacgacatctgcttgagaaggcaatggccgatgccacagtacaggtgtataaacgagggtggccctgcccatgccaaaagatttgtttatgcggtaagggtaaatacatctgacagtggatggactgacgagtgcattggagagccaatgccgagtgtgaaaaaggccaaggactctgcagctgttcttctgctcgagctgctgaatcgaaattaccgtggcaagcctgatggaaaataatctttggtgatgttctgtggtggtaggtagacgtggaagcatccatcattctgattatacccccatgcagtgcttttcagcaaagcaaattaatggcctttgttgatgttcttggtggcggtattggtgatatggaggcattcaatgcaagcataagcagagctatggggagtgggattagaggattattattagttttgtctgaggtgactactaggtattttactggcgaggatgcgcctgcagctgggaactcggggttctctatcttggcctcgccgaccaaatatcacgtacgtcgacgtccgcgaacagtatatatatggtaggcttggcgggcgtgatccccttgcgcatggtacagagcaagacgctgagctggatattctgataatcccgtatactccaacagaaactacagaatggaatcaagttgtacctgcgtttctgctgctcaaaaattgcgagatggaccatggacgtgtgttgtttggcaacaacgacgcaaccagcacggacaagaaggggggacatgcagtctctcgaaacctgtcctatacaattagaaagaaaaaaaagagggaaaataaaaggaaaagaacgcgagggcagggccggccggtcggtcggtgcctgcgccgcacttttgtcatgtgcctagcac

SEQ ID NO: 6244 - DNA, 4863 bp, Zea Mays
gtctagagatgagctacgtcttgtctatggtgtttctgagcgtacagaaagcgatggtgcagctaatttaattcagaagttgagagctataaactatgctctgggtgaactaggacagtggtgtgcttacaaggttgcactgtcattcttgacagcactacagaatgatgaaagggccaactatcaggttgatgttaagtttcaagagtcatacttgagaaaggtagttgatttgttacactgccagttgactgaaggggctgcaatgaaaagtgacagtaatgatgttgaaatgcataattctgaaaaccccaagccaaatgaacttgaggagggagagctacctgacagtcatgctgtttctgtaggtgaacatgtagatgaagtcattggtgccgcagtggccgatggaaaagttaccccaagggtgcaagctttgataaaaatacttctcaagtatcagcacactgaggattttcgtgctatcatatttgtagagcgagtggttacagcattagtcctccctaagaacttccatcgttgggctttatacggtgtgcaagcttgataggtcataacaataaccaggagatgcggtcgtgccaaatgcaggatacaatcacaaaatttcgtgatggccgtgttacactgttagttgcaactagtgttgcagaggaaggacttgatattaggcagtgcaatgttgtcattcgctttgaccttgcaaagactgttttggcctacattcagtctcggggtcgtgctagaaagcctggatctgactacatattgatgcttgaaaggttgaatcaacaggtgccgttgtcagtctgaactctgcagttggactcgtacatttttactgctcacagctgccgagtgacagatactctattcttcgaccggaatttattatgcaaaagcatgagaaaccagggggttcaacagaatattcttgcaaacttcaactcccttgtaatgccccattcgagaaacttgaaggtcctatatgcagttcaatacgcctggcccaacaagctgtttgtttagctgcttgtaagaagctacatgagatgggtgccttcacagatatgcttttacctgacagaggaagtggggaaggagaaaagactgaacaaaatgatgaaggtgatccactgcctggaacagcacgccatagagagttctttcctgaaggggttgctgaaattctacatggagaatggattttatctggaagagatggttaccaaagttcacagtttattaagttatatttgtattctgtgaactgtgtaaacattgggacttcaaaggaccctttcgttacacaactttcaaattttgctcttatttttggcaatgagctggatgcagaggttttatcgacgacgatggatctctttgttgctaggacaataataacaaaggcatctctcgtattccgtggaccaattgaaattacagaaactgatcctgcttaagagctttcatgttaggctcatgagcattgtacttgatgttgatgttgatccctcaacaactccttgggatccagcaaaagcatacctctttgttcctgtgggagctgagaaatgtatggatcttttaagagagatagattggactctagttaatagcattgtgaattctgatgcctggaacaaccctcttcagagggcacgcccagatgtctatctaggcacgaacgaaaggacacttggaggggataggagggaatatgggttcgggaagttgcgccatggaactgcatttggacagaaagcccaccctacgtatggtatcagaggagccatcgctgaattcgatgttgtcaaagcgtctggattagttcctggtcgtggatggggacattttaatgattatcaaaataaaggcaagttgttcatggcagattcatgttgggatgccaaagatcttgctggaatggttgtaactgccgcccactcaggaaaaaggttctatgtggacagtatttgctataatatgaatgcagaaaattctttccctaggaaagagggctatctgggtcccttggaatacagctcgtttgctgattactacaagcagaagtatggtgtggagttagtttataagaaacaacctcttatacgggcacgcggtgtttcatactgcaaaaatctactttctcctagatttgagcattctgaagctagcaatggagagttctcagagaatcttgacaagacatactatgtatatttaccacccgaattgtgccttgtgcatcctctccccggatcacttgttcgtggagctcagaggttaccctcaataatgagaagggtggagagcatgcttcttgcaattcaactgaaggacataattgggtatccagttcctgcaaataagatattagaagccttgactgctgcgtcatgccaggagacattctgctatgaaagagcagagctgctgggtgatgcatacttgaaatgggttgtgagtagattccttttcctaaaatatcctcaaaagcatgagggacagctcacaaggatgcggcagcagatggttagcaacatgatcctgtatcaatacgccctgaataaaaacctccaatcttatatccaagcagatcgatttgctccatcaagatgggcagctccaggagtgttacctgtatttgatgaagaaacgagagattctgaaccatccatctttgatgaggaatttactcctagcagtgagttacaaaagaacttgtatgatgactatgatggcgatagcatgcaagaagacggtgaaattgagggagattctagctgctatcgtgttctatcaagcaaaacattagcagatgttgtggaagcacttattggtgtctattatgtagctggagggaaaattgctacaaaccatctgatgaaatggatcggtattaatgcagagttggatcctcaagagatcccatcttcgaagccatataacatacctgagagcataattaaaagcatcaattttgacacattagagggtgcattgggtatcaagtttcagaataaaggcttacttgttgaagctataacacatgcatcaagaccatcatcaggtgtttcctgttaccagcgcctggaatttgttggtgatgctgtattggaccatctcattacgaagcacttattttttacttatacggacctacctccaggccgcttgactgacttgagagctgcagctgttaataatgagaactttgcaagggttgcagttaaacataagctacatgtacatcttcgccatggatcatctgcattggagacacagattcgagagtttgtgaaggatgtccaggaggagctttcgaaaccaggtttcaattcttttggccttggggattgtaaggctccaaaggttctcggagacatttttgagtctattgctggcgcaatattccttgatagtgggtgtgctacctccgtagtctggaaggtttttcagcctctgcttgatccaatggtgacgccggacacccttccgatgcaccctgtaagggagctccaagagcgctgccagcagcaagccgaaggattagaatacaaagcatcccgtacaggcaatgtagctacagttgaagtcttggttgatggcatacagattggtgtagctcagaacccacagaagaagatggcacaaaagttggcggctagaaatgcacttgttgtcttgaaagagaaggaaaccgcagcaaagaaagacactgaaaaggatggcgagaagaaaaacggttctcagttcactaggcagactctgaacgacatctgcttgagaaggcaatggccgatgccacagtacaggtgtataaacgagggtggccctgcccatgccaaaagatttgtttatgcggtaagggtaaatacatctgacagtggatggactgacgagtgcattggagagccaatgccgagtgtgaaaaaggccaaggactctgcagctgttcttctgctcgagctgctgaatcgaaattaccgtggcaagcctgatggaaaataatctttggtgatgttctgtggtggtaggtagacgtggaagcatccatcattctgattatacccccatgcagtgcttttcagcaaagcaaattaatggcctttgttgatgttcttggtggcggtattggtgatatggaggcattcaatgcaagcataagcagagctatggggagtgggattagaggattattattagttttgtctgaggtgactactaggtattttactggcgaggtactgaggtcacaactcacaaatagcagttgcaaattgcaatagaggaaatgatgataggttgatataggatattggaggcctcttattcatcgattgtataagatgtttacagaacagtgcattgatccattaaatttatattgattgatatttttatagtggatgcgcctgcagctgggaactcggggttctctatcttggcctcgccgaccaaatatcacgtacgtcgacgtccgcgaacagtatatatatggtaggcttggcgggcgtgatccccttgcgcatggtacagagcaagacgctgagctggatattctgataatcccgtatactccaacagaaactacagaatggaatcaagttgtacctgcgtttctgctgctcaaaaattgcgagatggaccatggacgtgtgttgtttggcaacaacgacgcaaccagcacggacaagaaggggggacatgcagtctctcgaaacctgtcctatacaattagaaagaaaaaaaagagggaaaataaaaggaaaagaacgcgagggcagggccggccggtcggtcggtgcctgcgccgcacttttgtcatgtgcctagcac

SEQ ID NO: 6245 - DNA, 4860 bp, Zea Mays
gtctagagatgagctacgtcttgtctatggtgtttctgagcgtacagaaagcgatggtgcagctaatttaattcagaagttgagagctataaactatgctctgggtgaactaggacagtggtgtgcttacaaggttgcactgtcattcttgacagcactacagaatgatgaaagggccaactatcaggttgatgttaagtttcaagagtcatacttgagaaaggtagttgatttgttacactgccagttgactgaaggggctgcaatgaaaagtgacagtaatgatgttgaaatgcataattctgaaaaccccaagccaaatgaacttgaggagggagagctacctgacagtcatgctgtttctgtaggtgaacatgtagatgaagtcattggtgccgcagtggccgatggaaaagttaccccaagggtgcaagctttgataaaaatacttctcaagtatcagcacactgaggattttcgtgctatcatatttgtagagcgagtggttacagcattagtcctccctaaggtctttgcagaacttccatcgttgggctttatacggtgtgcaagcttgataggtcataacaataaccaggagatgcggtcgtgccaaatgcaggatacaatcacaaaatttcgtgatggccgtgttacactgttagttgcaactagtgttgcagaggaaggacttgatattaggcagtgcaatgttgtcattcgctttgaccttgcaaagactgttttggcctacattcagtctcggggtcgtgctagaaagcctggatctgactacatattgatgcttgaaagaggaaatatgtctcatgaagctttcttgagaaatgctcggaatagtgaagagacattgagaaaagaagctattgagagaactgatctcagtcatctcgatggcacttctatgctaagccctgttgatatatcacctgattctatgtatcaggttgaatcaacaggtgccgttgtcagtctgaactctgcagttggactcgtacatttttactgctcacagctgccgagtgacagatactctattcttcgaccggaatttattatgcaaaagcatgagaaaccagggggttcaacagaatattcttgcaaacttcaactcccttgtaatgccccattcgagaaacttgaaggtcctatatgcagttcaatacgcctggcccaacaagctgtttgtttagctgcttgtaagaagctacatgagatgggtgccttcacagatatgcttttacctgacagaggaagtggggaaggagaaaagactgaacaaaatgatgaaggtgatccactgcctggaacagcacgccatagagagttctttcctgaaggggttgctgaaattctacatggagaatggattttatctggaagagatggttaccaaagttcacagtttattaagttatatttgtattctgtgaactgtgtaaacattgggacttcaaaggaccctttcgttacacaactttcaaattttgctcttatttttggcaatgagctggatgcagaggttttatcgacgacgatggatctctttgttgctaggacaataataacaaaggcatctctcgtattccgtggaccaattgaaattacagaaactgatcctgcttaagagctttcatgttaggctcatgagcattgtacttgatgttgatgttgatccctcaacaactccttgggatccagcaaaagcatacctctttgttcctgtgggagctgagaaatgtatggatcttttaagagagatagattggactctagttaatagcattgtgaattctgatgcctggaacaaccctcttcagagggcacgcccagatgtctatctaggcacgaacgaaaggacacttggaggggataggagggaatatgggttcgggaagttgcgccatggaactgcatttggacagaaagcccaccctacgtatggtatcagaggagccatcgctgaattcgatgttgtcaaagcgtctggattagttcctggtcgtggatggggacattttaatgattatcaaaataaaggcaagttgttcatggcagattcatgttgggatgccaaagatcttgctggaatggttgtaactgccgcccactcaggaaaaaggttctatgtggacagtatttgctataatatgaatgcagaaaattctttccctaggaaagagggctatctgggtcccttggaatacagctcgtttgctgattactacaagcagaagtatggtgtggagttagtttataagaaacaacctcttatacgggcacgcggtgtttcatactgcaaaaatctactttctcctagatttgagcattctgaagctagcaatggagagttctcagagaatcttgacaagacatactatgtatatttaccacccgaattgtgccttgtgcatcctctccccggatcacttgttcgtggagctcagaggttaccctcaataatgagaagggtggagagcatgcttcttgcaattcaactgaaggacataattgggtatccagttcctgcaaataagatattagaagccttgactgctgcgtcatgccaggagacattctgctatgaaagagcagagctgctgggtgatgcatacttgaaatgggttgtgagtagattccttttcctaaaatatcctcaaaagcatgagggacagctcacaaggatgcggcagcagatggttagcaacatgatcctgtatcaatacgccctgaataaaaacctccaatcttatatccaagcagatcgatttgctccatcaagatgggcagctccaggagtgttacctgtatttgatgaagaaacgagagattctgaaccatccatctttgatgaggaatttactcctagcagtgagttacaaaagaacttgtatgatgactatgatggcgatagcatgcaagaagacggtgaaattgagggagattctagctgctatcgtgttctatcaagcaaaacattagcagatgttgtggaagcacttattggtgtctattatgtagctggagggaaaattgctacaaaccatctgatgaaatggatcggtattaatgcagagttggatcctcaagagatcccatcttcgaagccatataacatacctgagagcataattaaaagcatcaattttgacacattagagggtgcattgggtatcaagtttcagaataaaggcttacttgttgaagctataacacatgcatcaagaccatcatcaggtgtttcctgttaccagcgcctggaatttgttggtgatgctgtattggaccatctcattacgaagcacttattttttacttatacggacctacctccaggccgcttgactgacttgagagctgcagctgttaataatgagaactttgcaagggttgcagttaaacataagctacatgtacatcttcgccatggatcatctgcattggagacacagattcgagagtttgtgaaggatgtccaggaggagctttcgaaaccaggtttcaattcttttggccttggggattgtaaggctccaaaggttctcggagacatttttgagtctattgctggcgcaatattccttgatagtgggtgtgctacctccgtagtctggaaggtttttcagcctctgcttgatccaatggtgacgccggacacccttccgatgcaccctgtaagggagctccaagagcgctgccagcagcaagccgaaggattagaatacaaagcatcccgtacaggcaatgtagctacagttgaagtcttggttgatggcatacagattggtgtagctcagaacccacagaagaagatggcacaaaagttggcggctagaaatgcacttgttgtcttgaaagagaaggaaaccgcagcaaagaaagacactgaaaaggatggcgagaagaaaaacggttctcagttcactaggcagactctgaacgacatctgcttgagaaggcaatggccgatgccacagtacaggtgtataaacgagggtggccctgcccatgccaaaagatttgtttatgcggtaagggtaaatacatctgacagtggatggactgacgagtgcattggagagccaatgccgagtgtgaaaaaggccaaggactctgcagctgttcttctgctcgagctgctgaatcgaaattaccgtggcaagcctgatggaaaataatctttggtgatgttctgtggtggtaggtagacgtggaagcatccatcattctgattatacccccatgcagtgcttttcagcaaagcaaattaatggcctttgttgatgttcttggtggcggtattggtgatatggaggcattcaatgcaagcataagcagagctatggggagtgggattagaggattattattagttttgtctgaggtgactactaggtattttactggcgaggatgcgcctgcagctgggaactcggggttctctatcttggcctcgccgaccaaatatcacgtacgtcgacgtccgcgaacagtatatatatggtaggcttggcgggcgtgatccccttgcgcatggtacagagcaagacgctgagctggatattctgataatcccgtatactccaacagaaactacagaatggaatcaagttgtacctgcgtttctgctgctcaaaaattgcgagatggaccatggacgtgtgttgtttggcaacaacgacgcaaccagcacggacaagaaggggggacatgcagtctctcgaaacctgtcctatacaattagaaagaaaaaaaagagggaaaataaaaggaaaagaacgcgagggcagggccggccggtcggtcggtgcctgcgccgcacttttgtcatgtgcctagcac

SEQ ID NO: 6246 - DNA, 5269 bp, Zea Mays
cttggtctagagatgagctacgtcttgtctatggtgtttctgagcgtacagaaagcgatggtgcagctaatttaattcagaagttgagagctataaactatgctctgggtgaactaggacagtggtgtgcttacaaggttgcactgtcattcttgacagcactacagaatgatgaaagggccaactatcaggttgatgttaagtttcaagagtcatacttgagaaaggtagttgatttgttacactgccagttgactgaaggggctgcaatgaaaagtgacagtaatgatgttgaaatgcataattctgaaaaccccaagccaaatgaacttgaggagggagagctacctgacagtcatggtattaatagtcttcttgcaaaatgtgttatatggtgacctttttctttttaacattccccaatgaatttcccttcttccttcactctacaattagcacatattgtgtttattttttgtcctttattataccttaggatatacaattagcacctattttgtttttttttgttctttattatacctgagggtatctcagcctcacttttaacgctttatgctgttatttcccactagctgtttctgtaggtgaacatgtagatgaagtcattggtgccgcagtggccgatggaaaagttaccccaagggtgcaagctttgataaaaatacttctcaagtatcagcacactgaggattttcgtgctatcatatttgtagagcgagtggttacagcattagtcctccctaaggtctttgcagaacttccatcgttgggctttatacggtgtgcaagcttgataggtcataacaataaccaggagatgcggtcgtgccaaatgcaggatacaatcacaaaatttcgtgatggccgtgttacactgttagttgcaactagtgttgcagaggaaggacttgatattaggcagtgcaatgttgtcattcgctttgaccttgcaaagactgttttggcctacattcagtctcggggtcgtgctagaaagcctggatctgactacatattgatgcttgaaagaggaaatatgtctcatgaagctttcttgagaaatgctcggaatagtgaagagacattgagaaaagaagctattgagagaactgatctcagtcatctcgatggcacttctatgctaagccctgttgatatatcacctgattctatgtatcaggttgaatcaacaggtgccgttgtcagtctgaactctgcagttggactcgtacatttttactgctcacagctgccgagtgacagatactctattcttcgaccggaatttattatgcaaaagcatgagaaaccagggggttcaacagaatattcttgcaaacttcaactcccttgtaatgccccattcgagaaacttgaaggtcctatatgcagttcaatacgcctggcccaacaagctgtttgtttagctgcttgtaagaagctacatgagatgggtgccttcacagatatgcttttacctgacagaggaagtggggaaggagaaaagactgaacaaaatgatgaaggtgatccactgcctggaacagcacgccatagagagttctttcctgaaggggttgctgaaattctacatggagaatggattttatctggaagagatggttaccaaagttcacagtttattaagttatatttgtattctgtgaactgtgtaaacattgggacttcaaaggaccctttcgttacacaactttcaaattttgctcttatttttggcaatgagctggatgcagaggttttatcgacgacgatggatctctttgttgctaggacaataataacaaaggcatctctcgtattccgtggaccaattgaaattacagaaagtcagctgatcctgcttaagagctttcatgttaggctcatgagcattgtacttgatgttgatgttgatccctcaacaactccttgggatccagcaaaagcatacctctttgttcctgtgggagctgagaaatgtatggatcttttaagagagatagattggactctagttaatagcattgtgaattctgatgcctggaacaaccctcttcagagggcacgcccagatgtctatctaggcacgaacgaaaggacacttggaggggataggagggaatatgggttcgggaagttgcgccatggaactgcatttggacagaaagcccaccctacgtatggtatcagaggagccatcgctgaattcgatgttgtcaaagcgtctggattagttcctggtcgtggatggggacattttaatgattatcaaaataaaggcaagttgttcatggcagattcatgttgggatgccaaagatcttgctggaatggttgtaactgccgcccactcaggaaaaaggttctatgtggacagtatttgctataatatgaatgcagaaaattctttccctaggaaagagggctatctgggtcccttggaatacagctcgtttgctgattactacaagcagaagtatggtgtggagttagtttataagaaacaacctcttatacgggcacgcggtgtttcatactgcaaaaatctactttctcctagatttgagcattctgaagctagcaatggagagttctcagagaatcttgacaagacatactatgtatatttaccacccgaattgtgccttgtgcatcctctccccggatcacttgttcgtggagctcagaggttaccctcaataatgagaagggtggagagcatgcttcttgcaattcaactgaaggacataattgggtatccagttcctgcaaataagatattagaagccttgactgctgcgtcatgccaggagacattctgctatgaaagagcagagctgctgggtgatgcatacttgaaatgggttgtgagtagattccttttcctaaaatatcctcaaaagcatgagggacagctcacaaggatgcggcagcagatggttagcaacatgatcctgtatcaatacgccctgaataaaaacctccaatcttatatccaagcagatcgatttgctccatcaagatgggcagctccaggagtgttacctgtatttgatgaagaaacgagagattctgaaccatccatctttgatgaggaatttactcctagcagtgagttacaaaagaacttgtatgatgactatgatggcgatagcatgcaagaagacggtgaaattgagggagattctagctgctatcgtgttctatcaagcaaaacattagcagatgttgtggaagcacttattggtgtctattatgtagctggagggaaaattgctacaaaccatctgatgaaatggatcggtattaatgcagagttggatcctcaagagatcccatcttcgaagccatataacatacctgagagcataattaaaagcatcaattttgacacattagagggtgcattgggtatcaagtttcagaataaaggcttacttgttgaagctataacacatgcatcaagaccatcatcaggtgtttcctgttaccagcgcctggaatttgttggtgatgctgtattggaccatctcattacgaagcacttattttttacttatacggacctacctccaggccgcttgactgacttgagagctgcagctgttaataatgagaactttgcaagggttgcagttaaacataagctacatgtacatcttcgccatggatcatctgcattggagacacagattcgagagtttgtgaaggatgtccaggaggagctttcgaaaccaggtttcaattcttttggccttggggattgtaaggctccaaaggttctcggagacatttttgagtctattgctggcgcaatattccttgatagtgggtgtgctacctccgtagtctggaaggtttttcagcctctgcttgatccaatggtgacgccggacacccttccgatgcaccctgtaagggagctccaagagcgctgccagcagcaagccgaaggattagaatacaaagcatcccgtacaggcaatgtagctacagttgaagtcttggttgatggcatacagattggtgtagctcagaacccacagaagaagatggcacaaaagttggcggctagaaatgcacttgttgtcttgaaagagaaggaaaccgcagcaaagaaagacactgaaaaggatggcgagaagaaaaacggttctcagttcactaggcagactctgaacgacatctgcttgagaaggcaatggccgatgccacagtacaggtgtataaacgagggtggccctgcccatgccaaaagatttgtttatgcggtaagggtaaatacatctgacagtggatggactgacgagtgcattggagagccaatgccgagtgtgaaaaaggccaaggactctgcagctgttcttctgctcgagctgctgaatcgaaattaccgtggcaagcctgatggaaaataatctttggtgatgttctgtggtggtaggtagacgtggaagcatccatcattctgattatacccccatgcagtgcttttcagcaaagcaaattaatggcctttgttgatgttcttggtggcggtattggtgatatggaggcattcaatgcaagcataagcagagctatggggagtgggattagaggattattattagttttgtctgaggtgactactaggtattttactggcgaggtactgaggtcacaactcacaaatagcagttgcaaattgcaatagaggaaatgatgataggttgatataggatattggaggcctcttattcatcgattgtataagatgtttacagaacagtgcattgatccattaaatttatattgattgatatttttatagtggatgcgcctgcagctgggaactcggggttctctatcttggcctcgccgaccaaatatcacgtacgtcgacgtccgcgaacagtatatatatggtaggcttggcgggcgtgatccccttgcgcatggtacagagcaagacgctgagctggatattctgataatcccgtatactccaacagaaactacagaatggaatcaagttgtacctgcgtttctgctgctcaaaaattgcgagatggaccatggacgtgtgttgtttggcaacaacgacgcaaccagcacggacaagaaggggggacatgcagtctctcgaaacctgtcctatacaattagaaagaaaaaaaagagggaaaataaaaggaaaagaacgcgagggcagggccggccggtcggtcggtgcctgcgccgcacttttgtcatgtgcctagcac

SEQ ID NO: 6247 - DNA, 4948 bp, Zea Mays
cttggtctagagatgagctacgtcttgtctatggtgtttctgagcgtacagaaagcgatggtgcagctaatttaattcagaagttgagagctataaactatgctctgggtgaactaggacagtggtgtgcttacaaggttgcactgtcattcttgacagcactacagaatgatgaaagggccaactatcaggttgatgttaagtttcaagagtcatacttgagaaaggtagttgatttgttacactgccagttgactgaaggggctgcaatgaaaagtgacagtaatgatgttgaaatgcataattctgaaaaccccaagccaaatgaacttgaggagggagagctacctgacagtcatgctgtttctgtaggtgaacatgtagatgaagtcattggtgccgcagtggccgatggaaaagttaccccaagggtgcaagctttgataaaaatacttctcaagtatcagcacactgaggattttcgtgctatcatatttgtagagcgagtggttacagcattagtcctccctaaggtctttgcagaacttccatcgttgggctttatacggtgtgcaagcttgataggtcataacaataaccaggagatgcggtcgtgccaaatgcaggatacaatcacaaaatttcgtgatggccgtgttacactgttagttgcaactagtgttgcagaggaaggacttgatattaggcagtgcaatgttgtcattcgctttgaccttgcaaagactgttttggcctacattcagtctcggggtcgtgctagaaagcctggatctgactacatattgatgcttgaaagaggaaatatgtctcatgaagctttcttgagaaatgctcggaatagtgaagagacattgagaaaagaagctattgagagaactgatctcagtcatctcgatggcacttctatgctaagccctgttgatatatcacctgattctatgtatcaggttgaatcaacaggtgccgttgtcagtctgaactctgcagttggactcgtacatttttactgctcacagctgccgagtgacagatactctattcttcgaccggaatttattatgcaaaagcatgagaaaccagggggttcaacagaatattcttgcaaacttcaactcccttgtaatgccccattcgagaaacttgaaggtcctatatgcagttcaatacgcctggcccaacaagctgtttgtttagctgcttgtaagaagctacatgagatgggtgccttcacagatatgcttttacctgacagaggaagtggggaaggagaaaagactgaacaaaatgatgaaggtgatccactgcctggaacagcacgccatagagagttctttcctgaaggggttgctgaaattctacatggagaatggattttatctggaagagatggttaccaaagttcacagtttattaagttatatttgtattctgtgaactgtgtaaacattgggacttcaaaggaccctttcgttacacaactttcaaattttgctcttatttttggcaatgagctggatgcagaggttttatcgacgacgatggatctctttgttgctaggacaataataacaaaggcatctctcgtattccgtggaccaattgaaattacagaaactgatcctgcttaagagctttcatgttaggctcatgagcattgtacttgatgttgatgttgatccctcaacaactccttgggatccagcaaaagcatacctctttgttcctgtgggagctgagaaatagggcacgcccagatgtctatctaggcacgaacgaaaggacacttggaggggataggagggaatatgggttcgggaagttgcgccatggaactgcatttggacagaaagcccaccctacgtatggtatcagaggagccatcgctgaattcgatgttgtcaaagcgtctggattagttcctggtcgtggatggggacattttaatgattatcaaaataaaggcaagttgttcatggcagattcatgttgggatgccaaagatcttgctggaatggttgtaactgccgcccactcaggaaaaaggttctatgtggacagtatttgctataatatgaatgcagaaaattctttccctaggaaagagggctatctgggtcccttggaatacagctcgtttgctgattactacaagcagaagtatggtgtggagttagtttataagaaacaacctcttatacgggcacgcggtgtttcatactgcaaaaatctactttctcctagatttgagcattctgaagctagcaatggagagttctcagagaatcttgacaagacatactatgtatatttaccacccgaattgtgccttgtgcatcctctccccggatcacttgttcgtggagctcagaggttaccctcaataatgagaagggtggagagcatgcttcttgcaattcaactgaaggacataattgggtatccagttcctgcaaataagatattagaagccttgactgctgcgtcatgccaggagacattctgctatgaaagagcagagctgctgggtgatgcatacttgaaatgggttgtgagtagattccttttcctaaaatatcctcaaaagcatgagggacagctcacaaggatgcggcagcagatggttagcaacatgatcctgtatcaatacgccctgaataaaaacctccaatcttatatccaagcagatcgatttgctccatcaagatgggcagctccaggagtgttacctgtatttgatgaagaaacgagagattctgaaccatccatctttgatgaggaatttactcctagcagtgagttacaaaagaacttgtatgatgactatgatggcgatagcatgcaagaagacggtgaaattgagggagattctagctgctatcgtgttctatcaagcaaaacattagcagatgttgtggaagcacttattggtgtctattatgtagctggagggaaaattgctacaaaccatctgatgaaatggatcggtattaatgcagagttggatcctcaagagatcccatcttcgaagccatataacatacctgagagcataattaaaagcatcaattttgacacattagagggtgcattgggtatcaagtttcagaataaaggcttacttgttgaagctataacacatgcatcaagaccatcatcaggtgtttcctgttaccagcgcctggaatttgttggtgatgctgtattggaccatctcattacgaagcacttattttttacttatacggacctacctccaggccgcttgactgacttgagagctgcagctgttaataatgagaactttgcaagggttgcagttaaacataagctacatgtacatcttcgccatggatcatctgcattggagacacagattcgagagtttgtgaaggatgtccaggaggagctttcgaaaccaggtttcaattcttttggccttggggattgtaaggctccaaaggttctcggagacatttttgagtctattgctggcgcaatattccttgatagtgggtgtgctacctccgtagtctggaaggtttttcagcctctgcttgatccaatggtgacgccggacacccttccgatgcaccctgtaagggagctccaagagcgctgccagcagcaagccgaaggattagaatacaaagcatcccgtacaggcaatgtagctacagttgaagtcttggttgatggcatacagattggtgtagctcagaacccacagaagaagatggcacaaaagttggcggctagaaatgcacttgttgtcttgaaagagaaggaaaccgcagcaaagaaagacactgaaaaggatggcgagaagaaaaacggttctcagttcactaggcagactctgaacgacatctgcttgagaaggcaatggccgatgccacagtacaggtgtataaacgagggtggccctgcccatgccaaaagatttgtttatgcggtaagggtaaatacatctgacagtggatggactgacgagtgcattggagagccaatgccgagtgtgaaaaaggccaaggactctgcagctgttcttctgctcgagctgctgaatcgaaattaccgtggcaagcctgatggaaaataatctttggtgatgttctgtggtggtaggtagacgtggaagcatccatcattctgattatacccccatgcagtgcttttcagcaaagcaaattaatggcctttgttgatgttcttggtggcggtattggtgatatggaggcattcaatgcaagcataagcagagctatggggagtgggattagaggattattattagttttgtctgaggtgactactaggtattttactggcgaggtactgaggtcacaactcacaaatagcagttgcaaattgcaatagaggaaatgatgataggttgatataggatattggaggcctcttattcatcgattgtataagatgtttacagaacagtgcattgatccattaaatttatattgattgatatttttatagtggatgcgcctgcagctgggaactcggggttctctatcttggcctcgccgaccaaatatcacgtacgtcgacgtccgcgaacagtatatatatggtaggcttggcgggcgtgatccccttgcgcatggtacagagcaagacgctgagctggatattctgataatcccgtatactccaacagaaactacagaatggaatcaagttgtacctgcgtttctgctgctcaaaaattgcgagatggaccatggacgtgtgttgtttggcaacaacgacgcaaccagcacggacaagaaggggggacatgcagtctctcgaaacctgtcctatacaattagaaagaaaaaaaagagggaaaataaaaggaaaagaacgcgagggcagggccggccggtcggtcggtgcctgcgccgcacttttgtcatgtgcctagcac

SEQ ID NO: 6248 - DNA, 5235 bp, Zea Mays
cttggtctagagatgagctacgtcttgtctatggtgtttctgagcgtacagaaagcgatggtgcagctaatttaattcagaagttgagagctataaactatgctctgggtgaactaggacagtggtgtgcttacaaggttgcactgtcattcttgacagcactacagaatgatgaaagggccaactatcaggttgatgttaagtttcaagagtcatacttgagaaaggtagttgatttgttacactgccagttgactgaaggggctgcaatgaaaagtgacagtaatgatgttgaaatgcataattctgaaaaccccaagccaaatgaacttgaggagggagagctacctgacagtcatggtattaatagtcttcttgcaaaatgtgttatatggtgacctttttctttttaacattccccaatgaatttcccttcttccttcactctacaattagcacatattgtgtttattttttgtcctttattataccttaggatatacaattagcacctattttgtttttttttgttctttattatacctgagggtatctcagcctcacttttaacgctttatgctgttatttcccactagctgtttctgtaggtgaacatgtagatgaagtcattggtgccgcagtggccgatggaaaagttaccccaagggtgcaagctttgataaaaatacttctcaagtatcagcacactgaggattttcgtgctatcatatttgtagagcgagtggttacagcattagtcctccctaaggtctttgcagaacttccatcgttgggctttatacggtgtgcaagcttgataggtcataacaataaccaggagatgcggtcgtgccaaatgcaggatacaatcacaaaatttcgtgatggccgtgttacactgttagttgcaactagtgttgcagaggaaggacttgatattaggcagtgcaatgttgtcattcgctttgaccttgcaaagactgttttggcctacattcagtctcggggtcgtgctagaaagcctggatctgactacatattgatgcttgaaagaggaaatatgtctcatgaagctttcttgagaaatgctcggaatagtgaagagacattgagaaaagaagctattgagagaactgatctcagtcatctcgatggcacttctatgctaagccctgttgatatatcacctgattctatgtatcaggttgaatcaacaggtgccgttgtcagtctgaactctgcagttggactcgtacatttttactgctcacagctgccgagtgacagatactctattcttcgaccggaatttattatgcaaaagcatgagaaaccagggggttcaacagaatattcttgcaaacttcaactcccttgtaatgccccattcgagaaacttgaaggtcctatatgcagttcaatacgcctggcccaacaagctgtttgtttagctgcttgtaagaagctacatgagatgggtgccttcacagatatgcttttacctgacagaggaagtggggaaggagaaaagactgaacaaaatgatgaaggtgatccactgcctggaacagcacgccatagagagttctttcctgaaggggttgctgaaattctacatggagaatggattttatctggaagagatggttaccaaagttcacagtttattaagttatatttgtattctgtgaactgtgtaaacattgggacttcaaaggaccctttcgttacacaactttcaaattttgctcttatttttggcaatgagctggatgcagaggttttatcgacgacgatggatctctttgttgctaggacaataataacaaaggcatctctcgtattccgtggaccaattgaaattacagaaagtcagctgatcctgcttaagagctttcatgttaggctcatgagcattgtacttgatgttgatgttgatccctcaacaactccttgggatccagcaaaagcatacctctttgttcctgtgggagctgagaaatgtatggatcttttaagagagatagattggactctagttaatagcattgtgaattctgatgcctggaacaaccctcttcagagggcacgcccagatgtctatctaggcacgaacgaaaggacacttggaggggataggagggaatatgggttcgggaagttgcgccatggaactgcatttggacagaaagcccaccctacgtatggtatcagaggagccatcgctgaattcgatgttgtcaaagcgtctggattagttcctggtcgtggatggggacattttaatgattatcaaaataaaggcaagttgttcatggcagattcatgttgggatgccaaagatcttgctggaatggttgtaactgccgcccactcaggaaaaaggttctatgtggacagtatttgctataatatgaatgcagaaaattctttccctaggaaagagggctatctgggtcccttggaatacagctcgtttgctgattactacaagcagaagtaagataagttttgagtgctggaagcaaaaggagttctctcttagctctacctccttttgatttccctttttttttggcaaagtagctttatggcagcataccatgatgattcttgtttttcctctcaggtatggtgtggagttagtttataagaaacaacctcttatacgggcacgcggtgtttcatactgcaaaaatctactttctcctagatttgagcattctgaagctagcaatggagagttctcagagaatcttgacaagacatactatgtatatttaccacccgaattgtgccttgtgcatcctctccccggatcacttgttcgtggagctcagaggttaccctcaataatgagaagggtggagagcatgcttcttgcaattcaactgaaggacataattgggtatccagttcctgcaaataagatattagaagccttgactgctgcgtcatgccaggagacattctgctatgaaagagcagagctgctgggtgatgcatacttgaaatgggttgtgagtagattccttttcctaaaatatcctcaaaagcatgagggacagctcacaaggatgcggcagcagatggttagcaacatgatcctgtatcaatacgccctgaataaaaacctccaatcttatatccaagcagatcgatttgctccatcaagatgggcagctccaggagtgttacctgtatttgatgaagaaacgagagattctgaaccatccatctttgatgaggaatttactcctagcagtgagttacaaaagaacttgtatgatgactatgatggcgatagcatgcaagaagacggtgaaattgagggagattctagctgctatcgtgttctatcaagcaaaacattagcagatgttgtggaagcacttattggtgtctattatgtagctggagggaaaattgctacaaaccatctgatgaaatggatcggtattaatgcagagttggatcctcaagagatcccatcttcgaagccatataacatacctgagagcataattaaaagcatcaattttgacacattagagggtgcattgggtatcaagtttcagaataaaggcttacttgttgaagctataacacatgcatcaagaccatcatcaggtgtttcctgttaccagcgcctggaatttgttggtgatgctgtattggaccatctcattacgaagcacttattttttacttatacggacctacctccaggccgcttgactgacttgagagctgcagctgttaataatgagaactttgcaagggttgcagttaaacataagctacatgtacatcttcgccatggatcatctgcattggagacacagattcgagagtttgtgaaggatgtccaggaggagctttcgaaaccaggtttcaattcttttggccttggggattgtaaggctccaaaggttctcggagacatttttgagtctattgctggcgcaatattccttgatagtgggtgtgctacctccgtagtctggaaggtttttcagcctctgcttgatccaatggtgacgccggacacccttccgatgcaccctgtaagggagctccaagagcgctgccagcagcaagccgaaggattagaatacaaagcatcccgtacaggcaatgtagctacagttgaagtcttggttgatggcatacagattggtgtagctcagaacccacagaagaagatggcacaaaagttggcggctagaaatgcacttgttgtcttgaaagagaaggaaaccgcagcaaagaaagacactgaaaaggatggcgagaagaaaaacggttctcagttcactaggcagactctgaacgacatctgcttgagaaggcaatggccgatgccacagtacaggtgtataaacgagggtggccctgcccatgccaaaagatttgtttatgcggtaagggtaaatacatctgacagtggatggactgacgagtgcattggagagccaatgccgagtgtgaaaaaggccaaggactctgcagctgttcttctgctcgagctgctgaatcgaaattaccgtggcaagcctgatggaaaataatctttggtgatgttctgtggtggtaggtagacgtggaagcatccatcattctgattatacccccatgcagtgcttttcagcaaagcaaattaatggcctttgttgatgttcttggtggcggtattggtgatatggaggcattcaatgcaagcataagcagagctatggggagtgggattagaggattattattagttttgtctgaggtgactactaggtattttactggcgaggatgcgcctgcagctgggaactcggggttctctatcttggcctcgccgaccaaatatcacgtacgtcgacgtccgcgaacagtatatatatggtaggcttggcgggcgtgatccccttgcgcatggtacagagcaagacgctgagctggatattctgataatcccgtatactccaacagaaactacagaatggaatcaagttgtacctgcgtttctgctgctcaaaaattgcgagatggaccatggacgtgtgttgtttggcaacaacgacgcaaccagcacggacaagaaggggggacatgcagtctctcgaaacctgtcctatacaattagaaagaaaaaaaagagggaaaataaaaggaaaagaacgcgagggcagggccggccggtcggtcggtgcctgcgccgcacttttgtcatgtgcctagcac

SEQ ID NO: 6249 - DNA, 4944 bp, Zea Mays
cttggtctagagatgagctacgtcttgtctatggtgtttctgagcgtacagaaagcgatggtgcagctaatttaattcagaagttgagagctataaactatgctctgggtgaactaggacagtggtgtgcttacaaggttgcactgtcattcttgacagcactacagaatgatgaaagggccaactatcaggttgatgttaagtttcaagagtcatacttgagaaaggtagttgatttgttacactgccagttgactgaaggggctgcaatgaaaagtgacagtaatgatgttgaaatgcataattctgaaaaccccaagccaaatgaacttgaggagggagagctacctgacagtcatgctgtttctgtaggtgaacatgtagatgaagtcattggtgccgcagtggccgatggaaaagttaccccaagggtgcaagctttgataaaaatacttctcaagtatcagcacactgaggattttcgtgctatcatatttgtagagcgagtggttacagcattagtcctccctaaggtctttgcagaacttccatcgttgggctttatacggtgtgcaagcttgataggtcataacaataaccaggagatgcggtcgtgccaaatgcaggatacaatcacaaaatttcgtgatggccgtgttacactgttagttgcaactagtgttgcagaggaaggacttgatattaggcagtgcaatgttgtcattcgctttgaccttgcaaagactgttttggcctacattcagtctcggggtcgtgctagaaagcctggatctgactacatattgatgcttgaaagaggaaatatgtctcatgaagctttcttgagaaatgctcggaatagtgaagagacattgagaaaagaagctattgagagaactgatctcagtcatctcgatggcacttctatgctaagccctgttgatatatcacctgattctatgtatcaggttgaatcaacaggtgccgttgtcagtctgaactctgcagttggactcgtacatttttactgctcacagctgccgagtgacagatactctattcttcgaccggaatttattatgcaaaagcatgagaaaccagggggttcaacagaatattcttgcaaacttcaactcccttgtaatgccccattcgagaaacttgaaggtcctatatgcagttcaatacgcctggcccaacaagctgtttgtttagctgcttgtaagaagctacatgagatgggtgccttcacagatatgcttttacctgacagaggaagtggggaaggagaaaagactgaacaaaatgatgaaggtgatccactgcctggaacagcacgccatagagagttctttcctgaaggggttgctgaaattctacatggagaatggattttatctggaagagatggttaccaaagttcacagtttattaagttatatttgtattctgtgaactgtgtaaacattgggacttcaaaggaccctttcgttacacaactttcaaattttgctcttatttttggcaatgagctggatgcagaggttttatcgacgacgatggatctctttgttgctaggacaataataacaaaggcatctctcgtattccgtggaccaattgaaattacagaaagtcagctgatcctgcttaagagctttcatgttaggctcatgagcattgtacttgatgttgatgttgatccctcaacaactccttgggatccagcaaaagcatacctctttgttcctgtgggagctgagaaatagggcacgcccagatgtctatctaggcacgaacgaaaggacacttggaggggataggagggaatatgggttcgggaagttgcgccatggaactgcatttggacagaaagcccaccctacgtatggtatcagaggagccatcgctgaattcgatgttgtcaaagcgtctggattagttcctggtcgtggatggggacattttaatgattatcaaaataaaggcaagttgttcatggcagattcatgttgggatgccaaagatcttgctggaatggttgtaactgccgcccactcaggaaaaaggttctatgtggacagtatttgctataatatgaatgcagaaaattctttccctaggaaagagggctatctgggtcccttggaatacagctcgtttgctgattactacaagcagaagtatggtgtggagttagtttataagaaacaacctcttatacgggcacgcggtgtttcatactgcaaaaatctactttctcctagatttgagcattctgaagctagcaatggagagttctcagagaatcttgacaagacatactatgtatatttaccacccgaattgtgccttgtgcatcctctccccggatcacttgttcgtggagctcagaggttaccctcaataatgagaagggtggagagcatgcttcttgcaattcaactgaaggacataattgggtatccagttcctgcaaataagatattagaagccttgactgctgcgtcatgccaggagacattctgctatgaaagagcagagctgctgggtgatgcatacttgaaatgggttgtgagtagattccttttcctaaaatatcctcaaaagcatgagggacagctcacaaggatgcggcagcagatggttagcaacatgatcctgtatcaatacgccctgaataaaaacctccaatcttatatccaagcagatcgatttgctccatcaagatgggcagctccaggagtgttacctgtatttgatgaagaaacgagagattctgaaccatccatctttgatgaggaatttactcctagcagtgagttacaaaagaacttgtatgatgactatgatggcgatagcatgcaagaagacggtgaaattgagggagattctagctgctatcgtgttctatcaagcaaaacattagcagatgttgtggaagcacttattggtgtctattatgtagctggagggaaaattgctacaaaccatctgatgaaatggatcggtattaatgcagagttggatcctcaagagatcccatcttcgaagccatataacatacctgagagcataattaaaagcatcaattttgacacattagagggtgcattgggtatcaagtttcagaataaaggcttacttgttgaagctataacacatgcatcaagaccatcatcaggtgtttcctgttaccagcgcctggaatttgttggtgatgctgtattggaccatctcattacgaagcacttattttttacttatacggacctacctccaggccgcttgactgacttgagagctgcagctgttaataatgagaactttgcaagggttgcagttaaacataagctacatgtacatcttcgccatggatcatctgcattggagacacagattcgagagtttgtgaaggatgtccaggaggagctttcgaaaccaggtttcaattcttttggccttggggattgtaaggctccaaaggttctcggagacatttttgagtctattgctggcgcaatattccttgatagtgggtgtgctacctccgtagtctggaaggtttttcagcctctgcttgatccaatggtgacgccggacacccttccgatgcaccctgtaagggagctccaagagcgctgccagcagcaagccgaaggattagaatacaaagcatcccgtacaggcaatgtagctacagttgaagtcttggttgatggcatacagattggtgtagctcagaacccacagaagaagatggcacaaaagttggcggctagaaatgcacttgttgtcttgaaagagaaggaaaccgcagcaaagaaagacactgaaaaggatggcgagaagaaaaacggttctcagttcactaggcagactctgaacgacatctgcttgagaaggcaatggccgatgccacagtacaggtgtataaacgagggtggccctgcccatgccaaaagatttgtttatgcggtaagggtaaatacatctgacagtggatggactgacgagtgcattggagagccaatgccgagtgtgaaaaaggccaaggactctgcagctgttcttctgctcgagctgctgaatcgaaattaccgtggcaagcctgatggaaaataatctttggtgatgttctgtggtggtaggtagacgtggaagcatccatcattctgattatacccccatgcagtgcttttcagcaaagcaaattaatggcctttgttgatgttcttggtggcggtattggtgatatggaggcattcaatgcaagcataagcagagctatggggagtgggattagaggattattattagttttgtctgaggtgactactaggtattttactggcgaggtactgaggtcacaactcacaaatagcagttgcaaattgcaatagaggaaatgatgataggttgatataggatattggaggcctcttattcatcgattgtataagatgtttacagaacagtgcattgatccattaaatttatattgattgatatttttatagtggatgcgcctgcagctgggaactcggggttctctatcttggcctcgccgaccaaatatcacgtacgtcgacgtccgcgaacagtatatatatggcgggcgtgatccccttgcgcatggtacagagcaagacgctgagctggatattctgataatcccgtatactccaacagaaactacagaatggaatcaagttgtacctgcgtttctgctgctcaaaaattgcgagatggaccatggacgtgtgttgtttggcaacaacgacgcaaccagcacggacaagaaggggggacatgcagtctctcgaaacctgtcctatacaattagaaagaaaaaaaagagggaaaataaaaggaaaagaacgcgagggcagggccggccggtcggtcggtgcctgcgccgcacttttgtcatgtgcctagcac

SEQ ID NO: 6250 - DNA, 5033 bp, Zea Mays
cttggtctagagatgagctacgtcttgtctatggtgtttctgagcgtacagaaagcgatggtgcagctaatttaattcagaagttgagagctataaactatgctctgggtgaactaggacagtggtgtgcttacaaggttgcactgtcattcttgacagcactacagaatgatgaaagggccaactatcaggttgatgttaagtttcaagagtcatacttgagaaaggtagttgatttgttacactgccagttgactgaaggggctgcaatgaaaagtgacagtaatgatgttgaaatgcataattctgaaaaccccaagccaaatgaacttgaggagggagagctacctgacagtcatgctgtttctgtaggtgaacatgtagatgaagtcattggtgccgcagtggccgatggaaaagttaccccaagggtgcaagctttgataaaaatacttctcaagtatcagcacactgaggattttcgtgctatcatatttgtagagcgagtggttacagcattagtcctccctaaggtctttgcagaacttccatcgttgggctttatacggtgtgcaagcttgataggtcataacaataaccaggagatgcggtcgtgccaaatgcaggatacaatcacaaaatttcgtgatggccgtgttacactgttagttgcaactagtgttgcagaggaaggacttgatattaggcagtgcaatgttgtcattcgctttgaccttgcaaagactgttttggcctacattcagtctcggggtcgtgctagaaagcctggatctgactacatattgatgcttgaaagaggaaatatgtctcatgaagctttcttgagaaatgctcggaatagtgaagagacattgagaaaagaagctattgagagaactgatctcagtcatctcgatggcacttctatgctaagccctgttgatatatcacctgattctatgtatcaggttgaatcaacaggtgccgttgtcagtctgaactctgcagttggactcgtacatttttactgctcacagctgccgagtgacagatactctattcttcgaccggaatttattatgcaaaagcatgagaaaccagggggttcaacagaatattcttgcaaacttcaactcccttgtaatgccccattcgagaaacttgaaggtcctatatgcagttcaatacgcctggcccaacaagctgtttgtttagctgcttgtaagaagctacatgagatgggtgccttcacagatatgcttttacctgacagaggaagtggggaaggagaaaagactgaacaaaatgatgaaggtgatccactgcctggaacagcacgccatagagagttctttcctgaaggggttgctgaaattctacatggagaatggattttatctggaagagatggttaccaaagttcacagtttattaagttatatttgtattctgtgaactgtgtaaacattgggacttcaaaggaccctttcgttacacaactttcaaattttgctcttatttttggcaatgagctggatgcagaggttttatcgacgacgatggatctctttgttgctaggacaataataacaaaggcatctctcgtattccgtggaccaattgaaattacagaaagtcagctgatcctgcttaagagctttcatgttaggctcatgagcattgtacttgatgttgatgttgatccctcaacaactccttgggatccagcaaaagcatacctctttgttcctgtgggagctgagaaatgtatggatcttttaagagagatagattggactctagttaatagcattgtgaattctgatgcctggaacaaccctcttcagagggcacgcccagatgtctatctaggcacgaacgaaaggacacttggaggggataggagggaatatgggttcgggaagttgcgccatggaactgcatttggacagaaagcccaccctacgtatggtatcagaggagccatcgctgaattcgatgttgtcaaagcgtctggattagttcctggtcgtggatggggacattttaatgattatcaaaataaaggcaagttgttcatggcagattcatgttgggatgccaaagatcttgctggaatggttgtaactgccgcccactcaggaaaaaggttctatgtggacagtatttgctataatatgaatgcagaaaattctttccctaggaaagagggctatctgggtcccttggaatacagctcgtttgctgattactacaagcagaagtatggtgtggagttagtttataagaaacaacctcttatacgggcacgcggtgtttcatactgcaaaaatctactttctcctagatttgagcattctgaagctagcaatggagagttctcagagaatcttgacaagacatactatgtatatttaccacccgaattgtgccttgtgcatcctctccccggatcacttgttcgtggagctcagaggttaccctcaataatgagaagggtggagagcatgcttcttgcaattcaactgaaggacataattgggtatccagttcctgcaaataagatattagaagccttgactgctgcgtcatgccaggagacattctgctatgaaagagcagagctgctgggtgatgcatacttgaaatgggttgtgagtagattccttttcctaaaatatcctcaaaagcatgagggacagctcacaaggatgcggcagcagatggttagcaacatgatcctgtatcaatacgccctgaataaaaacctccaatcttatatccaagcagatcgatttgctccatcaagatgggcagctccaggagtgttacctgtatttgatgaagaaacgagagattctgaaccatccatctttgatgaggaatttactcctagcagtgagttacaaaagaacttgtatgatgactatgatggcgatagcatgcaagaagacggtgaaattgagggagattctagctgctatcgtgttctatcaagcaaaacattagcagatgttgtggaagcacttattggtgtctattatgtagctggagggaaaattgctacaaaccatctgatgaaatggatcggtattaatgcagagttggatcctcaagagatcccatcttcgaagccatataacatacctgagagcataattaaaagcatcaattttgacacattagagggtgcattgggtatcaagtttcagaataaaggcttacttgttgaagctataacacatgcatcaagaccatcatcaggtgtttcctgttaccagcgcctggaatttgttggtgatgctgtattggaccatctcattacgaagcacttattttttacttatacggacctacctccaggccgcttgactgacttgagagctgcagctgttaataatgagaactttgcaagggttgcagttaaacataagctacatgtacatcttcgccatggatcatctgcattggagacacagattcgagagtttgtgaaggatgtccaggaggagctttcgaaaccaggtttcaattcttttggccttggggattgtaaggctccaaaggttctcggagacatttttgagtctattgctggcgcaatattccttgatagtgggtgtgctacctccgtagtctggaaggtttttcagcctctgcttgatccaatggtgacgccggacacccttccgatgcaccctgtaagggagctccaagagcgctgccagcagcaagccgaaggattagaatacaaagcatcccgtacaggcaatgtagctacagttgaagtcttggttgatggcatacagattggtgtagctcagaacccacagaagaagatggcacaaaagttggcggctagaaatgcacttgttgtcttgaaagagaaggaaaccgcagcaaagaaagacactgaaaaggatggcgagaagaaaaacggttctcagttcactaggcagactctgaacgacatctgcttgagaaggcaatggccgatgccacagtacaggtgtataaacgagggtggccctgcccatgccaaaagatttgtttatgcggtaagggtaaatacatctgacagtggatggactgacgagtgcattggagagccaatgccgagtgtgaaaaaggccaaggactctgcagctgttcttctgctcgagctgctgaatcgaaattaccgtggcaagcctgatggaaaataatctttggtgatgttctgtggtggtaggtagacgtggaagcatccatcattctgattatacccccatgcagtgcttttcagcaaagcaaattaatggcctttgttgatgttcttggtggcggtattggtgatatggaggcattcaatgcaagcataagcagagctatggggagtgggattagaggattattattagttttgtctgaggtgactactaggtattttactggcgaggtactgaggtcacaactcacaaatagcagttgcaaattgcaatagaggaaatgatgataggttgatataggatattggaggcctcttattcatcgattgtataagatgtttacagaacagtgcattgatccattaaatttatattgattgatatttttatagtggatgcgcctgcagctgggaactcggggttctctatcttggcctcgccgaccaaatatcacgtacgtcgacgtccgcgaacagtatatatatggtaggcttggcgggcgtgatccccttgcgcatggtacagagcaagacgctgagctggatattctgataatcccgtatactccaacagaaactacagaatggaatcaagttgtacctgcgtttctgctgctcaaaaattgcgagatggaccatggacgtgtgttgtttggcaacaacgacgcaaccagcacggacaagaaggggggacatgcagtctctcgaaacctgtcctatacaattagaaagaaaaaaaagagggaaaataaaaggaaaagaacgcgagggcagggccggccggtcggtcggtgcctgcgccgcacttttgtcatgtgcctagcac

SEQ ID NO: 6251 - DNA, 5100 bp, Zea Mays
cttggtctagagatgagctacgtcttgtctatggtgtttctgagcgtacagaaagcgatggtgcagctaatttaattcagaagttgagagctataaactatgctctgggtgaactaggacagtggtgtgcttacaaggttgcactgtcattcttgacagcactacagaatgatgaaagggccaactatcaggttgatgttaagtttcaagagtcatacttgagaaaggtagttgatttgttacactgccagttgactgaaggggctgcaatgaaaagtgacagtaatgatgttgaaatgcataattctgaaaaccccaagccaaatgaacttgaggagggagagctacctgacagtcatggtattaatagtcttcttgcaaaatgtgttatatggtgacctttttctttttaacattccccaatgaatttcccttcttccttcactctacaattagcacatattgtgtttattttttgtcctttattataccttaggatatacaattagcacctattttgtttttttttgttctttattatacctgagggtatctcagcctcacttttaacgctttatgctgttatttcccactagctgtttctgtaggtgaacatgtagatgaagtcattggtgccgcagtggccgatggaaaagttaccccaagggtgcaagctttgataaaaatacttctcaagtatcagcacactgaggattttcgtgctatcatatttgtagagcgagtggttacagcattagtcctccctaaggtctttgcagaacttccatcgttgggctttatacggtgtgcaagcttgataggtcataacaataaccaggagatgcggtcgtgccaaatgcaggatacaatcacaaaatttcgtgatggccgtgttacactgttagttgcaactagtgttgcagaggaaggacttgatattaggcagtgcaatgttgtcattcgctttgaccttgcaaagactgttttggcctacattcagtctcggggtcgtgctagaaagcctggatctgactacatattgatgcttgaaagaggaaatatgtctcatgaagctttcttgagaaatgctcggaatagtgaagagacattgagaaaagaagctattgagagaactgatctcagtcatctcgatggcacttctatgctaagccctgttgatatatcacctgattctatgtatcaggttgaatcaacaggtgccgttgtcagtctgaactctgcagttggactcgtacatttttactgctcacagctgccgagtgacagatactctattcttcgaccggaatttattatgcaaaagcatgagaaaccagggggttcaacagaatattcttgcaaacttcaactcccttgtaatgccccattcgagaaacttgaaggtcctatatgcagttcaatacgcctggcccaacaagctgtttgtttagctgcttgtaagaagctacatgagatgggtgccttcacagatatgcttttacctgacagaggaagtggggaaggagaaaagactgaacaaaatgatgaaggtgatccactgcctggaacagcacgccatagagagttctttcctgaaggggttgctgaaattctacatggagaatggattttatctggaagagatggttaccaaagttcacagtttattaagttatatttgtattctgtgaactgtgtaaacattgggacttcaaaggaccctttcgttacacaactttcaaattttgctcttatttttggcaatgagctggatgcagaggttttatcgacgacgatggatctctttgttgctaggacaataataacaaaggcatctctcgtattccgtggaccaattgaaattacagaaactgatcctgcttaagagctttcatgttaggctcatgagcattgtacttgatgttgatgttgatccctcaacaactccttgggatccagcaaaagcatacctctttgttcctgtgggagctgagaaatgtatggatcttttaagagagatagattggactctagttaatagcattgtgaattctgatgcctggaacaaccctcttcagagggcacgcccagatgtctatctaggcacgaacgaaaggacacttggaggggataggagggaatatgggttcgggaagttgcgccatggaactgcatttggacagaaagcccaccctacgtatggtatcagaggagccatcgctgaattcgatgttgtcaaagcgtctggattagttcctggtcgtggatggggacattttaatgattatcaaaataaaggcaagttgttcatggcagattcatgttgggatgccaaagatcttgctggaatggttgtaactgccgcccactcaggaaaaaggttctatgtggacagtatttgctataatatgaatgcagaaaattctttccctaggaaagagggctatctgggtcccttggaatacagctcgtttgctgattactacaagcagaagtatggtgtggagttagtttataagaaacaacctcttatacgggcacgcggtgtttcatactgcaaaaatctactttctcctagatttgagcattctgaagctagcaatggagagttctcagagaatcttgacaagacatactatgtatatttaccacccgaattgtgccttgtgcatcctctccccggatcacttgttcgtggagctcagaggttaccctcaataatgagaagggtggagagcatgcttcttgcaattcaactgaaggacataattgggtatccagttcctgcaaataagatattagaagccttgactgctgcgtcatgccaggagacattctgctatgaaagagcagagctgctgggtgatgcatacttgaaatgggttgtgagtagattccttttcctaaaatatcctcaaaagcatgagggacagctcacaaggatgcggcagcagatggttagcaacatgatcctgtatcaatacgccctgaataaaaacctccaatcttatatccaagcagatcgatttgctccatcaagatgggcagctccaggagtgttacctgtatttgatgaagaaacgagagattctgaaccatccatctttgatgaggaatttactcctagcagtgagttacaaaagaacttgtatgatgactatgatggcgatagcatgcaagaagacggtgaaattgagggagattctagctgctatcgtgttctatcaagcaaaacattagcagatgttgtggaagcacttattggtgtctattatgtagctggagggaaaattgctacaaaccatctgatgaaatggatcggtattaatgcagagttggatcctcaagagatcccatcttcgaagccatataacatacctgagagcataattaaaagcatcaattttgacacattagagggtgcattgggtatcaagtttcagaataaaggcttacttgttgaagctataacacatgcatcaagaccatcatcaggtgtttcctgttaccagcgcctggaatttgttggtgatgctgtattggaccatctcattacgaagcacttattttttacttatacggacctacctccaggccgcttgactgacttgagagctgcagctgttaataatgagaactttgcaagggttgcagttaaacataagctacatgtacatcttcgccatggatcatctgcattggagacacagattcgagagtttgtgaaggatgtccaggaggagctttcgaaaccaggtttcaattcttttggccttggggattgtaaggctccaaaggttctcggagacatttttgagtctattgctggcgcaatattccttgatagtgggtgtgctacctccgtagtctggaaggtttttcagcctctgcttgatccaatggtgacgccggacacccttccgatgcaccctgtaagggagctccaagagcgctgccagcagcaagccgaaggattagaatacaaagcatcccgtacaggcaatgtagctacagttgaagtcttggttgatggcatacagattggtgtagctcagaacccacagaagaagatggcacaaaagttggcggctagaaatgcacttgttgtcttgaaagagaaggaaaccgcagcaaagaaagacactgaaaaggatggcgagaagaaaaacggttctcagttcactaggcagactctgaacgacatctgcttgagaaggcaatggccgatgccacagtacaggtgtataaacgagggtggccctgcccatgccaaaagatttgtttatgcggtaagggtaaatacatctgacagtggatggactgacgagtgcattggagagccaatgccgagtgtgaaaaaggccaaggactctgcagctgttcttctgctcgagctgctgaatcgaaattaccgtggcaagcctgatggaaaataatctttggtgatgttctgtggtggtaggtagacgtggaagcatccatcattctgattatacccccatgcagtgcttttcagcaaagcaaattaatggcctttgttgatgttcttggtggcggtattggtgatatggaggcattcaatgcaagcataagcagagctatggggagtgggattagaggattattattagttttgtctgaggtgactactaggtattttactggcgaggatgcgcctgcagctgggaactcggggttctctatcttggcctcgccgaccaaatatcacgtacgtcgacgtccgcgaacagtatatatatggtaggcttggcgggcgtgatccccttgcgcatggtacagagcaagacgctgagctggatattctgataatcccgtatactccaacagaaactacagaatggaatcaagttgtacctgcgtttctgctgctcaaaaattgcgagatggaccatggacgtgtgttgtttggcaacaacgacgcaaccagcacggacaagaaggggggacatgcagtctctcgaaacctgtcctatacaattagaaagaaaaaaaagagggaaaataaaaggaaaagaacgcgagggcagggccggccggtcggtcggtgcctgcgccgcacttttgtcatgtgcctagcac

SEQ ID NO: 6252 - DNA, 4808 bp, Zea Mays
cttggtctagagatgagctacgtcttgtctatggtgtttctgagcgtacagaaagcgatggtgcagctaatttaattcagaagttgagagctataaactatgctctgggtgaactaggacagtggtgtgcttacaaggttgcactgtcattcttgacagcactacagaatgatgaaagggccaactatcaggttgatgttaagtttcaagagtcatacttgagaaaggtagttgatttgttacactgccagttgactgaaggggctgcaatgaaaagtgacagtaatgatgttgaaatgcataattctgaaaaccccaagccaaatgaacttgaggagggagagctacctgacagtcatgctgtttctgtaggtgaacatgtagatgaagtcattggtgccgcagtggccgatggaaaagttaccccaagggtgcaagctttgataaaaatacttctcaagtatcagcacactgaggattttcgtgctatcatatttgtagagcgagtggttacagcattagtcctccctaaggtctttgcagaacttccatcgttgggctttatacggtgtgcaagcttgataggtcataacaataaccaggagatgcggtcgtgccaaatgcaggatacaatcacaaaatttcgtgatggccgtgttacactgttagttgcaactagtgttgcagaggaaggacttgatattaggcagtgcaatgttgtcattcgctttgaccttgcaaagactgttttggcctacattcagtctcggggtcgtgctagaaagcctggatctgactacatattgatgcttgaaagaggaaatatgtctcatgaagctttcttgagaaatgctcggaatagtgaagagacattgagaaaagaagctattgagagaactgatctcagtcatctcgatggcacttctatgctaagccctgttgatatatcacctgattctatgtatcaggttgaatcaacaggtgccgttgtcagtctgaactctgcagttggactcgtacatttttactgctcacagctgccgagtgacagatactctattcttcgaccggaatttattatgcaaaagcatgagaaaccagggggttcaacagaatattcttgcaaacttcaactcccttgtaatgccccattcgagaaacttgaaggtcctatatgcagttcaatacgcctggcccaacaagctgtttgtttagctgcttgtaagaagctacatgagatgggtgccttcacagatatgcttttacctgacagaggaagtggggaaggagaaaagactgaacaaaatgatgaaggtgatccactgcctggaacagcacgccatagagagttctttcctgaaggggttgctgaaattctacatggagaatggattttatctggaagagatggttaccaaagttcacagtttattaagttatatttgtattctgtgaactgtgtaaacattgggacttcaaaggaccctttcgttacacaactttcaaattttgctcttatttttggcaatgagctggatgcagaggttttatcgacgacgatggatctctttgttgctaggacaataataacaaaggcatctctcgtattccgtggaccaattgaaattacagaaagtcagctgatcctgcttaagagctttcatgttaggctcatgagcattgtacttgatgttgatgttgatccctcaacaactccttgggatccagcaaaagcatacctctttgttcctgtgggagctgagaaatgtatggatcttttaagagagatagattggactctagttaatagcattgtgaattctgatgcctggaacaaccctcttcagagggcacgcccagatgtctatctaggcacgaacgaaaggacacttggaggggataggagggaatatgggttcgggaagttgcgccatggaactgcatttggacagaaagcccaccctacgtatggtatcagaggagccatcgctgaattcgatgttgtcaaagcgtctggattagttcctggtcgtggatggggacattttaatgattatcaaaataaaggcaagttgttcatggcagattcatgttgggatgccaaagatcttgctggaatggttgtaactgccgcccactcaggaaaaaggttctatgtggacagtatttgctataatatgaatgcagaaaattctttccctaggaaagagggctatctgggtcccttggaatacagctcgtttgctgattactacaagcagaagtaagataagttttgagtgctggaagcaaaaggagttctctcttagctctacctccttttgatttccctttttttttggcaaagtagctttatggcagcataccatgatgattcttgtttttcctctcaggtatggtgtggagttagtttataagaaacaacctcttatacgggcacgcggtgtttcatactgcaaaaatctactttctcctagatttgagcattctgaagctagcaatggagagttctcagagaatcttgacaagacatactatgtatatttaccacccgaattgtgccttgtgcatcctctccccggatcacttgttcgtggagctcagaggttaccctcaataatgagaagggtggagagcatgcttcttgcaattcaactgaaggacataattgggtatccagttcctgcaaataagatattagaagccttgactgctgcgtcatgccaggagacattctgctatgaaagagcagagctgctgggtgatgcatacttgaaatgggttgtgagtagattccttttcctaaaatatcctcaaaagcatgagggacagctcacaaggatgcggcagcagatggttagcaacatgatcctgtatcaatacgccctgaataaaaacctccaatcttatatccaagcagatcgatttgctccatcaagatgggcagctccaggagtgttacctgtatttgatgaagaaacgagagattctgaaccatccatctttgatgaggaatttactcctagcagtgagttacaaaagaacttgtatgatgactatgatggcgatagcatgcaagaagacggtgaaattgagggagattctagctgctatcgtgttctatcaagcaaaacattagcagatgttgtggaagcacttattggtgtctattatgtagctggagggaaaattgctacaaaccatctgatgaaatggatcggtattaatgcagagttggatcctcaagagatcccatcttcgaagccatataacatacctgagagcataattaaaagcatcaattttgacacattagagggtgcattgggtatcaagtttcagaataaaggcttacttgttgaagctataacacatgcatcaagaccatcatcaggtgtttcctgttaccagcgcctggaatttgttggtgatgctgtattggaccatctcattacgaagcacttattttttacttatacggacctacctccaggccgcttgactgacttgagagctgcagctgttaataatgagaactttgcaagggttgcagttaaacataagctacatgtacatcttcgccatggatcatctgcattggagacacagattcgagagtttgtgaaggatgtccaggaggagctttcgaaaccaggtttcaattcttttggccttggggattgtaaggctccaaaggttctcggagacatttttgagtctattgctggcgcaatattccttgatagtgggtgtgctacctccgtagtctggaagcctctgcttgatccaatggtgacgccggacacccttccgatgcaccctgtaagggagctccaagagcgctgccagcagcaagccgaaggattagaatacaaagcatcccgtacaggcaatgtagctacagttgaagtcttggttgatggcatacagattggtgtagctcagaacccacagaagaagatggcacaaaagttggcggctagaaatgcacttgttgtcttgaaagagaaggaaaccgcagcaaagaaagacactgaaaaggatggcgagaagaaaaacggttctcagttcactaggcagactctgaacgacatctgcttgagaaggcaatggccgatgccacagtacaggtgtataaacgagggtggccctgcccatgccaaaagatttgtttatgcggtaagggtaaatacatctgacagtggatggactgacgagtgcattggagagccaatgccgagtgtgaaaaaggccaaggactctgcagctgttcttctgctcgagctgctgaatcgaaattaccgtggcaagcctgatggaaaataatctttggtgatgttctgtggtggtaggtagacgtggaagcatccatcattctgattatacccccatgcagtgcttttcagcaaagcaaattaatggcctttgttgatgttcttggtggcggtattggtgatatggaggcattcaatgcaagcataagcagagctatggggagtgggattagaggattattattagttttgtctgaggtgactactaggtattttactggcgaggtactgaggtcacaactcacaaatagcagttgcaaattgcaatagaggaaatgatgataggttgatataggatattggaggcctcttattcatcgattgtataagatgtttacagaacagtgcattgatccattaaatttatattgattgatatttttatagtggatgcgcctgcagctgggaactcggggttctctatcttggcctcgccgaccaaatatcacgtacgtcgacgtccgcgaacagtat

SEQ ID NO: 6253 - DNA, 1973 bp, Zea Mays
ggaacctgcacccatgccccacacgtcagtgggagacagaccgaccgacctctccccgtctcacgggtgcagccattggggtgccggctccgctcggccctcctcttcctcgattcgcaagtcccaacccgcctctcccacaaaggccaaagccccacctgctccgtcgagtcccgtcggctcgccccgtctccctccctcctcctccctcaaatcatatcatcagagcgagagggacggcgagaggagagctgggaaggacagagagagagagagagtgaagagaaagagtagcgttgatacaccgtcgaatcgaatcgagaccctccctccgccccaccgcaccccccatatcgcatcggaatccagcatcgccatcgccacccctccatcgcaccaccgctttccactctccactcccttcccaccctcgccccgccccgccccgcgcttgcgtgattcgtacggtttatcaccgcctctttctcttccactctctctccgtggttgggtccggctcggtccggtccggtccgcccgccgccgccgcggcacccactacaactgttggtgcagagcgagatggcgggagggccaggaggaggcggcgacgccggcggcgagcacgcggcggcggcgtactggtacgacgcgtgcgaggacagcgcctccctgctctgcggcatcgacttcgccgcgtccgccgacttcgacccgggcctcataccggccatggactgcggcgccgatgacggcttcgtcgccgagatcgaccggatactcgagagcatcaacgccgaggccacccccgcaccgccgcctcctcctcctgcgcctgcgcctgcgccagcgccagcgcctgtggctccgctgcagccacagccgcagttgcaggaggcggctgcgaccgtggcccacaatgcggtggcggtgtcggacgtggcgcagagggccccggccgtggaagcgaggaaggagcccaggagggagttcccggtcgccgcggccaatggcggcgacgactgcagggacagcaagcgccagcgtctccctgcgggtggtaccgggggaccacgccacgactggcggcggcgtccgatggcgcccccgcctccatcccgtgggtgggaggaccgggggcgcggaaggcgggagtacgacaggcctcgtaagcgcgaccgcgacggccactacggccaatgccatgatcaccaccgacgcgaccctcggggtttctgggagcgcgaccgcggcggcaagatggtgttccgccatggcatgtgggaggctgaggcggaccgccagggaaagcgtgccaggacgaaggatggatgccctcctgcggagaataaggcggaggtggatcggtcggggaaggagaagcctgccactgaggagaaggcgaggcagtaccagctcgaggtgcttgagcaagcaaagagcaggaacacaattgctttccttgaaactggtgcggggaagactctcatagctgtgttgctcatcaaaagcatctgtgacaaaatgctcaaggagaacaagaagatccttgctgtcttcttggtgcctaaggtgccccttgtgtatcagcaagctgaagtgatacgcgagaggaccggctatcgtgttgggcactactgcggggagatggggcaggatttctgggattctagaaagtggcagcgcgagtttgagtcaaaacaggtaaaatcctgtgcgtggccgtacttttacttccaaactattttcagatacaatgccccatggccaagctttgatcaaacctgtgcttaggccacttgagttaggaactatagtgtagtactatgttgttgagctaactggttagtagccgagacacttgcattaagtctcattgtttctttgcagattatgaatttctaaaaaaattctttctctagatgtaaactagtagccgaggcacctgcattaaatctggccgtgcaggacgt

SEQ ID NO: 6254 - DNA, 1707 bp, Zea Mays
atgcccatcccaagtcacgaattcctatccggcaggtacgccacagcttccataatgctccggctggccttcccgctcgtctcccatctcccacgccggaaaccgtccgcaatccgcccacgccctccacccgctcgacgatatgcctccgcggccgccgtcaccgcctcctccttctccccacctcactctcccttgctaccgccgctacccccggcctccgcctacgtccaccttcccttctgccgcaagcgctgccactactgcgacttccccatcatcgccctcggctcatcgtcagccccctcccgtggcgaggccgcggaagaccccaggatcgttgactacgtgaacctcttgctccgcgaggtctccgccacgcgcccggtttccgacgatggcgtgccgctcgagaccgtcttcttcggtgggggcacgccgtcgctcgtcccgccgcgcctggtcgccacggtcctcgacgcgctgcgcgccaggttcggcctgtcggcgcgccccgaggtctccatcgagatggaccccggcacgttcgatgccgccaggctcaaggagctcgtgggcgtgggcgtcaaccgcgtctcgctcggcgtgcaggcgttccaggaggacctgctgcgggcgtgcggacgcgcgcacggcgtgaaggaggtgcacgaggccgtcgcgatcgtgacggcgtgcgaggggctgcagaactggagcatggacctcatctcctcgctgccgaatcaaaccgaggagatgtgggaggaaagcttgaggtgcacggtggatgcaaggcccactcacgtttctgtgtatgatctgcaaattgagcagggcaccaagtttgggcagatgtatactcctggtgtctttcctctgccgagtgacaccgaatctgcaaacttctacaggattgcttcgaagcgactttctgaagcaggttataaccactatgagatcagtagctactgcaagcctggatacgagtgcaagcacaacctaacatactggcaaaaccgacccttctatgcctttggtcttggatctgcgagctacattaacggtgtgaggtactccaggcccagaagaacaaaggagtatgcagaatgggttcagaagttagaggatggaacgtggagacatgagtctagaagctctgatctgaaggacatggcactggatgtggttatgctatcgctgagaacagcttgggggcttgatttgcaaagtttcagtaaatcctttgggaaaagcctggcgctatcactgtgtaacacatttaagccttttgtggagagtgggcatgtaattgcaatggatatggatcgacaagccttgccacatactgattttgagttggacctgcaaaatgaagatggttttggaagcagaattgcattcatccgtctcagcgacccagatggatttttgttgtccaacgagttgatttcacttgcttttgggattatctcaccttgatctaacattaatatagatgcatttccatttggttgatttgatgaggccgaaccgaggaacagttggacagggaaaacactcggattagtaatcttagaacatcttagcaattcatcacttgaaccataatattataccaaatatcagcacaccacactcaaatataacatgaagatgtgcgaggctcaaaagcctggatatggatgtactatagtagaactttta

SEQ ID NO: 6255 - DNA, 933 bp, Zea Mays
atggggcaaagcctgtccgtcctctcctcctcctcctcccagagagacgcatgcgcatgcgctgcagacggacgggtccggcggcaacgacgacagcagagaggacatgcacggcgagacgcagacgcacgcagagatggggtgggcttgcagcctgccactgccagagagacagcagctcaggccagaaggttgcagttgcacggcaccgcgcaacggaaccccacagcaccaatgctcaactacagcacacacgatactgtgcctgtgcgtggtctatatagaaccgtacacgcacacacggatgcatggctgtctccaaggacaagggagaaaacgctacagcctacagctagcctactgcatgcttcagccttcagtctcgagctagagtcttcactcttcacccttccctactggatggaaagtactggtcctgccactgccagccaagtaaacaacagtcaagttacagtaggagtctccggctcctatcctcccccctgcgctgctctggacctgcctgccgctgcttgcttggtcccctagctcgctgccgctgctctacctctctacgtacgcatgacctcctctggtggcccgcccgcccggccagccagccatcatcgtcctctcctctcctccgcgcccgcgttcgtcgtgtacatgcatcgtcgtgcctgcccgcctccaccatggtcctgacttgccgtcccccgtcctccccggctgcccgtcgtcgtcgtcgtcgtcagcagcatgcgcccgcggcgtaggcgaagatctggtgcaccaccgtcgccacctcgtccgccgtcgccacctcgcatccttcctccatctgcacgcacgtacacgggacatgtgtaccatttagctttgtagccaccactgtactgtataaggttagggacggacgaggacgggcgtcgc

SEQ ID NO: 6256 - DNA, 2384 bp, Zea Mays
cgacaccacgcttgctaacttggaggaccgtgagcgcgtactgcagtgcggtccgggagctggggttcaggctgtacgtcgccatctccgagggcctgggcctggacggagcgtacatcaaggaggcgctgggcgagcaggagcagcacatggcggtgaacttctacccgaggtgcccggcgccggagctcacgtacgggctgcccgcgcacacggaccccaacgcgctcaccatcctgctcatggaccagcaggtggccggcctgcaggtgctcaaggacggccgctggatcgccgtgaacccgcggcccggcgcgctcgtcgtcaacatcggggaccagctgcaggtgacgtgctcttgtctcgctctcccattattcccaccctctcacctcctctctgcccctggcctccactactgcactgcacctgcacaggcgctgagcaacggcaggtacaggagcgtgtggcaccgcgccgtcgtcaacgccgacaggccgaggatgtcggtggcgtcgttcctctgcccctgcaacgacgcgcgcatcggccccgccgccaggctcctcaccgacggcacgcccgccgtctacagggactacacctacgccgagtactacgccaagttctggagcaggaacctggaccaggagcactgcctcgagctcttcaggaccccgacctcctaggagtattttggatgcttctctttcattttagcttttcggtactagtttgtttgttactagaatggaacttgccgactgcatcagaaactgtctgtctgtacccctcatcagctccccctccaaataatctctctgcccatgtgggcttgtttcaatactttttgtcagtacagcccatatattactttttttttgtcacatacggtgtggaaacacaaaacaggccgattccttccataaatgggcctgctcctgtccagcccgccccccgtgatgggccaaattcgcggtggctgctgagaacaggaacaggccccgcgccggcgccgcccgtccagtttccaaactcgcgcatccggtcggctggcgcgtcgtgtggaccagaaagggagcgaaatcctactcgtcgcacggggtccgcaagcttttcgtcgcctcgattcgcttccgccccatcctccttcccgacgcctcacatggcaacggccgtgcccgccgcctgcctccgcgcgccgtgctcctctccagcggccgtcgcacgccgacttggggccggtggcccgtcgctgcgcaagcggcattgcgccgtcgcgcccgtcgctgccgcctgcggccccgcgccgccgcggctgcttgacaacgaggaggcggtctgctccgtacggcggcgtgtgctggttgccggtgccgccgcgttcctctcccggcctaatccggcggcatcagaggctaagaaagggttcctgcccgtcgtcgacaagaaggctggctactctttcctctacccgttcggatgggaggaagtggctgtgcaagggcaagacaaggtgtacaaagatgtgatagagcctctcgagagtgtgagcgtcaactctattccaactagcaaggaggatatccgtgatcttggtcctccggataaggttgccgaggctctgattaaaaaggttttggcaccatcaacacagaagacaaagttaattgaggcgaaagagaatgatgttgatgggagggcttactacacttttgagttcacagctcaggctccaaactacaccagacatgcacttggtgctattgtaattgcaaatggcaaattttacacattgaccactggagcaaacgagaggaggtgggaaaagatgaaggataggctgcatactgttgtggattccttcaaaatcgaaaatagaatatgagtgcctgaattgctgtgttgtttttccttcgttgattcgctttttcttacataactgcagtgctgagatttttcagtagtaaataccgggattgtggattatgctgatcagtttcatttcgaaatgtttgttaccagacttgagcaacatttgtttgtactttatgtgtataataataatatcttgtttggatgtagatattggagcataaaattgggaattagaatcaatgttgttaggtacgtgcaaatgagatttgaaatcagacgtccaattctttggaattggactataacttaaaactccatctcccaagacaaagcatcaccacttggtattgtgtggaattagaccacacaattctaaactccaaatcagtgatatccaaacaatagaattggaattacatcttattttaatatcatgtctgatttagtattcaacctaatttaatttgttcctcttcaatatcgacatccagagcataaaacttttt

SEQ ID NO: 6257 - DNA, 2959 bp, Zea Mays
ctcgaggcctcgcccggccccacgggtcagctcgatcggatgccaggccgctgcctctacttcgctgctccctgctcgtcgtcggtcgatcatgttgcgtctgcgtgtctatttatttggatttggacatatgggcagagcatggagcagcacgcggcctagctaggtgagagtgagacagagcagacgcggcgccgggagctggaagtgatctagagctagagcggcggcggcgggcatggcagagcatctcatctctacggctgaccacgacaggctgccggacagctacgtccggccggagacgcagcggccgcgcctgcgcgaggtcgtccccgacgcggagatccccgtggtggacctcgccgaccccgaccgcgaagccgtcgtcgccagggtcgccgaggcgtgccgcacccacggcttcttccagttgctcaaccacggggtgccggagcagctgacggcggcgatgatgtcggtggcgtacgaattcttccggctccccgcggaggagaaggccaagctgtactccgacgacccggccaagaagatgcggctgtccaccagcttcaacgtgcgcaaggagacggtgcacaactggcgggactacctccgcctgcactgccacccgctggagcagtacgtccccgactggccggacaacccaccatccttcaggaggaccgtgagcgcgtactgcagtgcggtccgggagctggggttcaggctgtacgtcgccatctccgagggcctgggcctggacggagcgtacatcaaggaggcgctgggcgagcaggagcagcacatggcggtgaacttctacccgaggtgcccggcgccggagctcacgtacgggctgcccgcgcacacggaccccaacgcgctcaccatcctgctcatggaccagcaggtggccggcctgcaggtgctcaaggacggccgctggatcgccgtgaacccgcggcccggcgcgctcgtcgtcaacatcggggaccagctgcaggcgctgagcaacggcaggtacaggagcgtgtggcaccgcgccgtcgtcaacgccgacaggccgaggatgtcggtggcgtcgttcctctgcccctgcaacgacgcgcgcatcggccccgccgccaggctcctcaccgacggcacgcccgccgtctacagggactacacctacgccgagtactacgccaagttctggagcaggaacctggaccaggagcactgcctcgagctcttcaggaccccgacctcctaggagtattttggatgcttctctttcattttagcttttcggtactagtttgtttgttactagaatggaacttgccgactgcatcagaaactgtctgtctgtacccctcatcagctccccctccaaataatctctctgcccatgtgggcttgtttcaatactttttgtcagtacagcccatatattactttttttttgtcacatacggtgtggaaacacaaaacaggccgattccttccataaatgggcctgctcctgtccagcccgccccccgtgatgggccaaattcgcggtggctgctgagaacaggaacaggccccgcgccggcgccgcccgtccagtttccaaactcgcgcatccggtcggctggcgcgtcgtgtggaccagaaagggagcgaaatcctactcgtcgcacggggtccgcaagcttttcgtcgcctcgattcgcttccgccccatcctccttcccgacgcctcacatggcaacggccgtgcccgccgcctgcctccgcgcgccgtgctcctctccagcggccgtcgcacgccgacttggggccggtggcccgtcgctgcgcaagcggcattgcgccgtcgcgcccgtcgctgccgcctgcggccccgcgccgccgcggctgcttgacaacgaggaggcggtctgctccgtacggcggcgtgtgctggttgccggtgccgccgcgttcctctcccggcctaatccggcggcattcgcagcagaggctaagaaagggttcctgcccgtcgtcgacaagaaggctggctactctttcctctacccgttcggatgggaggaagtggctgtgcaagggcaagacaaggtgtacaaagatgtgatagagcctctcgagagtgtgagcgtcaactctattccaactagcaaggaggatatccgtgatcttggtcctccggataaggttgccgaggctctgattaaaaaggttttggcaccatcaacacagaagacaaagttaattgaggcgaaagagaatgatgttgatgggagggcttactacacttttgagttcacagctcaggctccaaactacaccagacatgcacttggtgctattgtaattgcaaatggcaaattttacacattgaccactggagcaaacgagaggaggtgggaaaagatgaaggataggctgcatactgttgtggattccttcaaaatcgaaaatagaatatgagtgcctgaattgctgtgttgtttttccttcgttgattcgctttttcttacataactgcagtgctgagatttttcagtagtaaataccgggattgtggattatgctgatcagtttcatttcgaaatgtttgttaccagacttgagcaacatttgtttgtactttatgtgtataataataatatcttgtttggatgtagatattggagcataaaattgggaattagaatcaatgttgttaggtacgtgcaaatgagatttgaaatcagacgtccaattctttggaattggactataacttaaaactccatctcccaagacaaagcatcaccacttggtattgtgtggaattagaccacacaattctaaactccaaatcagtgatatccaaacaatagaattggaattacatcttattttaatatcatgtctgatttagtattcaacctaatttaatttgttcctcttcaatatcgacatccagagcataaaacttttt

SEQ ID NO: 6258 - DNA, 2953 bp, Zea Mays
ctcgaggcctcgcccggccccacgggtcagctcgatcggatgccaggccgctgcctctacttcgctgctccctgctcgtcgtcggtcgatcatgttgcgtctgcgtgtctatttatttggatttggacatatgggcagagcatggagcagcacgcggcctagctaggtgagagtgagacagagcagacgcggcgccgggagctggaagtgatctagagctagagcggcggcggcgggcatggcagagcatctcatctctacggctgaccacgacaggctgccggacagctacgtccggccggagacgcagcggccgcgcctgcgcgaggtcgtccccgacgcggagatccccgtggtggacctcgccgaccccgaccgcgaagccgtcgtcgccagggtcgccgaggcgtgccgcacccacggcttcttccagttgctcaaccacggggtgccggagcagctgacggcggcgatgatgtcggtggcgtacgaattcttccggctccccgcggaggagaaggccaagctgtactccgacgacccggccaagaagatgcggctgtccaccagcttcaacgtgcgcaaggagacggtgcacaactggcgggactacctccgcctgcactgccacccgctggagcagtacgtccccgactggccggacaacccaccatccttcaggaggaccgtgagcgcgtactgcagtgcggtccgggagctggggttcaggctgtacgtcgccatctccgagggcctgggcctggacggagcgtacatcaaggaggcgctgggcgagcaggagcagcacatggcggtgaacttctacccgaggtgcccggcgccggagctcacgtacgggctgcccgcgcacacggaccccaacgcgctcaccatcctgctcatggaccagcaggtggccggcctgcaggtgctcaaggacggccgctggatcgccgtgaacccgcggcccggcgcgctcgtcgtcaacatcggggaccagctgcaggcgctgagcaacggcaggtacaggagcgtgtggcaccgcgccgtcgtcaacgccgacaggccgaggatgtcggtggcgtcgttcctctgcccctgcaacgacgcgcgcatcggccccgccgccaggctcctcaccgacggcacgcccgccgtctacagggactacacctacgccgagtactacgccaagttctggagcaggaacctggaccaggagcactgcctcgagctcttcaggaccccgacctcctaggagtattttggatgcttctctttcattttagcttttcggtactagtttgtttgttactagaatggaacttgccgactgcatcagaaactgtctgtctgtacccctcatcagctccccctccaaataatctctctgcccatgtgggcttgtttcaatactttttgtcagtacagcccatatattactttttttttgtcacatacggtgtggaaacacaaaacaggccgattccttccataaatgggcctgctcctgtccagcccgccccccgtgatgggccaaattcgcggtggctgctgagaacaggaacaggccccgcgccggcgccgcccgtccagtttccaaactcgcgcatccggtcggctggcgcgtcgtgtggaccagaaagggagcgaaatcctactcgtcgcacggggtccgcaagcttttcgtcgcctcgattcgcttccgccccatcctccttcccgacgcctcacatggcaacggccgtgcccgccgcctgcctccgcgcgccgtgctcctctccagcggccgtcgcacgccgacttggggccggtggcccgtcgctgcgcaagcggcattgcgccgtcgcgcccgtcgctgccgcctgcggccccgcgccgccgcggctgcttgacaacgaggaggcggtctgctccgtacggcggcgtgtgctggttgccggtgccgccgcgttcctctcccggcctaatccggcggcatcagaggctaagaaagggttcctgcccgtcgtcgacaagaaggctggctactctttcctctacccgttcggatgggaggaagtggctgtgcaagggcaagacaaggtgtacaaagatgtgatagagcctctcgagagtgtgagcgtcaactctattccaactagcaaggaggatatccgtgatcttggtcctccggataaggttgccgaggctctgattaaaaaggttttggcaccatcaacacagaagacaaagttaattgaggcgaaagagaatgatgttgatgggagggcttactacacttttgagttcacagctcaggctccaaactacaccagacatgcacttggtgctattgtaattgcaaatggcaaattttacacattgaccactggagcaaacgagaggaggtgggaaaagatgaaggataggctgcatactgttgtggattccttcaaaatcgaaaatagaatatgagtgcctgaattgctgtgttgtttttccttcgttgattcgctttttcttacataactgcagtgctgagatttttcagtagtaaataccgggattgtggattatgctgatcagtttcatttcgaaatgtttgttaccagacttgagcaacatttgtttgtactttatgtgtataataataatatcttgtttggatgtagatattggagcataaaattgggaattagaatcaatgttgttaggtacgtgcaaatgagatttgaaatcagacgtccaattctttggaattggactataacttaaaactccatctcccaagacaaagcatcaccacttggtattgtgtggaattagaccacacaattctaaactccaaatcagtgatatccaaacaatagaattggaattacatcttattttaatatcatgtctgatttagtattcaacctaatttaatttgttcctcttcaatatcgacatccagagcataaaacttttt

SEQ ID NO: 6259 - DNA, 1028 bp, Zea Mays
atggcagagcatctcatctctacggctgaccacgacaggctgccggacagctacgtccggccggagacgcagcggccgcgcctgcgcgaggtcgtccccgacgcggagatccccgtggtggacctcgccgaccccgaccgcgaagccgtcgtcgccagggtcgccgaggcgtgccgcacccacggcttcttccagttgctcaaccacggggtgccggagcagctgacggcggcgatgatgtcggtggcgtacgaattcttccggctccccgcggaggagaaggccaagctgtactccgacgacccggccaagaagatgcggctgtccaccagcttcaacgtgcgcaaggagacggtgcacaactggcgggactacctccgcctgcactgccacccgctggagcagtacgtccccgactggccggacaacccaccatccttcaggaggaccgtgagcgcgtactgcagtgcggtccgggagctggggttcaggctgtacgtcgccatctccgagggcctgggcctggacggagcgtacatcaaggaggcgctgggcgagcaggagcagcacatggcggtgaacttctacccgaggtgcccggcgccggagctcacgtacgggctgcccgcgcacacggaccccaacgcgctcaccatcctgctcatggaccagcaggtggccggcctgcaggtgctcaaggacggccgctggatcgccgtgaacccgcggcccggcgcgctcgtcgtcaacatcggggaccagctgcagctgcacaggcgctgagcaacggcaggtacaggagcgtgtggcaccgcgccgtcgtcaacgccgacaggccgaggatgtcggtggcgtcgttcctctgcccctgcaacgacgcgcgcatcggccccgccgccaggctcctcaccgacggcacgcccgccgtctacagggactacacctacgccgagtactacgccaagttctggagcaggaacctggaccaggagcactgcctcgagctcttcaggaccccgacctcctag

SEQ ID NO: 6260 - DNA, 976 bp, Zea Mays
caggcggaaaggacagttagtacattgcccagaaaacaattgaacgttatagaacgtacacaaaggataatgtcagcaacaagacagcacatcaggacattgagcaagtaaaagctgatgctgagggcctggcaaagaaactggaagcacttgaagcttacaaaagaaaacttttgggtgagaggttggaagaatgctcctttgaagaactgcacagtttggaagtgaaactcgaaaagagccttcattgcatcaggggaagaaagactcagctgctggaggagcaactccataagctgaaggagaaggagatgaatctgcgcaagagcaacgaagatttacgtgaaaagtgcaagaagcagccgccgccgccgccgcctatgctgatggctcctccgccgcctccagcgccggcagccatcgatcacacggggccgaaggatgtcgggatggacgtggagacggagctgtacataggattgcccggcagagattaccgctcaaacaacaaagacatgactgcacagtagctgtcaggtcaggtcaggtcaggctagccagcagtgcagagaataatcttagatctgtggtgcggagaactggagatgcaagccaagcccaagccaatcaacatgataaggatcatgagtgtcgcgtcgtgttttacaaacctgtccaccgtccgtcaaaggcacatgcgccagaacgtccgtcagagaacacttaccccctcatctccctctattagctagctgctccggcctgctcatgtcgaaaccttctgttcaagtatgttctcctcctgatgaattccctgcccggcatgcattggtgagcttcttctcgagaagaagtgggtggggtggggacactgtcgttcatatttggcaacacacgaggtgtcgtgtcgactgggagatgcttcggcctcgagagtcagcacggtggccgattttaatggtcaatcttctttgcg

SEQ ID NO: 6261 - DNA, 1524 bp, Zea Mays
atataccctttcgtctccgcccagcagcaacggcacccaccgaatccgcccctccctctttccgttccgcctcgttgcgctcgctctcgctgcgccgcccgccccacctcacggagctcacggcaacaccggcagggacggaaaaggaaagccgaggaggcgaggagagagagatacaaggcaggcagccaggcacaggcagcccgcggctggctacggggccaaaacccttacgcgcgacgcggccccctcctcttcttctctctcccaccaccgccctccccttgccatttttggagccgccgccatccgatccggaagagggaggaggggggagggaggaggatctgtgtcccgattcgattggagctctcgtccccggcggtccaggatggtgcggggcaagacgcagatgaagcggatagagaacccggccagtcgccaggtcaccttctccaagcgccgcaacggcctgctcaagaaggcgttcgagctctccgtcctctgcgacgccgaggtcgcgctcgtcgtcttctccccgcgcggcaagctctacgaattcgccagcggaagtgcccagaaaacaattgaacgttatagaacgtacacaaaggataatgtcagcaacaagacagcacatcaggacattgagcaagtaaaagctgatgctgagggcctggcaaagaaactggaagcacttgaagcttacaaaagaaaacttttgggtgagaggttggaagaatgctcctttgaagaactgcacagtttggaagtgaaactcgaaaagagccttcattgcatcaggggaagaaagactcagctgctggaggagcaactccataagctgaaggagaaggagatgaatctgcgcaagagcaacgaagatttacgtgaaaagtgcaagaagcagccgccgccgccgccgcctatgctgatggctcctccgccgcctccagcgccggcagccatcgatcacacggggccgaaggatgtcgggatggacgtggagacggagctgtacataggattgcccggcagagattaccgctcaaacaacaaagacatgactgcacagtagctgtcaggtcaggtcaggtcaggctagccagcagtgcagagaataatcttagatctgtggtgcggagaactggagatgcaagccaagcccaagccaatcaacatgataaggatcatgagtgtcgcgtcgtgttttacaaacctgtccaccgtccgtcaaaggcacatgcgccagaacgtccgtcagagaacacttaccccctcatctccctctattagctagctgctccggcctgctcatgtcgaaaccttctgttcaagtatgttctcctcctgatgaattccctgcccggcatgcattggtgagcttcttctcgagaagaagtgggtggggtggggacactgtcgttcatatttggcaacacacgaggtgtcgtgtcgactgggagatgcttcggcctcgagagtcagcacggtggccgattttaatggtcaatcttctttgcg

SEQ ID NO: 6262 - DNA, 1725 bp, Zea Mays
ttcagtaacaagtctgtattattcataataaaacagacaatttatttacagttacacgctaaatcagaggtctaattatttaaaattagacgtactcacactgattaaaatagtaaccgaacaaacacagattttatactaaaatagagttagaaattgtgattgaacaaatagagagttcaatacgtaaatctgcagaaaataaaataaacaaaataagaaagacgctcgtggcctattttggccgagtcagcccatgtaggcgaggtggcccatcgattacaagtcaaggtggtttagggattttaatcgccttcctttccgtctagcgccgccgccaccaggaaactgcttgcccgtcgagtacgcctgcgcacgcaggagccgtttcttccgggctaggcctcgccagggggcgccggcctgcgcctttgctagcctgcaccgaggctgggccgcccgcccgcgaggctgcggggtgctcgcgcgaggctggggctgccggggccggcacgcccactaggctgtggcttgcctgcgcgcccgcgaggctgtgtgggtggcctgcctgcgcgcccgtgtggccgcggctacccacgtcggaggcgcgcatccggctctcacctgcgctggagcgtgcctgcacgcgtcgtggctcccgtgccgaaacgctgtcatggccggggctacgcctggccggagtgctagccgagcccgcgctagtgcccgtagccaaccaaagtcacgccatccgagagcgcctccgcgtcgtgcgcctgaccggatccgccaaggactgcgcgctagtgtcgtgcccgcggccaggtcgcgttgccgcgcccgcgtcgagccaggttcggccgcgtcgggtctccgcgctcaggaggccgagcgcccctgcccgccagggcttccaagcgcctgcacgccgccagggcgcggatccagcccacgtcaagccgctcccagcgcttgcgcgctgccagggcggagcggatccgaccgtgctgaggacccacgctgggggtcgcgctcgcggccagcagcccgcggccggtcgggcatcccgctgtccttgcgcgcgctaggtcgccgaggcccacgctgccatggcctggggccgccgtggccggcgtccgcgccgctggagacgcacgcacgtggccgacgctctagtgccgaccgtccagggccgcatccgcgcgccgccaggccggggccgcgatgcgcctgcgccagagtgcgcctcgccggtgctgcacccgtgcctgcggtacgccaaggccgcctcttcccttggctctccaaagtggcgaaaagtaggttgtacgagtgtatggtgaagacgatggagatctcaccttgtcttcccctctcgaatcctacatgaacactcgatgtccagcagcagcagtgtcccgatgccgagcgtcatcaccgtagaggagaaccgccagcgcgccatcgccgctaacaccaaccgctcggtggagagagactcgtgctgataacgtgttaaagtctactcagtgataatcagattgagagagataaaatgacagaaccgttatttgtattccacagatcattacacttatatacaagtgaaggggtgtatcccaagaggtgtgtcccttggggaaaactgtcgcaccccttggattgatcacatatataatattttgtaacagcgcttacgactggcgagagcatggtgattaggag

SEQ ID NO: 6263 - DNA, 1120 bp, Zea Mays
ctaggagcagatgggtgtcatatcatgcattgcttcagtgccttgggcgtctggcctcccttcagtcttacctgcataagtttgaaccaagggtttagtaaacgtacgacacatctctttttttctctggtggtggtggtggtgacagttgaggcgtgtgtgtgcttagaatagaagaaaagaaataacggccgagttttcagttcactctcatgacagctagaatctgaacaagtctctgggattcccacgccaaaacgaactaggatgtatcaaggcgctacctcgacagtgataggccaagatgtatgcattcacagttgtgctgtcaattgaggggggcccctgttcatggggtcgctgctattttgtagatatttctagaagagggtggcctggcctggggatcttgctcctagaggacctgtcctgatcggcaagctgctacctgctactgtgacgtccaaggcgtggaaggcgtgttcaagtcaggcgagcgggctgtttcttcgtgagattcgtctgcgggtgtctaaggtgggtagttgaaaattgactccgcccgttcatggaagaggataccgtggtctgtttcgctgtgtgaagaatgtgagctcaggtctacaggcagatgggtccaggccgttctggatagaaacagcacgagcggtgttgtgctgacagctgggactgcctggcaatggcatggccggcaaaagcagattccatggcggaactcggattgtccagcgcgtttacaacgtctttttagccgaaagctagctggtggttcgatccacccccagcaatttccgagattattcagcagaatcctgccttcacctaaaagcacgaattgcaaagcgcggcccatggtgcgtgttcgtgtctgtttctgactgaattttttctccctgaggccttgttcgtttatgtcggattgtaaccggaatcgttccaactaatcaaagtttatataaattagagaagcaatccggttaggattcgttccgacccaccaatccgatagaaacgaacaagggctgagtttgaaggcaataaactgaagaagtgcagtgttgtttacactacagtgagggaagtaaagagagagagaggg

SEQ ID NO: 6264 - DNA, 871 bp, Zea Mays
gacattactgatcagcgtgttttgtcaactaatggttgttaactggtacaactacgctcctatgtatcgtgcaagtgtagccatgccataagtgctaatttgaaataaggaccaccggtcaaaccctggctgacctagtagcttgtaaattgcactcaatggcaattggactattaaaagttgcatgtctaagtataattgtaatcctacacgattattgcagccagataacatgcattgttgttgttgttgttgttgttgttaacttgctaccatacagagccagaattttctgttcatgtaataaactaacattccaattaggttaactgtggtatgaagatccctccaaataaacatgatacatgagctcgcctcagctgcgatacagagagcaaatttccatcaatgttctggcagcatatgccacgcaattcccttccctaaccaggttaaccccttccacccaaaaaaatgcatcatgtgcaccgagatatcaatgggttgtgcacgacaggctagcaatgtttatttgaggtgatccaatttgtatttaggctttgctactacatggatgaaggatgaggtattggcctattgggggtggggtgaccgggtgaggacagttgggctcctctaaggccgtctccagcagttgtcctatcggtgtaatcaacactataaatcccttattttacacgatttgctagggacagcctataatgcctttttttattgctctcaacaacaacagatgctggactgcagttcgcctcgcagaaaagaggcctaatccagcaacgtcctctatatccatcctctatatccgtcatttacagtctcctctaaaagattttatcctctatatctc

SEQ ID NO: 6265 - DNA, 2135 bp, Zea Mays
gtccagagcacacgaaggcctagcccagaaccactggattggccactgccagcggcacagccgacgccttatccagcaaccgtcttcctcatccatggcataagccgcgcccgcctccgcacgccccgctccgatggcagccgcggctgtgaccctgccctcctcgggcacgcccttcgccgtcgccacaaccgcctcttcctcatccgcccgccgctgcctgctcctgccctccgcggctccccgccgagctctccgcgtcgtggcctccgccgctaccgaggcgccgcccaagcccacgcagccgccgacatcgccctccggcatcgtgctcgtcgacccatccgaagcccagaaggtgcaccggctcaaggccgtctacgaccagaaggtcgtcccgctcatcaccgaggagttcggctacaccaatgtccaccaggttcccaagctcgagaagattgtggtgaactgcggtctgggcgcggaggcagggaactcgaaggggctggatgccgccatgaaggacctggccatgatcaccgggcagtggcccgtcaagatccgtgagggaaacaccatcggtatcgcagtcaccctccgcggcaggataatgtacaacttcctggataggctcatcaaccttgggctccctaggaccatggacttcctgggtgtcaaccccaacagcttcgacgggcacggcaactacagccttggcctccgtgaccagggcgtgttcccggagatcccgtacgaggtgggcgggaagaagaacggcatggacgtgtccatcgtcaccagcgccaagacggacaacgaggcgttcaggctgctggtcctcctcggcatgccattctcggagaacatcaagaccgacgtggtgatccggaagaagaggttgaagcgccaccacttcctgagcaagggcaaggggaagggaggacgacggtgaggagaggaaccagccagccagccagcccatggttgcacacgctctgttcagcttgttttaattccgatctttttgcagaatttggcttacaaattcgatgctgttgttgtctgtcaattatgtaacttgtgcacctatgaaaaaggtttgcaatgatcatgtccgttttgctgatttcttcttgatgcataatttgtagtcacaagttataccactgccagacattgtaatcggaggaagcagtaatgtgagacggacactgtaatgcaaacgtatttcagctgcatttctcatactgcttgtctagactatcaccgaagagcctatatgatcaatgatctcttttggcaatcggcctcaatagctacacttcggcagctcgggtgggccgatgacgagctcttcctccgggaaggcgcacggcttgccctccgcggcgagctccgggcacggcttgggcgagacgtgggaggtgacccccttgacgttggtgcagttccactgcagctccttggcgtccggcgcgaggcgggcggtcacgttggatatgcagatcccggtgtaggggtccttagggatgccctccatcctgccggccatggtcacgttctcggcgaacacgtcgctgtagttgatgccggtgacctcgggcatggcgttggggtcggacgtgttgtcggggtgctgcccgtagttgccggtcatccagaacacccacttcatggtgtggaggctgaggccgcgcacgaagatgtccctgacgaagccgcccctcccggcgccggacttgaccctgacggccgactccgtgttgatggccacgctgtcctcggcgcgcacgtcgcggatgccgccggacatctcgctgcccagcgcgatcatggcgctcgtgggggagacgcaggtcagcctccggatgacgatgtgctggctcggcatgttgaacctgatgccgtactcgtcccacccgctcttcacggccacgcagtcgtcgccggagacgatgtagcagtcctcgatcttgacacgcgaggaagaatctgcacacacgcacaggcaatgaaattcagaatcagaaacatgtgcttctcacttctcagcgtcaaaggaagctaactggtctctagctacccgggtcaattccatcggtattaggcgaattcaccggcgcgagaatggtgac

SEQ ID NO: 6266 - DNA, 1967 bp, Zea Mays
gtccagagcacacgaaggcctagcccagaaccactggattggccactgccagcggcacagccgacgccttatccagcaaccgtcttcctcatccatggcataagccgcgcccgcctccgcacgccccgctccgatggcagccgcggctgtgaccctgccctcctcgggcacgcccttcgccgtcgccacaaccgcctcttcctcatccgcccgccgctgcctgctcctgccctccgcggctccccgccgagctctccgcgtcgtggcctccgccgctaccgaggcgccgcccaagcccacgcagccgccgacatcgccctccggcatcgtgctcgtcgacccatccgaagcccagaaggtgcaccggctcaaggccgtctacgaccagaaggtcgtcccgctcatcaccgaggagttcggctacaccaatgtccaccagataatgtacaacttcctggataggctcatcaaccttgggctccctaggaccatggacttcctgggtgtcaaccccaacagcttcgacgggcacggcaactacagccttggcctccgtgaccagggcgtgttcccggagatcccgtacgaggtgggcgggaagaagaacggcatggacgtgtccatcgtcaccagcgccaagacggacaacgaggcgttcaggctgctggtcctcctcggcatgccattctcggagaacatcaagaccgacgtggtgatccggaagaagaggttgaagcgccaccacttcctgagcaagggcaaggggaagggaggacgacggtgaggagaggaaccagccagccagccagcccatggttgcacacgctctgttcagcttgttttaattccgatctttttgcagaatttggcttacaaattcgatgctgttgttgtctgtcaattatgtaacttgtgcacctatgaaaaaggtttgcaatgatcatgtccgttttgctgatttcttcttgatgcataatttgtagtcacaagttataccactgccagacattgtaatcggaggaagcagtaatgtgagacggacactgtaatgcaaacgtatttcagctgcatttctcatactgcttgtctagactatcaccgaagagcctatatgatcaatgatctcttttggcaatcggcctcaatagctacacttcggcagctcgggtgggccgatgacgagctcttcctccgggaaggcgcacggcttgccctccgcggcgagctccgggcacggcttgggcgagacgtgggaggtgacccccttgacgttggtgcagttccactgcagctccttggcgtccggcgcgaggcgggcggtcacgttggatatgcagatcccggtgtaggggtccttagggatgccctccatcctgccggccatggtcacgttctcggcgaacacgtcgctgtagttgatgccggtgacctcgggcatggcgttggggtcggacgtgttgtcggggtgctgcccgtagttgccggtcatccagaacacccacttcatggtgtggaggctgaggccgcgcacgaagatgtccctgacgaagccgcccctcccggcgccggacttgaccctgacggccgactccgtgttgatggccacgctgtcctcggcgcgcacgtcgcggatgccgccggacatctcgctgcccagcgcgatcatggcgctcgtgggggagacgcaggtcagcctccggatgacgatgtgctggctcggcatgttgaacctgatgccgtactcgtcccacccgctcttcacggccacgcagtcgtcgccggagacgatgtagcagtcctcgatcttgacacgcgaggaagaatctgcacacacgcacaggcaatgaaattcagaatcagaaacatgtgcttctcacttctcagcgtcaaaggaagctaactggtctctagctacccgggtcaattccatcggtattaggcgaattcaccggcgcgagaatggtgac

SEQ ID NO: 6267 - DNA, 1463 bp, Zea Mays
cgtacagcaatggcagtatacaatatccgcgtggactggccgtcttcccccccctccccctcccccccacccaccccccaccccagtataataaaaggcagagccgcgttcccgttcccgctcccgcccctgccgccgcacgttgtcccgcggatctccacgctcgcaagttgactcccaccactgccaccgtccaccgacgacgactccagcccacttgttcgtcccctcgtccaagccccccctcccgttgcaccgaggccacaccacacacacgtacacccgttggccatggccgtcgcgaggctggtggccgccccattccctctcgccacgtgccgcttgcggaggccacgcccagccttgccccccgcgcatgcggggccggggccgcggccgcaggtcctggtgctcgcgcctcccgctgccacggcggcccggcgcgccgtgcccgtgcgcgcggcgccggaggacgaggccgtggtcgccggcgacggcggcggaggggacgcggaggccgtggcggcgcgcgcggcgcggaagcagtcggagcggcggacttacctggtggcggcggtcatgtccagcctcgggatcacgtccatggccgccgccgccgtctactaccgcttcgcctggcaaatggaggggggcggcgagatcccggtgacggagatggtcggcaccttcgcgctctcggtgggcgccgcggtggggatggagttctgggcgcggtgggcgcaccgggcgctgtggcacgcgtcgctgtggcacatgcaccagtcccaccaccggccccgcgacgggcccttcgagctcaacgacgtcttcgccatcgtcaacgccgtcccggccatgtccctcctcgcctacggcttcttcaaccggggcctcgtgccgggcctctgcttcggcgcggagctgaaggaggtgggaggaactgaggagctggagaaggagatcaagaagaggatcaggaggagggaggccctagacgccatccaataagacctgattagctatacagtgcttactgctttggctatagaattccactgttttttttgaccttctcctcacattagatcttctagcgtttcgatgtatatacgagtggtagcgtgtgcatgtgtcttctttcctgttaatagagtagaagcgcagatcgaggaataatttcgagttgggcaaacaggtagccgcagctagctcttgcatgaagcgttacgtgtcgtgggcgatgcttgctaccagacagagacactgccgatatgaccgatgctcgtagctagtcgccgttggtacaggacatgtggggagggctctgcctgagctgacatgacaactgaagcgtgaaggcagaggcagacacggttgcccggttgggcggcttccggatcaggttccggcggttggctcgtttaaccgaaccggccggtgtgcatgtgacgaggagggatcct

SEQ ID NO: 6268 - DNA, 2504 bp, Zea Mays
gcaaaaggcaaagcaaaagcccccgacccccgtctggcgccgggagtcccactttgtgccacactttgtctaaggttagtcgttcgaattgaagaactaaccttaggcagaaaagttaggcaaagtgtggcaagttaggcatcaaaccaaacagaccccaaaacccacgccacgccacgccacagccccgccctcgccgccgtttcccgaatcccccaagggcaagcggagccatccaggatggcccattcgccggcgcccagcggcggcggcggcggggggccgctgccgctactggtgtcgctcaactgcctcgacgacctctcgctggagcaggaggggctggcgggcgtggccgcggtggagcacgtgccgctctccgccgtcgcctgcggccgcatcgaggccgcctccgcggtgctgctcccctccctcgccttcctcccgcgcgccgcgcagcgccggctgcggccctggcagctgctgctctgtctcggctccgcggaccgcgcggccgacgcggcggcggccgccgacctgggcctccgcctcgtccacgtcgacgccaaccgcgccgaggaggtcgccgacaccgtcatggcgctcatcctcggcctgctccgccggacccacctcctctcgtgccacgcctcgtcggtcccggccgccggctggctcggctccgtccagcccatgtgccgcggcatgcggcgctgccgcggtctcgtgctcggtatcattggccggtccgcggccgcccgctgcctcgccactcgtagtctcgcgtttcggatgagcgtgctctacttcgatccgcgctacgtgggactgttgtataggctaagtaattttagtactacaattactactaagggggtgtttggaaacacagtttttcaaaaccacggtatttcaaataccacagtatacaaatgccatgacatgatctcagttttcaataccacagttttagaataccacggttttgaatacatggaggtgtttgggaacaaagcaagtgggaaaacaaagcggccttctattgttttcccttctgcagcaaggagaatggacactctcaatgatttattagcagcgagtgaccttatttcgctgcattgcggattaacaaatgaaaccatgcatatacttaatgctgactgcctgcagcacataaaacctggagctttcatagtcaatactggtagttgccagcttatagatgactgtgctctcaaacagctcttgattgatggtaccatagctggttgcgcattggatggtgctgaaggtccacagtggatggaagcatgggtgcgggagatgccaaatgttttaattcttccgcggagtgcagactacagcgaagaagtgtggatggaaataagagagaaagcaataactatgttacagtcctttttcttcgatggtgttcttccaagtagtgcaatttctgatgaagatgaggaaataagtgaagctaaaaatgaagatgactatctaggcccacaggcaaaggatagccagtcacagatttttgatactgaaatagatgaaagccacataacgctggagtctgaaaagaaaagagccatatcccaccataaagagcctcaggcgtctggaaagtctgtaaacattggctcccgatctgaagggaggcgtagtcgttctggaaagaaagggaaaaagaggcctgcccatcgcagacctcaacagaaaccagatgacttatctgctgttgagagtgacagtaactattcctcccggagagatgatgacactgcaatgagtagcagggaccaggttgtaagttccagttcacgatttgcctctcctgaggacccaaaatacaagcataaatctctttctgaatccccgatggaaataacatccgagaagaaggtgcctgtactactcagtagaaagtaccctgataaactaaaagatggatttattgtagctttgagagcaagagataattcagggtaccatgttgcaagacagagagtagttggtggtggtggctggattcttgatgttgtctcaaatgctacaaacagggaccccgctgctcagttccttgttactttcaaaaacaaggatactatggggctccgatcctttgttgctggcggtaagctactacagattaataggaagatggagtttgtgtttgcaagccattcttttgatgtttgggagagctggatgctggacggttccttgctggaggttatggtggttgaggtcgtgctcgctggcggtggtggatcaatgctagtccgcttggaggtcaaggtctcgacatgctcgaggggatggcctcacctggaggaggctagaggagtcatcatcggagccgagcgcgggaagcacgggaaaaggagcaccgtcaccgactcaccgtccgaagacgtgcggtcgcatgagatgagaaagatttcactgtttcacggatggaaagagatcggagactaaaaagaagggaaaaaaaaaagaac

SEQ ID NO: 6269 - DNA, 1885 bp, Zea Mays
aggctgatcgttttttccttgagaaatgatcctctgaccctcatcccccagacggccagaccccagtgcactctatcccctcagctatggcgacaaccgtcacgcccgcctccccgttccgcgactacctccaccgccgccgcgtccgcctccacgccaagccgcacccgcattcccagcgccgcctatcacgcaccgcgcggctacgctatgctccggacggtggcggcgctgaggtctcgggccctcccgcttccgcggccgtcgaggagcaaacgccgcaggaacggccggaggacttcatgctcctggctgccaaccgcagcgaattcaacgagatcatcatggtcatcgactcgcccgtcgcgcggtacctcgtcctcgaccacaacaagaatatccacagcattctccccaaaacaaccgtttggaccaactcgtactgggatgagtttgtgagcctgccagctattgttccacggggccctgttgcactactaggtttggtaaatcacctaatgaggataatcacaaccttttttctgtcggtcagagttcatatttttttccagcaaagctactgtgcattaggcaaaattactagcatgctcacggggaatggggggaagggatgctttctgtcttcttctaaggatggtttaccatgtttttttgggggacatatgttttaccatttataaccagactttacatgagtagactacattctttatgctcaataagcgatttctttagggaaaaacaatacttacatatttttcacacactgctcttcactcctgtgaataatctgtgcctaatcactctttcatttccctgtttctttcagggtgctgggacatcagcacatctgatgctaaagttttggccttggttacaacttattggctgggagatcgaccctatggtgacaactcttttcattagtcacttttgttctgtttaaagtttttgatattttttaccgatttcaaccatgtgaacattatattatggactcgtcagttgtcacaaaaacattagtaatttatccttggttatgctcacattatcttgcagccttatctattgtgcttcacgcacatgctttccatgtacccaatcttcatattgcaaaaagctgattgtgtgccatgacagataattgaattgtcaagggattattttggtatgtctgatttagagaaggccacagaatcaggtggttcacttttggtgcgcattggtgacgcactttctccatcagcaacagtcgaaggaggatttgctggaattgttgtagatttgttttgtgatggaaaggtcatacctcagctacaagaagccaaaacttggttgcaaattgcaaaaaggctaatgccagacggtcgaatcatggtaaattgtggtggatcagacactgaagaatctctctcatcgccttgggttcaaaaccctacagttaaagcactttgttccgcatttcctggacaggtaagctggaagagactatcggagaaagagagtgtaaactatgttgccctgactggacctctcccagacctggacgggtggtcggcgtcggttcctagtgagctaagcacgaatagggccggccctaagcctatgctagagaggcgacggccgggggcctaaaattcttaggggcccaatatttagtatatataacactatataatatatcaatttacactttacaaaacccatctaaccaaataactcacacacttataatatttacgaaatccatcaaacaaattgcaaccatatttaacataacatcaaaattaacggtttagattattgaataacatcatctattttgttcactcaaattacaaccatatttaacataacattattt

SEQ ID NO: 6270 - DNA, 2208 bp, Zea Mays
aggctgatcgttttttccttgagaaatgatcctctgaccctcatcccccagacggccagaccccagtgcactctatcccctcagctatggcgacaaccgtcacgcccgcctccccgttccgcgactacctccaccgccgccgcgtccgcctccacgccaagccgcacccgcattcccagcgccgcctatcacgcaccgcgcggctacgctatgctccggacggtggcggcgctgaggtctcgggccctcccgcttccgcggccgtcgaggagcaaacgccgcaggaacggccggaggacttcatgctcctggctgccaaccgcagcgaattcaacgagatcatcatggtcatcgactcgcccgtcgcgcggtacctcgtcctcgaccacaacaagaatatccacagcattctccccaaaacaaccgtttggaccaactcgtactgggtacgcacacttgacactaaaccgacacctacaaattttaagacggcagacttggacaaccattcactaatataacacgggaagaactagcacaaaatctgagtggcggcctgttactgatgaacctctatagctacgtgaaagaatatatattttctttagagccccagaatttgagtgggggcacgtgcgcccgctccttgtgtactcggtccgcccttgtaattttatacattactcaccaaactttccgaggcccttataggaaacagtagtttgatacttgttaatgtgtttatctttagccgttcggcattgagcacttgatcagagtaataataatatgttgattctcctgttttgtagtgtcatcaatcatatataaactaagacttgtgaggattttcttggttcatgtaaaaactagtgaggggtttctcagtgaacaaactatatgtttcattgactctttggcttgcagtccttttcttttcttggaaccgttgttgaacgctgatgcttaattataacctgctcttgcctttgcttaacgcaggatgagtttgtgagcctgccagctattgttccacggggccctgttgcactactaggtttggtaaatcacctaatgaggataatcacaaccttttttctgtcggtcagagttcatatttttttccagcaaagctactgtgcattaggcaaaattactagcatgctcacggggaatggggggaagggatgctttctgtcttcttctaaggatggtttaccatgtttttttgggggacatatgttttaccatttataaccagactttacatgagtagactacattctttatgctcaataagcgatttctttagggaaaaacaatacttacatatttttcacacactgctcttcactcctgtgaataatctgtgcctaatcactctttcatttccctgtttctttcagggtgctgggacatcagcacatctgatgctaaagttttggccttggttacaacttattggctgggagatcgaccctatgataattgaattgtcaagggattattttggtatgtctgatttagagaaggccacagaatcaggtggttcacttttggtgcgcattggtgacgcactttctccatcagcaacagtcgaaggaggatttgctggaattgttgtagatttgttttgtgatggaaaggtcatacctcagctacaagaagccaaaacttggttgcaaattgcaaaaaggctaatgccagacggtcgaatcatggtaaattgtggtggatcagacactgaagaatctctctcatcgccttgggttcaaaaccctacagttaaagcactttgttccgcatttcctggacaggtaagctggaagagactatcggagaaagagagtgtaaactatgttgccctgactggacctctcccagacctggacgggtggtcggcgtcggttcctagtgagctaagcacgaatagggccggccctaagcctatgctagagaggcgacggccgggggcctaaaattcttaggggcccaatatttagtatatataacactatataatatatcaatttacactttacaaaacccatctaaccaaataactcacacacttataatatttacgaaatccatcaaacaaattgcaaccatatttaacataacatcaaaattaacggtttagattattgaataacatcatctattttgttcactcaaattacaaccatatttaacataacattattt

SEQ ID NO: 6271 - DNA, 1652 bp, Zea Mays
aggctgatcgttttttccttgagaaatgatcctctgaccctcatcccccagacggccagaccccagtgcactctatcccctcagctatggcgacaaccgtcacgcccgcctccccgttccgcgactacctccaccgccgccgcgtccgcctccacgccaagccgcacccgcattcccagcgccgcctatcacgcaccgcgcggctacgctatgctccggacggtggcggcgctgaggtctcgggccctcccgcttccgcggccgtcgaggagcaaacgccgcaggaacggccggaggacttcatgctcctggctgccaaccgcagcgaattcaacgagatcatcatggtcatcgactcgcccgtcgcgcggtacctcgtcctcgaccacaacaagaatatccacagcattctccccaaaacaaccgtttggaccaactcgtactgggatgagtttgtgagcctgccagctattgttccacggggccctgttgcactactaggtttggtaaatcacctaatgaggataatcacaaccttttttctgtcggtcagagttcatatttttttccagcaaagctactgtgcattaggcaaaattactagcatgctcacggggaatggggggaagggatgctttctgtcttcttctaaggatggtttaccatgtttttttgggggacatatgttttaccatttataaccagactttacatgagtagactacattctttatgctcaataagcgatttctttagggaaaaacaatacttacatatttttcacacactgctcttcactcctgtgaataatctgtgcctaatcactctttcatttccctgtttctttcagggtgctgggacatcagcacatctgatgctaaagttttggccttggttacaacttattggctgggagatcgaccctatgataattgaattgtcaagggattattttggtatgtctgatttagagaaggccacagaatcaggtggttcacttttggtgcgcattggtgacgcactttctccatcagcaacagtcgaaggaggatttgctggaattgttgtagatttgttttgtgatggaaaggtcatacctcagctacaagaagccaaaacttggttgcaaattgcaaaaaggctaatgccagacggtcgaatcatggtaaattgtggtggatcagacactgaagaatctctctcatcgccttgggttcaaaaccctacagttaaagcactttgttccgcatttcctggacaggtaagctggaagagactatcggagaaagagagtgtaaactatgttgccctgactggacctctcccagacctggacgggtggtcggcgtcggttcctagtgagctaagcacgaatagggccggccctaagcctatgctagagaggcgacggccgggggcctaaaattcttaggggcccaatatttagtatatataacactatataatatatcaatttacactttacaaaacccatctaaccaaataactcacacacttataatatttacgaaatccatcaaacaaattgcaaccatatttaacataacatcaaaattaacggtttagattattgaataacatcatctattttgttcactcaaattacaaccatatttaacataacattattt

SEQ ID NO: 6272 - DNA, 1652 bp, Zea Mays
cacaaaggctcttttgaggatgaattatttgcaggtctacaaagcatccacgacacgactcagtagccgtctaatctcatcgtctatctcacgatgtatttggaagcatttttaaagtgtctttttggatgtctatctgctgaccgcgctgaactcaatcatccaatatcaaggagacaaaaaacgtgggagcagttgtttaatggctacgattgggcacgcgacgacgcgagccaggtcggtggttttggtatggctccgatgagcaagcatatcgacacaccacgagctccacctcaccctcaacagctcaactagtagggcaggcaggcaggcaggcattagtccgtccgtctgtgtgtgtgagagagagagagtcagtcagatagagtgtcaaagcggcaaccgcgatagttggttggtgcgtggtgctggctgcgcctacctcctgttgccgccgccgccgccggtgcccagtgcccgacgggcgacggcgcactatttgcacagaggatggcgttggcgacggcgtgagctccaccacacctccacgcgcgcagtggcgagatggtcgtgcatgcactcgtgcgcgtcggccagcgtcgcctctctggtgcgccgtgcgcgcaccgagtcagagatagagagctagcagactggtactggtagagctaccgtcaccccggccgcccaccatactgtcctctccgtgcaggcgtgcatgttaacgtggcagggcctgggctgggaggtgcagacaggagacaggcagatgggaacgtagcgcgacaagtcaactcgatcgacaatgactgatgcgcgaggcattcaccagaccaccagtcccccaccggcgacctgagctgcgagcacgcggccgagaaacggacctcgcatcactcactgtggccgtcgccgtggcattgacggacgcacaggcaccaccgtctctgcctatatattctctctgtttctacaagaagctactgaatgctgcgcggctgccctgatggctgctgctacgagtgctgtgcgtgcgaccacagcacacgctacgcatcggaaacagcagcccggcccaaagcctctttgccgtcttgcatgcagttgcgtgctagcgtcttcaagtaggatgatgaggcgtcctgtgcggtgtgtgcatccttgcctatcgatcgaggattcgtccgccaaaagggtgattggattggataggaggagaaggagatcgaatgatgtcagtggaggcaaaccagagaggattctggccccgccatgcacagaaaacctaactcccattctggggcaccaccacctgctcctcctccatgctctagactactagctagctagctcagctgtggttcatccgtgtgcgtctcgtcgcctcactaacaaccttttcggtttcggacggggaaaaacaatccgcgtgtgtgtccgaaataaaccaccagccattctctgttttccgtgtagcttctgtcactccaacgcccgctgacagcttatctgctgcaagggatgacgacgacggaaagagggctacgacgacgacgacacctgcgagagcggaaagagaccaaacctacagtgccggtcggtcggtcgctctaaggagaatgggagatggcggcctctctcgctcaccc

SEQ ID NO: 6273 - DNA, 1325 bp, Zea Mays
ccaaggtttttgttttttttccttcttccattattgtgggcggcgcgcaataatcctcgcgacaaaaaagaggctgcagggttcgtgcagcgcccacatgcgtgcttgcgtcgcccgccaacgatcacgctgcaccgcaagcatattcctcctcccttccaaggctctctcagttctgacccatcaccctctccctctctttctgtttctggctcccatccatccatccgttcgttcatctcgttgcttcttcagagcaggaaaaaaaagagagaagatgatgatgcagatcgatgcacgcactgcgacgaccaccaacaccacccaaagaccgtcacggagaatttagttacagattcattcacgaactggcagctatacggtttggacttttgactcacaaaataataaaagctacgagtagctagtttgattcgtctgtcttctcatcgtaataataacgtaacacgacgacggatgtacacatggactgatggacggggcgggccgggagacacgtacgtactcacgttcgcgcgcgcgacgcgagagacaaagcggccgggatcgattgcttcagcagatggcgcacgagtttgggttctcctccatgctcatgttgcgcacgtagtagtactgcgggggcggcgggggcggcgccgcgtacgggtggtacgccacgggcggcggcggcggggggcggtggtggtactggctcatgtagtcgttggtgatcatgtgcatgtactgcggcggcagctggtgcagcggcgggaacggcaaaatcgggggcaccgcggcggcgggcttcttctcctctgcgccgccgccgccgccgtccttcttgtcgtccttcttgccatcgccatcctccttcttgccctcgccgtcctgcttcttgccgtcgccgtcctccttcttgccctcgccgtctttcttgccgtcgccaccgccgccgccgtccttcttcccgtccccttcctccttcttgccctcgccaccgccgccgtccttcttctcgccgccgccgtccttcttctcctccttcttctcgggctccttggccggcccgacggagtcgatgtgcgccgcccacgacttgctgcgcagcttgctcaccacctgcaccgggtccaccgtcccgatcaccgtcatcttgtgcgccgccatgtccaccgacacggcgtcgatgccgacgagcacggagatggccttcagcgccttctgcttgtccttgttgtcgtgcaggtccagcttcaccacgattttcttcgacatgtctcgacgcggcgcgggtgagcgctggattcgagcagggaggtgag

SEQ ID NO: 6274 - DNA, 1941 bp, Zea Mays
ataaagccgcaggcgcgcggagcggaggtcgcgagagcaaaattcactgctccctgcccgtcgaaccagccgagcaagccaacgcaaacccagcgagccgcggcacctcgtcgcgcgcgccttgcctgtccgcttcttcgtccgatcgtccgccggtccgagccgagccccccgaagtatggcggagcccgcggcggcggggaggaagacgcgggtggggccgtacgaggtcggcaagaccatcggggagggcagcttcgccaaggtgaagcacgcccacgactcccgcacgggcgccgtccgcgctatcaaggtgctcgaccgcagccacgttctccgccacaagatggtcgagcagatcaaacgggagatttcgactttgaagctaatcaaacatcccaacgtggttcagctgcatgaggttatggcgagtaggacgaagatatacatggttcttgaatttgttgatggaggcgagttattcgataagatcgtcaattctggaaggctaggagaggatgaagctaggatatactttcatcaacttataaatgcggttgattattgtcatagccgaggagtgtaccatagagatctgaagccagagaatctacttctggactcacatggaacccttaaagtttcagactttggcctaagtgcatttgcaccacaaacaaaagaggatgggcttctgcatactgcctgtggaactccaaactatgtagcgcctgagatgtatggtcctgtggcataatcttgtttgttcttatggccggatacttacccttcgatgatgccaatctgatgagactgtacaaactgatctgccatgcaactttttcttgcccaccatggttttcttctggagcaaggaagtttattaagcgcattctcgatcctaaccctgataccaggataaaaattgcagaaattttggaagatgaatggttcaaaaaaggctataaaccaccacattttgaacaaggcgaagatgttaaccttgacgacgttgatgctgcattcaatgattcagaggaccgtcttgtagcagagaaaagagaaaagccagaatcaatgaatgcatttgctcttatttcgaggtcacagggcttcaaccttggaaatttgtttgagaaggagatgatgggaatggtaaagagggaaacatctttcacgtctcaatgtacagcacaggagatcatgtcaaaaatagaggatgcatgtgggccacttggtttcaacgtgcggaaacaaaattacaagatgaaattgaaaggtgacaaatccggaagaaaaggccacttatctgttgcaactgaggtttttgaggttgctccttcacttcacatggttgagcttcgtaaaaccggaggagacacattggaattccacaatttctacaagaatttctcatcagagctgaaagatatcgtgtggaaagctgaatctgatgcaagtatgaaacagacgaagtgacacccagggaatctgtgtaacttatgatgtcacattgtgagatagaccaccacctcgggtgataccgcttgtttggtactgtatgttttttttactggtaccacattggcaatcaatctcgtgtacagagctccttctgaatgagcgcagctgtacacgagacatgaagaggccctccctgagatgctccaaacgttgcaatggaactaaaaatttgtataaatgggtccttggcgtcctaccaatcgggcctgctgcaggggcaaccactagcggaggagcggcaggtccccttctctattgtatagagcaccgactttctgtagtttctactgttgtcacttttacaaaaacaaattttttttctaatcgaccacggtcaagcttcccatcctgtctccctcgcattcccttataatgtgtttggttggatgtacatgaagggatggaatgaggcaggca

SEQ ID NO: 6275 - DNA, 1359 bp, Zea Mays
cttcctccaggtttcctttccaccaccgctactccgctaggttcagcagcggcaccagtcggctgagcggatctccggtgaggttgagggatcagggatggcgaacggcggcggctacgtgtgggcccttgcggcgggcttcaacgccgcgctcgccgccatctccgccaaattcatcgccactctggtaccgcgccagtgcgccaccaacctacccctacctccctctatcgctcgccctccgtacacgatccgagattccttttttgctctcggcttcggagcttcgagttagtcaatgattttggatgatgagtttggggccatcgactagtttcctaaatccggaagtttgtgtaggaggatttgaccgtaggcttcactgaacacaaattggagcaccgatagaaattccgcaaatgcgtcatgacgtatttgaaaagggaattcagtcggtttttatgattggctacagtattaactttggtttgtgacgaatagctcactagtttgcactttactcagtggtcctctccatgcttatagtgaaaacgaggtacacgagaatctgtgcatcaaaatagcaggggaaagagggggtattcctcctatgggccaacaaccagcacaatatcaacttgttagtatggagttcacaattgaaacctttcttgctagagtttatcttgaacaagagatgaaaaatgtcatccattcaggaaaagggaaaacaagcatgcgcaccaatggaaacacaaagataactctttcttagtaatgtgccaatgctttcagtttactctgtcgcttactctgatcggatctaacgcagccgctcaaatatggcacggtgatacttttcaacgtgacaatgtgggggtgctacgtcaacagcctcaaagctttgtcgtccctccaggcaacagtcacaaacttcgccgccaacttcctctcgtctgggcttgcagggtatttcctgttcgaggagccgctgccttctaaggtgccagcctcatcattcttggcgtcttcatcctcagcaagtccagcatcgaggagaaacagaacacggattaggtggaaaagttttgaccgctagtgttagctgtaacatatacgtactccgcataagctgagccatgggatgttttgtccgtccatgtagccgaatcagagcatgactgtcattcggctaatacaatgtagtgtagcaaacatgttgtgcgagttgtcacgccaggacatttgacatttcccatggtgctactggtacatcgagaatcatcgctgtaattgtatgtatgtggtgaattgatttcatttattttattatatttttattcaagctgtggcaatatc

SEQ ID NO: 6276 - DNA, 3123 bp, Zea Mays
ggccgcgccacgaactccacattgcccgcgccgcgcactgccgcactccgcaggggggagggacaggacgcgccgtgcccgtgcgtgagcgtggcaccaacccctcaaccctacccgcccgcaagtaccctcacgtagtcacgttcgcttctcgctcggccgctcctcctcctcgccacgccgcgcgcccggcagcgggaggcggggcccttcgcgcgcgcgcaatggcgccggacccgtgcgccgacctcgcggtgacgcccaagacgtcggccaaggacgaggcgtcctgctccgtggccccgcccacgccgcccaaggtcacccccgacgaggtccgcgcggtggcgcgcaagttcgcggaccagcctatccaggagacggaacccgacgtctgggccgtcctcaccgccatctccaagaaggcccgcctccggccccaggggatgaacattcttttgagcgctgacgagcactacctagggcgtgctgttgaggagcggtttcgggtttttgcccagcagatcagtgggaagcattgcaagatatacaaggacaccgtctcaggggagcggaaccgccatgagcctgtgcctgttttcttcaaggacacaagctcaaatggcacattcatcaactggaaaaagttcaagaaaaatgcatccccggtcaagcttaatcatggcgacattatatcattaccatcacctcctcatgacggcaaatcctttgtatttgtctaccgggaagttaatgcaatcagttgtgtagagaatggggttcccattcttaaaaggaagtcagaggagggtagttctggaagcaagaggcttaagggtcttggtattggttctcctgatggtcctgtttcactagacgatgtccgaagactagaaaaatctaatgctggaacaacttgaggctcatgttgtgacaattgaaactttgagggctgaaataaaaacgacccaagtgcagcatggaaaggaacttgaggagttgagagaaactacgtcgagttcttatcttgatcaaactaaatctctccagtccacacttgaggagaaacagaagcaaatagattcactcagtacatcaaatacagagttacagaactctataaaagatctggatgaaaggcttggtgcatctaaacaatcacgcgcggatgctgatgagataatttcaagccagaaagcaatcatccgtgagcttgaggaacagctaagtgaggagcgcaacttaagaagagaagagcgtgataaggctgcacatgacttgaaatttgcagtgcataaagtgcaagccgaggctcaagaagaaattaagaaacaagcagagtcttaccttagacaacaaagagaacagaaagaagttattaacaagcttcaggaatcagaaaaagaaacacgtttgtttgtggaaactttgaggtccaagttggaagatgctcgagataatcttgtaacatctgagaaaaaagtaagagagctggaagctcagtttcaggacgagcagctagtatcagccaacaatcgaaagaaatcagaaaatctggaaactgaattgagaaaactgaagaaggaacttgagaatgagaaggctgctcgagaagaagcatgggcaaaggtctcagctcttgagcttgaaatagctgcaacgattagagatctatcaattgagaaacagaggtatcaaggggctagagaacggattattctacgggagactcagctgcgtgctttctattcaactacagaagaaatctcttctctgtttgcgaagcagcaggaacagctgaaagctatgcagagaactttggaggatgaggagaactatgagagcaccttaatgagtgtggatctcaataaagagcatctagccattgataatgctggtatgaagccagtaaactgctcaaaaaatacactgggagcttcaattgcttcaccagaaaatactcaggtaagtgaacatagttccagtgacgaagatgccaacatgactgagcagcaagatgatgatgttactgccaatggtggcaacactcaagatctagaatgcaccagtccagaaaggtcagtggagaggaggccgggttttcatggcaatcctgttcctacagctcctgagagggaagtaacagatactgagcaagttcctgagacagaaagcgaagctggtaatgttggttgcgatgaccaaagatgtgacaatatcggaggagagactatgccgctagaggacgaagtgctgcttccagagaacgaggagcctactgcattgctcaaagatgcagggcagccacaatcaaatatggttcctattccaattctcgatgatggcggcggccactgttcagaagaaaaacacgagggtgcttgctctgagagcaaacgggatgacacacatgttggagctatcagaacgggtgatctgttggcctcagaagttgctggcagctgggcagtggaaacagctccatctgtcaatggggagaacgaatctccaaggagcttgggagatgctacagagcgagatgaagatggaggtagcgtggcagctgatgctttgctaactttggtgaactcagagggccaggcggctgggagccagaataatgttgagcaggccagttccaaaataaccgatgatcgccgtgttcttagtgccatgattgggattgttgatcctgaattcaggaagcaaatgtccaggagtggagctggaaacgaggagccgatgtctgacgctgagacggatgaaggcgtcgaggaaggtgattcagattcaggttcagatggcagcgacagcgacagcgaggaggctatggttgaggattctgttgggtagcttaaacggaattgactgctcactgtaaatatctcaattcgttcgtgcaccattcgctgtatgagcttgtattatgcgtagtgtagcagtatttgttttttattctttaaatgtttttagcagctcgtggtgttgtacgaaatggatgccgtttggtcttcaacacaaaataaagacattcaaactataaaaggatttggctttttatatacagttgattttctatatattcagacataatatagaaaagtcaaaaataactcaagaata

SEQ ID NO: 6277 - DNA, 1980 bp, Zea Mays
gggtaatctagtgaagaaatatggaatggctgttctggagactgtagctgtcattacacatgacaagaagaagaatgattcacaacatactaattccccaaaacctttccaaataggtgacatgtttggaggccaagatgaaacctccgatgacttggaaactgtgattgataaagaggataatgtttttgtgatgtcaaatcgtaaaacaaagtatccaactcttcagctagatttacgattgattaaagatctggtaattataatcgtttcagctactggtggtggtatcatgttctcttttatggggcagccggttatcgttggctacctgcttgctggttctctagttggacctgggggtttgaactttatcaatgaaatggtgcaggtggagacttttgctcaatttggtgtagtgtttcttctttttgctcttggtctcgagttttcactgactaagttgaaagtcgttggtcctgttgctgtacttggaggtctgcttcagattgttctgttcatgttcttgtgtggcctcactgcagcgttgtgtggtgctaaatcatctgaaggagtgtttgttggtgccttcttgtctatgtcatctactgcagtggtttcgaagtttttagtggaaaaaggtagtacaaacacgcttcatggtcaagttacaattgggacgctaatacttcaggattgtgcagttggcctgctgtttgcactccttcctgttcttggaggtgctagtggcatttttggaggagtgatgtcaatggcgaaactgttgctagtgctatccgtatttgtagctgttacatatatgatgacatggtcaattgttcctcgattcttaaaactgatgattcagttatcttcacagacaaatgaactctaccaattggcctccgttgcattttgcttgcttctagcctggtgactattgtggattgagtcttgagttggggtcatttcttgctggtgttatgatatcaaccacagattttgctcatcatactatggagcaggttgaagccattcgcaatctatttgcagcactcttccttgcaagcattggaatgctcatacatgttaagttcttgtggaatcatgttgacatattacttgcagctgttatactggttataatagtaaagagtattgtcgtagctattgttgtaaaggcatttggatacagcatgaggaccgcttttgttgttgggctgtccttggctcagataggagagtttgcttttgtgcttttgagccgggcctcccatctccatcttgttggggggaaaatgtatctattattactgggaacaactgcccttagcttggtaacaactcctctcattttcaaactaattcctgtggtaatgcaccttggcatccttatgcgttggttcccctcggaaaacagtatgcagagtgaggaaaaggcggttatgcttgaagcccacaacagatcactctaacattgcctagccacaacattcttttgactgacggtgatttatttgtgcatcgactctttgcgcatgccatggaaacattggagaaacaattacacaccagtactccctttttgcggcgatatgggaacacgatgggatggacagagttaacagcttggccagccttggggctctccgtatagcattcttttttattgcgcttttgagttgtacatataggggatactgtacatgtcgtcaaggtagcatacagggggaaggcgccgatgggccttggttttgtatcattgttgccaactcgatcagtcgacagtctagaaagctagatagggatttttggtacctcgtgctcaaatgtacacttattgtcagaagacgatgggaaagttgtatgttatgtatttgttatgcccttgtgacgactaattgaccatggacacatgaatggtaacgtgttcaccgtatcgattactccctacgttctaaaatattagtcgctttaaac

SEQ ID NO: 6278 - DNA, 2540 bp, Zea Mays
gcctctcccttcccagttcccccgcctgccgccgcctcgtgctctcgtgctcgcgcgaccggatggaggatattcggacgacgactccaccgcgccaaccgacccctctcgcctctctcggtctctcctccgactcaccccgcgcccgcggcgagaaataaaagagaaatcccccgacgaccccgacgcgccacccgcaaatctcgctctccccgctgcccgcccgcccgcaccccacccctcgctcgcgcgccgcggcgcccgcgcgatccgatggcccccgccgccgcagcagcagaagcagcggggccctcgcctcgccggcgcctcgcggcggccgtcctcgcgctcgcgctcgcgctcgcctgtgtcctcgcgcaggcggccgccaggcccgacaaggagacgcgggagaagttctacgggacgctcgtcgccaacggcacacacaacgcctccggggacggcagcatcgccgagatgttcggccgcgtgctcgacaaggagttctccgacagcgacacgcccgacgctcccgacaagagtagcttcaacaacagcgtgtcagatcatcaagctgttctggagactgtagctgtcattacacatgacaagaagaagaatgattcacaacatactaattccccaaaacctttccaaataggtgacatgtttggaggccaagatgaaacctccgatgacttggaaactgtgattgataaagaggataatgtttttgtgatgtcaaatcgtaaaacaaagtatccaactcttcagctagatttacgattgattaaagatctggtaattataatcgtttcagctactggtggtggtatcatgttctcttttatggggcagccggttatcgttggctacctgcttgctggttctctagttggacctgggggtttgaactttatcaatgaaatggtgcaggtggagacttttgctcaatttggtgtagtgtttcttctttttgctcttggtctcgagttttcactgactaagttgaaagtcgttggtcctgttgctgtacttggaggtctgcttcagattgttctgttcatgttcttgtgtggcctcactgcagcgttgtgtggtgctaaatcatctgaaggagtgtttgttggtgccttcttgtctatgtcatctactgcagtggtttcgaagtttttagtggaaaaaggtagtacaaacacgcttcatggtcaagttacaattgggacgctaatacttcaggattgtgcagttggcctgctgtttgcactccttcctgttcttggaggtgctagtggcatttttggaggagtgatgtcaatggcgaaactgttgctagtgctatccgtatttgtagctgttacatatatgatgacatggtcaattgttcctcgattcttaaaactgatgattcagttatcttcacagacaaatgaactctaccaattggcctccgttgcattttgcttgcttctagcctggtgactattgtggattgagtcttgagttggggtcatttcttgctggtgttatgatatcaaccacagattttgctcatcatactatggagcaggttgaagccattcgcaatctatttgcagcactcttccttgcaagcattggaatgctcatacatgttaagttcttgtggaatcatgttgacatattacttgcagctgttatactggttataatagtaaagagtattgtcgtagctattgttgtaaaggcatttggatacagcatgaggaccgcttttgttgttgggctgtccttggctcagataggagagtttgcttttgtgcttttgagccgggcctcccatctccatcttgttggggggaaaatgtatctattattactgggaacaactgcccttagcttggtaacaactcctctcattttcaaactaattcctgtggtaatgcaccttggcatccttatgcgttggttcccctcggaaaacagtatgcagagtgagcttccattacaggaaaaggcggttatgcttgaagcccacaacagatcactctaacattgcctagccacaacattcttttgactgacggtgatttatttgtgcatcgactctttgcgcatgccatggaaacattggagaaacaattacacaccagtactccctttttgcggcgatatgggaacacgatgggatggacagagttaacagcttggccagccttggggctctccgtatagcattcttttttattgcgcttttgagttgtacatataggggatactgtacatgtcgtcaaggtagcatacagggggaaggcgccgatgggccttggttttgtatcattgttgccaactcgatcagtcgacagtctagaaagctagatagggatttttggtacctcgtgctcaaatgtacacttattgtcagaagacgatgggaaagttgtatgttatgtatttgttatgcccttgtgacgactaattgaccatggacacatgaatggtaacgtgttcaccgtatcgattactccctacgttctaaaatattagtcgctttaaac

SEQ ID NO: 6279 - DNA, 2772 bp, Zea Mays
gcctctcccttcccagttcccccgcctgccgccgcctcgtgctctcgtgctcgcgcgaccggatggaggatattcggacgacgactccaccgcgccaaccgacccctctcgcctctctcggtctctcctccgactcaccccgcgcccgcggcgagaaataaaagagaaatcccccgacgaccccgacgcgccacccgcaaatctcgctctccccgctgcccgcccgcccgcaccccacccctcgctcgcgcgccgcggcgcccgcgcgatccgatggcccccgccgccgcagcagcagaagcagcggggccctcgcctcgccggcgcctcgcggcggccgtcctcgcgctcgcgctcgcgctcgcctgtgtcctcgcgcaggcggccgccaggcccgacaaggagacgcgggagaagttctacgggacgctcgtcgccaacggcacacacaacgcctccggggacggcagcatcgccgagatgttcggccgcgtgctcgacaaggagttctccgacagcgacacgcccgacgctcccgacaagagtagcttcaacaacagcgtgtcagatcatcaagctgttctggagactgtagctgtcattacacatgacaagaagaagaatgattcacaacatactaattccccaaaacctttccaaataggtgacatgtttggaggccaagatgaaacctccgatgacttggaaactgtgattgataaagaggataatgtttttgtgatgtcaaatcgtaaaacaaagtatccaactcttcagctagatttacgattgattaaagatctggtaattataatcgtttcagctactggtggtggtatcatgttctcttttatggggcagccggttatcgttggctacctgcttgctggttctctagttggacctgggggtttgaactttatcaatgaaatggtgcaggtggagacttttgctcaatttggtgtagtgtttcttctttttgctcttggtctcgagttttcactgactaagttgaaagtcgttggtcctgttgctgtacttggaggtctgcttcagattgttctgttcatgttcttgtgtggcctcactgcagcgttgtgtggtgctaaatcatctgaaggagtgtttgttggtgccttcttgtctatgtcatctactgcagtggtttcgaagtttttagtggaaaaaggtagtacaaacacgcttcatggtcaagttacaattgggacgctaatacttcaggattgtgcagttggcctgctgtttgcactccttcctgttcttggaggtgctagtggcatttttggaggagtgatgtcaatggcgaaactgttgctagtgctatccgtatttgtagctgttacatatatgatgacatggtcaattgttcctcgattcttaaaactgatgattcagttatcttcacagacaaatgaactctaccaattggcctccgttgcattttgcttgcttctagcctggtgcagtgactattgtggattgagtcttgagttggggtcatttcttgctggtgttatgatatcaaccacagattttgctcatcatactatggagcaggtggtattctgaattcagttcacattgtactttggtgtgactagttgacataaccaatactctggaaatgaactgtttcttttttttccttctttacatcaataggaggtaggctgctttggaaggaatgcgcttatgctattactttgcttgatctcggtttagcttctttagcatgctttaaggacatttcatttagtaaagctgcactctctaacgacttttctttttattttaaggttgaagccattcgcaatctatttgcagcactcttccttgcaagcattggaatgctcatacatgttaagttcttgtggaatcatgttgacatattacttgcagctgttatactggttataatagtaaagagtattgtcgtagctattgttgtaaaggcatttggatacagcatgaggaccgcttttgttgttgggctgtccttggctcagataggagagtttgcttttgtgcttttgagccgggcctcccatctccatcttgttggggggaaaatgtatctattattactgggaacaactgcccttagcttggtaacaactcctctcattttcaaactaattcctgtggtaatgcaccttggcatccttatgcgttggttcccctcggaaaacagtatgcagagtgaggaaaaggcggttatgcttgaagcccacaacagatcactctaacattgcctagccacaacattcttttgactgacggtgatttatttgtgcatcgactctttgcgcatgccatggaaacattggagaaacaattacacaccagtactccctttttgcggcgatatgggaacacgatgggatggacagagttaacagcttggccagccttggggctctccgtatagcattcttttttattgcgcttttgagttgtacatataggggatactgtacatgtcgtcaaggtagcatacagggggaaggcgccgatgggccttggttttgtatcattgttgccaactcgatcagtcgacagtctagaaagctagatagggatttttggtacctcgtgctcaaatgtacacttattgtcagaagacgatgggaaagttgtatgttatgtatttgttatgcccttgtgacgactaattgaccatggacacatgaatggtaacgtgttcaccgtatcgattactccctacgttctaaaatattagtcgctttaaac

SEQ ID NO: 6280 - DNA, 3232 bp, Zea Mays
cccgtctcgcggacgcctctcccttcccagttcccccgcctgccgccgcctcgtgctctcgtgctcgcgcgaccggatggaggatattcggacgacgactccaccgcgccaaccgacccctctcgcctctctcggtctctcctccgactcaccccgcgcccgcggcgagaaataaaagagaaatcccccgacgaccccgacgcgccacccgcaaatctcgctctccccgctgcccgcccgcccgcaccccacccctcgctcgcgcgccgcggcgcccgcgcgatccgatggcccccgccgccgcagcagcagaagcagcggggccctcgcctcgccggcgcctcgcggcggccgtcctcgcgctcgcgctcgcgctcgcctgtgtcctcgcgcaggcggccgccaggcccgacaaggagacgcgggagaagttctacgggacgctcgtcgccaacggcacacacaacgcctccggggacggcagcatcgccgagatgttcggccgcgtgctcgacaaggagttctccgacagcgacacgcccgacgctcccgacaagagtagcttcaacaacagcgtgtcagatcatcaagctgttctggagactgtagctgtcattacacatgacaagaagaagaatgattcacaacatactaattccccaaaacctttccaaataggtgacatgtttggaggccaagatgaaacctccgatgacttggaaactgtgattgataaagaggataatgtttttgtgatgtcaaatcgtaaaacaaagtatccaactcttcagctagatttacgattgattaaagatctggtaattataatcgtttcagctactggtggtggtatcatgttctcttttatggggcagccggttatcgttggctacctgcttgctggttctctagttggacctgggggtttgaactttatcaatgaaatggtgcaggtggagacttttgctcaatttggtgtagtgtttcttctttttgctcttggtctcgagttttcactgactaagttgaaagtcgttggtcctgttgctgtacttggaggtctgcttcagattgttctgttcatgttcttgtgtggcctcactgcagcgttgtgtggtgctaaatcatctgaaggagtgtttgttggtgccttcttgtctatgtcatctactgcagtggtttcgaagtttttagtggaaaaaggtagtacaaacacgcttcatggtcaagttacaattgggacgctaatacttcaggattgtgcagttggcctgctgtttgcactccttcctgttcttggaggtgctagtggcatttttggaggagtgatgtcaatggcgaaactgttgctagtgctatccgtatttgtagctgttacatatatgatgacatggtcaattgttcctcgattcttaaaactgatgattcagttatcttcacagacaaatgaactctaccaattggcctccgttgcattttgcttgcttctagcctggtgcagtgactattgtggattgagtcttgagttggggtcatttcttgctggtgttatgatatcaaccacagattttgctcatcatactatggagcaggtggtattctgaattcagttcacattgtactttggtgtgactagttgacataaccaatactctggaaatgaactgtttcttttttttccttctttacatcaataggaggtaggctgctttggaaggaatgcgcttatgctattactttgcttgatctcggtttagcttctttagcatgctttaaggacatttcatttagtaaagctgcactctctaacgacttttctttttattttaaggttgaagccattcgcaatctatttgcagcactcttccttgcaagcattggaatgctcatacatgttaagttcttgtggaatcatgttgacatattacttgcagctgttatactggttataatagtaaagagtattgtcgtagctattgttgtaaaggcatttggatacagcatgaggaccgcttttgttgttgggctgtccttggctcagataggagagtttgcttttgtgcttttgagccgggcctcccatctccatcttgttggggggaaaatgtatctattattactgggaacaactgcccttagcttggtaacaactcctctcattttcaaactaattcctgtggtaatgcaccttggcatccttatgcgttggttcccctcggaaaacagtatgcagagtgaggtaccctttactgccctctttgcttatcttattcaaagcttgacttatggacattgatgcctggagtgataaaggcagtaacgcctgtgtccaaacttcatgatctagaatcttttgacatgttaggttttgaagaagtgtcaacgacaaactgcttagtgaaataacacatttttcatttttcttttgttaatcagttgaggtactttatagtactccattccagtattttttattatgtacacttgaatatgaaatagatgtttccctcttaaatgaaaactgggaattgggatgttcgctctcaatggctattacttgtatctttatatataaatctttaaatagtggagcgagccaacccccatttgttcactcggtattatattagttactaatattcttttataactccatacctgatcgtatttcagcttccattacaggaaaaggcggttatgcttgaagcccacaacagatcactctaacattgcctagccacaacattcttttgactgacggtgatttatttgtgcatcgactctttgcgcatgccatggaaacattggagaaacaattacacaccagtactccctttttgcggcgatatgggaacacgatgggatggacagagttaacagcttggccagccttggggctctccgtatagcattcttttttattgcgcttttgagttgtacatataggggatactgtacatgtcgtcaaggtagcatacagggggaaggcgccgatgggccttggttttgtatcattgttgccaactcgatcagtcgacagtctagaaagctagatagggatttttggtacctcgtgctcaaatgtacacttattgtcagaagacgatgggaaagttgtatgttatgtatttgttatgcccttgtgacgactaattgaccatggacacatgaatggtaacgtgttcaccgtatcgattactccctacgttctaaaatattagtcgctttaaac

SEQ ID NO: 6281 - DNA, 2566 bp, Zea Mays
taaccaccggggtccggaggccgtcccgtctcgcggacgcctctcccttcccagttcccccgcctgccgccgcctcgtgctctcgtgctcgcgcgaccggatggaggatattcggacgacgactccaccgcgccaaccgacccctctcgcctctctcggtctctcctccgactcaccccgcgcccgcggcgagaaataaaagagaaatcccccgacgaccccgacgcgccacccgcaaatctcgctctccccgctgcccgcccgcccgcaccccacccctcgctcgcgcgccgcggcgcccgcgcgatccgatggcccccgccgccgcagcagcagaagcagcggggccctcgcctcgccggcgcctcgcggcggccgtcctcgcgctcgcgctcgcgctcgcctgtgtcctcgcgcaggcggccgccaggcccgacaaggagacgcgggagaagttctacgggacgctcgtcgccaacggcacacacaacgcctccggggacggcagcatcgccgagatgttcggccgcgtgctcgacaaggagttctccgacagcgacacgcccgacgctcccgacaagagtagcttcaacaacagcgtgtcagatcatcaagctgttctggagactgtagctgtcattacacatgacaagaagaagaatgattcacaacatactaattccccaaaacctttccaaataggtgacatgtttggaggccaagatgaaacctccgatgacttggaaactgtgattgataaagaggataatgtttttgtgatgtcaaatcgtaaaacaaagtatccaactcttcagctagatttacgattgattaaagatctggtaattataatcgtttcagctactggtggtggtatcatgttctcttttatggggcagccggttatcgttggctacctgcttgctggttctctagttggacctgggggtttgaactttatcaatgaaatggtgcaggtggagacttttgctcaatttggtgtagtgtttcttctttttgctcttggtctcgagttttcactgactaagttgaaagtcgttggtcctgttgctgtacttggaggtctgcttcagattgttctgttcatgttcttgtgtggcctcactgcagcgttgtgtggtgctaaatcatctgaaggagtgtttgttggtgccttcttgtctatgtcatctactgcagtggtttcgaagtttttagtggaaaaaggtagtacaaacacgcttcatggtcaagttacaattgggacgctaatacttcaggattgtgcagttggcctgctgtttgcactccttcctgttcttggaggtgctagtggcatttttggaggagtgatgtcaatggcgaaactgttgctagtgctatccgtatttgtagctgttacatatatgatgacatggtcaattgttcctcgattcttaaaactgatgattcagttatcttcacagacaaatgaactctaccaattggcctccgttgcattttgcttgcttctagcctggtgactattgtggattgagtcttgagttggggtcatttcttgctggtgttatgatatcaaccacagattttgctcatcatactatggagcaggttgaagccattcgcaatctatttgcagcactcttccttgcaagcattggaatgctcatacatgttaagttcttgtggaatcatgttgacatattacttgcagctgttatactggttataatagtaaagagtattgtcgtagctattgttgtaaaggcatttggatacagcatgaggaccgcttttgttgttgggctgtccttggctcagataggagagtttgcttttgtgcttttgagccgggcctcccatctccatcttgttggggggaaaatgtatctattattactgggaacaactgcccttagcttggtaacaactcctctcattttcaaactaattcctgtggtaatgcaccttggcatccttatgcgttggttcccctcggaaaacagtatgcagagtgaggaaaaggcggttatgcttgaagcccacaacagatcactctaacattgcctagccacaacattcttttgactgacggtgatttatttgtgcatcgactctttgcgcatgccatggaaacattggagaaacaattacacaccagtactccctttttgcggcgatatgggaacacgatgggatggacagagttaacagcttggccagccttggggctctccgtatagcattcttttttattgcgcttttgagttgtacatataggggatactgtacatgtcgtcaaggtagcatacagggggaaggcgccgatgggccttggttttgtatcattgttgccaactcgatcagtcgacagtctagaaagctagatagggatttttggtacctcgtgctcaaatgtacacttattgtcagaagacgatgggaaagttgtatgttatgtatttgttatgcccttgtgacgactaattgaccatggacacatgaatggtaacgtgttcaccgtatcgattactccctacgttctaaaatattagtcgctttaaac

SEQ ID NO: 6282 - DNA, 1505 bp, Zea Mays
aaaaatcacgtgctcacctccgtccaccttcactcacactctggaccagtaaagttttcaggtccagttaaaaaaaaaaaaccttagctttcagatttgttcttctcgtttgacttctcctttcactacatgaatgggtctcaggatccgagagaaagccgttgcgcgaaatggaatggcgcagctgcttagaatattgtgttctgaaactatcatgaaaaaagggggaaatgtacatgtttgctcaaattacatgtggaaatggcaatgcaccaacagattcaatgaagcaaggaccggaacagagcgggggagagagatcacagagaaacgggtatctgcttggatcggaggaagcagaggtcggaggagctgtcaagcaacaatgcatcacaagagggaggccagcacgacggagcacacggccaccgcggcgagcgcgccggccggtcgccacgcgacggcggacgacgccgacggcttcttggacttgtggtcggcgtggtccgcggccaccgacggggcgtccgccgcgggcggggacccctgtggcgcgtccgctggcgccggcgccggtgccgcctccggggcgccgacgtagagctccggcggcaccaggagggtgtccatggtgagcaggcagaacgggacgctgtcgacgacggtggacgcgacgcgggacctgctcttgccggtgtcgagcgagacgtcgtcgcccttggcgaccaccgtgacgtcggccttggcggccagcgtgcggagcgggcccttgacggacttgagcgaggtcttggtgttgtaggaaggcagggcgtggtactggaggagcttggtgaggttggccttggacatggccttgacgtcgggcgcgtccttggcctggaaggcgtcgtcgttgacggcgaacagggtgaggcccttgtccatggcggcctcgtacgtcttgagcacgcccgtggaggcggccagcgacgcgaagaccttgcagccggcgcgctccaggaggcgggtgaggttgtcggtggagggggtgtcgaagaggccgtcgaactcgatgggcgccgtgacctcgaggatggcgaacttgaaagggtgcgtctccacctccttggtgacggtgcagatcctggcgcccggcgtggcggccgagaagccgtagttcttgtcctcctggtccaccaccttgacgttccccgtggtgctggcggcgtcgcccgtggcctggtacagcgtggcggcgctctcgtcgccgtacttcttcaccttcttgcggtcgtagtagtcgagcaccgagtggaggcgcagcgcgttcttgatggcggggagcgagtcgccggcgtcggaggccagcgtcgtcatggcgtcgttggacagcaccaggacggacatcgacgtcgactgccgcgagttgatctcgtcgcacaccttcgtctccgacagatcgcactcgcacagggcatagtagccgagggccgaggcgacgggctaccacgtcaaaaggcgac

SEQ ID NO: 6283 - DNA, 1259 bp, Zea Mays
agctttcagatttgttcttctcgtttgacttctcctttcactacatgaatgggtctcaggatccgagagaaagccgttgcgcgaaatggaatggcgcagctgcttagaatattgtgttctgaaactatcatgaaaaaagggggaaatgtacatgtttgctcaaattacatgtggaaatggcaatgcaccaacagattcaatgaagcaaggaccggaacagagcgggggagagagatcacagagaaacgggtatctgcttggatcggaggaagcagaggtcggaggagctgtcaagcaacaatgcatcacaagagggaggtcttggtgttgtaggaaggcagggcgtggtactggaggagcttggtgaggttggccttggacatggccttgacgtcgggcgcgtccttggcctggaaggcgtcgtcgttgacggcgaacagggtgaggcccttgtccatggcggcctcgtacgtcttgagcacgcccgtggaggcggccagcgacgcgaagaccttgcagccggcgcgctccaggaggcgggtgaggttgtcggtggagggggtgtcgaagaggccgtcgaactcgatgggcgccgtgacctcgaggatggcgaacttgaaagggtgcgtctccacctccttggtgacggtgcagatcctggcgcccggcgtggcggccgagaagccgtagttcttgtcctcctggtccaccaccttgacgttccccgtggtgctggcggcgtcgcccgtggcctggtacagcgtggcggcgctctcgtcgccgtacttcttcaccttcttgcggtcgtagtagtcgagcaccgagtggaggcgcagcgcgttcttgatggcggggagcgagtcgccggcgtcggaggccagcgtcgtcatggcgtcgttggacagcaccaggacggacatcgacgtcgactgccgcgagttgatctcgtcgcacaccttcgtctccgacaggtactggttgtatagcttgtactccttgtacccggcgaggatggccgtgatgttgcgcccgcgcgccggcagcgccaggagcaggaggaggcaggccaccagcgccgccgtgaaccgctgcgtcgccatggttctctctcactaacacactcacacaaaccctggtagcaagcaagcaagcgaggacgaccacagctgctactgctagcctggctaattaaactatggtttggattgcgaggctggtgtggtgaggtctcgtctcggacgctggacggtaggtgcgtc

SEQ ID NO: 6284 - DNA, 1077 bp, Zea Mays
agctttcagatttgttcttctcgtttgacttctcctttcactacatgaatgggtctcaggatccgagagaaagccgttgcgcgaaatggaatggcgcagctgcttagaatattgtgttctgaaactatcatgaaaaaagggggaaatgtacatgtttgctcaaattacatgtggaaatggcaatgcaccaacagattcaatgaagcaaggaccggaacagagcgggggagagagatcacagagaaacgggtatctgcttggatcggaggaagcagaggtcggaggagctgtcaagcaacaatgcatcacaagagggaggccagcacgacggagcacacggccaccgcggcgagcgcgggtgaggttgtcggtggagggggtgtcgaagaggccgtcgaactcgatgggcgccgtgacctcgaggatggcgaacttgaaagggtgcgtctccacctccttggtgacggtgcagatcctggcgcccggcgtggcggccgagaagccgtagttcttgtcctcctggtccaccaccttgacgttccccgtggtgctggcggcgtcgcccgtggcctggtacagcgtggcggcgctctcgtcgccgtacttcttcaccttcttgcggtcgtagtagtcgagcaccgagtggaggcgcagcgcgttcttgatggcggggagcgagtcgccggcgtcggaggccagcgtcgtcatggcgtcgttggacagcaccaggacggacatcgacgtcgactgccgcgagttgatctcgtcgcacaccttcgtctccgacaggtactggttgtatagcttgtactccttgtacccggcgaggatggccgtgatgttgcgcccgcgcgccggcagcgccaggagcaggaggaggcaggccaccagcgccgccgtgaaccgctgcgtcgccatggttctctctcactaacacactcacacaaaccctggtagcaagcaagcaagcgaggacgaccacagctgctactgctagcctggctaattaaactatggtttggattgcgaggctggtgtggtgaggtctcgtctcggacgctggacggtaggtgcgtc

SEQ ID NO: 6285 - DNA, 3211 bp, Zea Mays
aaacaatctaatctgttcggcactctacttgccataacagtgggatgctgattttgctaacttaatgtttcacatcctgtggacaatgcccatttcagtattttagagtcaagtcatggaggctcatatcaaaagcatgatggcacaaccacgtgggataaagagtatcagttgtttcaaccatctggagctatcaagtttcctctacaagtcacgaccacagatgcttggctagaaaagataaaaaggctggaactgctacttacggtgaaggaatctgctatggatgttccttcaaacctagaagccagaaggcgtcttacattttttaccaactccttatttatggatatgcctgatgcacccaaagtccgaaacatgctctcgttttccgcattgaccccttattacaatgaaccagttcttttctctataaaagaacttgaggaagaaaatgaagatggagtttccaccctattctacctgcaaaaaatttatccagatgaatggaaaaactttaaggaaagggttggattggaggaagaacttaaagagagcgaagaaagcgaagaactaaaggaggaacttcgtctatgggcctcatacagaggccaaacactagctcgaacagttagaggcatgatgtactacaagaaagctttgaatcttgaagcatttctagacatggccaaacgtgaagatctcatggaaggatacaaagcagccgagtcagtaaatgatgaacaatggaagatacaccagaggtccttatttgctcaatgtgaagcagtggctgatatgaaattcacctatgttgtttcatgccagcagtatggaaatgataagcgtgctgcacttgctaatgcccaagacatattgcagctaatgaggaactacccttctctccgtgtagcatatattgatgaggtggaagatagagtaggagacaagaaaatggagacagcatattattctactttggttaaggttgctctaactaaggattctgaatctgcagaccccactcaaaatcttgatcaggttatctatcggataaaacttccaggccctgcaattctgggagaaggaaagcccgaaaaccaaaaccatgcaataattttcacccgtggtgaaggtttgcagaccatagatatgaaccaggacaactatttggaagaatcccttaaaatgagaaacctgctccaagagttccttacggagcatggagtgcggcgtccatctatacttggagttagagagcacatttttactggcagtgtatcctcccttgcatggttcatgtcaaatcaggagcacagttttgtgactattgggcagcgtctccttgcaaaccctctgaaggtccggttccactatgggcatcctgatgtatttgatagacttttccatctgacaacgggtggtgtcagtaaggcatcaaagagtatcaatttaagtgaagacatttttgcaggttataactcaactcttcgtggaggcaatgtaacacaccatgaatatgtacaagttggtaagggaagagacgtcggattaaatcagatctctaagtttgaggctaaaatagcaaatggaaatggtgaacagactcttagtcgtgatatctaccggcttggacaccgctttgattttttcaggatgctttcatgctacttcacaaccgtggggttttatttcagtacactgttgacggttgttacagtttatgtatttctgtatggacgcctttatcttgctctcagtggacttgaagaggggctatcgcagggaagattgattcataatcatccccttcaaattgctcttgcctcacaatctcttgttcaacttggttttctgatggctcttccaatgatgatggaaattggtcttgaaagaggatttggtcaggcactaagtgatctaatcatgatgaacttgcaattggctactgtctttttcacattttcccttggcactaagactcactactatggaagaatgttgcttcatggaggtgctcagtacagaggtactggcaggggatttgtcgtctttcatgctaagtttgcagagaattatagactctattctcgcagccactttgttaaagggattgagctgatgattctgctcattgtataccaactatttggtcaatcttatcgctcaacaattgcctatatttttattaccttctctatgtggcttctggtattgacatggctatttgcaccctttctgttcaacccctcgggatttgagtgggcaaaaattgttgatgattggtctgattggaacaagtggatcagcaatcgtggtgggattggtgtgtcaccagacaagagctgggaatcttggtgggaagtggagcaggatcatctaaaatattcaggaacaataggacgctttgttgagataatcttggctatacgttttttcatataccagtatggccttgtttaccacttacatgtcacacataacaaaagcatcttggtatatttaatttcttggctcgtaattgtggcggttctgctcgttatgaagactgtgtcggtgggaaggcggacattcagtgcagatttccagctattcttccgtctgatcaagtttttgatatttgttgctttcattgctattttgattgtcttgatagtattacttcatatgacctttcgcgatatatttgtgtgctttctagcattcttgcccacaggatgggggatacttctgattgcacaagcttgcaagcctcttgctcgacatgtaggattatggggatctgttcgtgcccttgcacgggcctatgagataattatgggggtgcttctctttagtccagttgctatattggcatggttcccctttgtgtccgagttccaaacgcggatgctgtttaatcaagcgttcagtagaggactgcaaatttctcgaattcttggtggtcaaaagaaggaacgctccgctcgtaacaaagattgattagtcttctttcatgtgtgttccaatatgcacttgtaaatatttgttactgtctcacggggtatagtgtgtttttatgattacaatatgtaaatatcagatcaaggtgtcataattgtattcgttagattactgtgtgtgtttctattgtaatagtctttgatccagcacatgtacttttactacatatatacgcaaagtctactctaatcagggtttccaacatgat

SEQ ID NO: 6286 - DNA, 3114 bp, Zea Mays
tccttttttatgataccagaaggagaatgatgagaaagacaggagtgctgtaataaagatttttcaagatatgctggaggttgtaacaagagatatatttgacgaccaccttagtattttagagtcaagtcatggaggctcatatcaaaagcatgatggcacaaccacgtgggataaagagtatcagttgtttcaaccatctggagctatcaagtttcctctacaagtcacgaccacagatgcttggctagaaaagataaaaaggctggaactgctacttacggtgaaggaatctgctatggatgttccttcaaacctagaagccagaaggcgtcttacattttttaccaactccttatttatggatatgcctgatgcacccaaagtccgaaacatgctctcgttttccgcattgaccccttattacaatgaaccagttcttttctctataaaagaacttgaggaagaaaatgaagatggagtttccaccctattctacctgcaaaaaatttatccagatgaatggaaaaactttaaggaaagggttggattggaggaagaacttaaagagagcgaagaaagcgaagaactaaaggaggaacttcgtctatgggcctcatacagaggccaaacactagctcgaacagttagaggcatgatgtactacaagaaagctttgaatcttgaagcatttctagacatggccaaacgtgaagatctcatggaaggatacaaagcagccgagtcagtaaatgatgaacaatggaagatacaccagaggtccttatttgctcaatgtgaagcagtggctgatatgaaattcacctatgttgtttcatgccagcagtatggaaatgataagcgtgctgcacttgctaatgcccaagacatattgcagctaatgaggaactacccttctctccgtgtagcatatattgatgaggtggaagatagagtaggagacaagaaaatggagacagcatattattctactttggttaaggttgctctaactaaggattctgaatctgcagaccccactcaaaatcttgatcaggttatctatcggataaaacttccaggccctgcaattctgggagaaggaaagcccgaaaaccaaaaccatgcaataattttcacccgtggtgaaggtttgcagaccatagatatgaaccaggacaactatttggaagaatcccttaaaatgagaaacctgctccaagagttccttacggagcatggagtgcggcgtccatctatacttggagttagagagcacatttttactggcagtgtatcctcccttgcatggttcatgtcaaatcaggagcacagttttgtgactattgggcagcgtctccttgcaaaccctctgaagttataactcaactcttcgtggaggcaatgtaacacaccatgaatatgtacaagttggtaagggaagagacgtcggattaaatcagatctctaagtttgaggctaaaatagcaaatggaaatggtgaacagactcttagtcgtgatatctaccggcttggacaccgctttgattttttcaggatgctttcatgctacttcacaaccgtggggttttatttcagtacactgttgacggttgttacagtttatgtatttctgtatggacgcctttatcttgctctcagtggacttgaagaggggctatcgcagggaagattgattcataatcatccccttcaaattgctcttgcctcacaatctcttgttcaacttggttttctgatggctcttccaatgatgatggaaattggtcttgaaagaggatttggtcaggcactaagtgatctaatcatgatgaacttgcaattggctactgtctttttcacattttcccttggcactaagactcactactatggaagaatgttgcttcatggaggtgctcagtacagaggtactggcaggggatttgtcgtctttcatgctaagtttgcagagaattatagactctattctcgcagccactttgttaaagggattgagctgatgattctgctcattgtataccaactatttggtcaatcttatcgctcaacaattgcctatatttttattaccttctctatgtggcttctggtattgacatggctatttgcaccctttctgttcaacccctcgggatttgagtgggcaaaaattgttgatgattggtctgattggaacaagtggatcagcaatcgtggtgggattggtgtgtcaccagacaagagctgggaatcttggtgggaagtggagcaggatcatctaaaatattcaggaacaataggacgctttgttgagataatcttggctatacgttttttcatataccagtatggccttgtttaccacttacatgtcacacataacaaaagcatcttggtatatttaatttcttggctcgtaattgtggcggttctgctcgttatgaagactgtgtcggtgggaaggcggacattcagtgcagatttccagctattcttccgtctgatcaagtttttgatatttgttgctttcattgctattttgattgtcttgatagtattacttcatatgacctttcgcgatatatttgtgtgctttctagcattcttgcccacaggatgggggatacttctgattgcacaagcttgcaagcctcttgctcgacatgtaggattatggggatctgttcgtgcccttgcacgggcctatgagataattatgggggtgcttctctttagtccagttgctatattggcatggttcccctttgtgtccgagttccaaacgcggatgctgtttaatcaagcgttcagtagaggactgcaaatttctcgaattcttggtggtcaaaagaaggaacgctccgctcgtaacaaagattgattagtcttctttcatgtgtgttccaatatgcacttgtaaatatttgttactgtctcacggggtatagtgtgtttttatgattacaatatgtaaatatcagatcaaggtgtcataattgtattcgttagattactgtgtgtgtttctattgtaatagtctttgatccagcacatgtacttttactacatatatacgcaaagtctactctaatcagggtttccaacatgat

SEQ ID NO: 6287 - DNA, 3399 bp, Zea Mays
ccgagatggtggaagccgatgattcctactcctacccgagatctccctcatgctatatcggtcatctggtggcagttaagaacgaactgggcgagagggacgacgagacgcgtgatcacgacgtggagaacagtggcggctagggttccggcctccacaaggaagccgactaggaaggagaatgatgagaaagacaggagtgctgtaataaagatttttcaagatatgctggaggttgtaacaagagatatatttgacgaccaccttagtattttagagtcaagtcatggaggctcatatcaaaagcatgatggcacaaccacgtgggataaagagtatcagttgtttcaaccatctggagctatcaagtttcctctacaagtcacgaccacagatgcttggctagaaaagataaaaaggctggaactgctacttacggtgaaggaatctgctatggatgttccttcaaacctagaagccagaaggcgtcttacattttttaccaactccttatttatggatatgcctgatgcacccaaagtccgaaacatgctctcgttttccgcattgaccccttattacaatgaaccagttcttttctctataaaagaacttgaggaagaaaatgaagatggagtttccaccctattctacctgcaaaaaatttatccagatgaatggaaaaactttaaggaaagggttggattggaggaagaacttaaagagagcgaagaaagcgaagaactaaaggaggaacttcgtctatgggcctcatacagaggccaaacactagctcgaacagttagaggcatgatgtactacaagaaagctttgaatcttgaagcatttctagacatggccaaacgtgaagatctcatggaaggatacaaagcagccgagtcagtaaatgatgaacaatggaagatacaccagaggtccttatttgctcaatgtgaagcagtggctgatatgaaattcacctatgttgtttcatgccagcagtatggaaatgataagcgtgctgcacttgctaatgcccaagacatattgcagctaatgaggaaggctacacttcttgtagctacccttctctccgtgtagcatatattgatgaggtggaagatagagtaggagacaagaaaatggagacagcatattattctactttggttaaggttgctctaactaaggattctgaatctgcagaccccactcaaaatcttgatcaggttatctatcggataaaacttccaggccctgcaattctgggagaaggaaagcccgaaaaccaaaaccatgcaataattttcacccgtggtgaaggtttgcagaccatagatatgaaccaggacaactatttggaagaatcccttaaaatgagaaacctgctccaagagttccttacggagcatggagtgcggcgtccatctatacttggagttagagagcacatttttactggcagtgtatcctcccttgcatggttcatgtcaaatcaggagcacagttttgtgactattgggcagcgtctccttgcaaaccctctgaaggtccggttccactatgggcatcctgatgtatttgatagacttttccatctgacaacgggtggtgtcagtaaggcatcaaagagtatcaatttaagtgaagacatttttgcaggttataactcaactcttcgtggaggcaatgtaacacaccatgaatatgtacaagttggtaagggaagagacgtcggattaaatcagatctctaagtttgaggctaaaatagcaaatggaaatggtgaacagactcttagtcgtgatatctaccggcttggacaccgctttgattttttcaggatgctttcatgctacttcacaaccgtggggttttatttcagtacactgttgacggttgttacagtttatgtatttctgtatggacgcctttatcttgctctcagtggacttgaagaggggctatcgcagggaagattgattcataatcatccccttcaaattgctcttgcctcacaatctcttgttcaacttggttttctgatggctcttccaatgatgatggaaattggtcttgaaagaggatttggtcaggcactaagtgatctaatcatgatgaacttgcaattggctactgtctttttcacattttcccttggcactaagactcactactatggaagaatgttgcttcatggaggtgctcagtacagaggtactggcaggggatttgtcgtctttcatgctaagtttgcagagaattatagactctattctcgcagccactttgttaaagggattgagctgatgattctgctcattgtataccaactatttggtcaatcttatcgctcaacaattgcctatatttttattaccttctctatgtggcttctggtattgacatggctatttgcaccctttctgttcaacccctcgggatttgagtgggcaaaaattgttgatgattggtctgattggaacaagtggatcagcaatcgtggtgggattggtgtgtcaccagacaagagctgggaatcttggtgggaagtggagcaggatcatctaaaatattcaggaacaataggacgctttgttgagataatcttggctatacgttttttcatataccagtatggccttgtttaccacttacatgtcacacataacaaaagcatcttggtatatttaatttcttggctcgtaattgtggcggttctgctcgttatgaagactgtgtcggtgggaaggcggacattcagtgcagatttccagctattcttccgtctgatcaagtttttgatatttgttgctttcattgctattttgattgtcttgatagtattacttcatatgacctttcgcgatatatttgtgtgctttctagcattcttgcccacaggatgggggatacttctgattgcacaagcttgcaagcctcttgctcgacatgtaggattatggggatctgttcgtgcccttgcacgggcctatgagataattatgggggtgcttctctttagtccagttgctatattggcatggttcccctttgtgtccgagttccaaacgcggatgctgtttaatcaagcgttcagtagaggactgcaaatttctcgaattcttggtggtcaaaagaaggaacgctccgctcgtaacaaagattgattagtcttctttcatgtgtgttccaatatgcacttgtaaatatttgttactgtctcacggggtatagtgtgtttttatgattacaatatgtaaatatcagatcaaggtgtcataattgtattcgttagattactgtgtgtgtttctattgtaatagtctttgatccagcacatgtacttttactacatatatacgcaaagtctactctaatcagggtttccaacatgat

SEQ ID NO: 6288 - DNA, 3389 bp, Zea Mays
atcggccccgagatggtggaagccgatgattcctactcctacccgagatctccctcatgctatatcggtcatctggtggcagttaagaacgaactgggcgagagggacgacgagacgcgtgatcacgacgtggagaacagtggcggctagggttccggcctccacaaggaagccgactaggaaggagaatgatgagaaagacaggagtgctgtaataaagatttttcaagatatgctggaggttgtaacaagagatatatttgacgaccaccttagtattttagagtcaagtcatggaggctcatatcaaaagcatgatggcacaaccacgtgggataaagagtatcagttgtttcaaccatctggagctatcaagtttcctctacaagtcacgaccacagatgcttggctagaaaagataaaaaggctggaactgctacttacggtgaaggaatctgctatggatgttccttcaaacctagaagccagaaggcgtcttacattttttaccaactccttatttatggatatgcctgatgcacccaaagtccgaaacatgctctcgttttccgcattgaccccttattacaatgaaccagttcttttctctataaaagaacttgaggaagaaaatgaagatggagtttccaccctattctacctgcaaaaaatttatccagatgaatggaaaaactttaaggaaagggttggattggaggaagaacttaaagagagcgaagaaagcgaagaactaaaggaggaacttcgtctatgggcctcatacagaggccaaacactagctcgaacagttagaggcatgatgtactacaagaaagctttgaatcttgaagcatttctagacatggccaaacgtgaagatctcatggaaggatacaaagcagccgagtcagtaaatgatgaacaatggaagatacaccagaggtccttatttgctcaatgtgaagcagtggctgatatgaaattcacctatgttgtttcatgccagcagtatggaaatgataagcgtgctgcacttgctaatgcccaagacatattgcagctaatgaggaactacccttctctccgtgtagcatatattgatgaggtggaagatagagtaggagacaagaaaatggagacagcatattattctactttggttaaggttgctctaactaaggattctgaatctgcagaccccactcaaaatcttgatcaggttatctatcggataaaacttccaggccctgcaattctgggagaaggaaagcccgaaaaccaaaaccatgcaataattttcacccgtggtgaaggtttgcagaccatagatatgaaccaggacaactatttggaagaatcccttaaaatgagaaacctgctccaagagttccttacggagcatggagtgcggcgtccatctatacttggagttagagagcacatttttactggcagtgtatcctcccttgcatggttcatgtcaaatcaggagcacagttttgtgactattgggcagcgtctccttgcaaaccctctgaaggtccggttccactatgggcatcctgatgtatttgatagacttttccatctgacaacgggtggtgtcagtaaggcatcaaagagtatcaatttaagtgaagacatttttgcaggttataactcaactcttcgtggaggcaatgtaacacaccatgaatatgtacaagttggtaagggaagagacgtcggattaaatcagatctctaagtttgaggctaaaatagcaaatggaaatggtgaacagactcttagtcgtgatatctaccggcttggacaccgctttgattttttcaggatgctttcatgctacttcacaaccgtggggttttatttcagtacactgttgacggttgttacagtttatgtatttctgtatggacgcctttatcttgctctcagtggacttgaagaggggctatcgcagggaagattgattcataatcatccccttcaaattgctcttgcctcacaatctcttgttcaacttggttttctgatggctcttccaatgatgatggaaattggtcttgaaagaggatttggtcaggcactaagtgatctaatcatgatgaacttgcaattggctactgtctttttcacattttcccttggcactaagactcactactatggaagaatgttgcttcatggaggtgctcagtacagaggtactggcaggggatttgtcgtctttcatgctaagtttgcagagaattatagactctattctcgcagccactttgttaaagggattgagctgatgattctgctcattgtataccaactatttggtcaatcttatcgctcaacaattgcctatatttttattaccttctctatgtggcttctggtattgacatggctatttgcaccctttctgttcaacccctcgggatttgagtgggcaaaaattgttgatgattggtctgattggaacaagtggatcagcaatcgtggtgggattggtgtgtcaccagacaagagctgggaatcttggtgggaagtggagcaggatcatctaaaatattcaggaacaataggacgctttgttgagataatcttggctatacgttttttcatataccagtatggccttgtttaccacttacatgtcacacataacaaaagcatcttggtatatttaatttcttggctcgtaattgtggcggttctgctcgttatgaagactgtgtcggtgggaaggcggacattcagtgcagatttccagctattcttccgtctgatcaagtttttgatatttgttgctttcattgctattttgattgtcttgatagtattacttcatatgacctttcgcgatatatttgtgtgctttctagcattcttgcccacaggatgggggatacttctgattgcacaagcttgcaagcctcttgctcgacatgtaggattatggggatctgttcgtgcccttgcacgggcctatgagataattatgggggtgcttctctttagtccagttgctatattggcatggttcccctttgtgtccgagttccaaacgcggatgctgtttaatcaagcgttcagtagaggactgcaaatttctcgaattcttggtggtcaaaagaaggaacgctccgctcgtaacaaagattgattagtcttctttcatgtgtgttccaatatgcacttgtaaatatttgttactgtctcacggggtatagtgtgtttttatgattacaatatgtaaatatcagatcaaggtgtcataattgtattcgttagattactgtgtgtgtttctattgtaatagtctttgatccagcacatgtacttttactacatatatacgcaaagtctactctaatcagggtttccaacatgat

SEQ ID NO: 6289 - DNA, 844 bp, Zea Mays
  misc_feature (843)..(844): n is a, c, g, or t
ggttctttcgtcccctgcaattggcatggcaatccctctataatcattgaccagcctgctggtgtccttccaccagaaggaaccttttcacttgagttatgaggaatccgtccccatctgtagttgccaacaattcagcaggagatgcaacaacgaaaattactgtatatgggcttgtaccttctcatttggggtgaagctgcaaacttgcgttttatgccagagtgcatttgctacatatatcatcatatggcatttgaaatgtatggtatgttagctggaaatgtcagtgccttgacgggtgaatatgtgaagccggcctatggtggtgagaaagaagcctttctgaagaaagttgttacaccgatttaccataccatagcaaaggaagctgaaaggagcaaaagagagaaagggaatcattctgagtggagaaactatgatgatcttaatgagtacttctggtctgctgactgctttcggcttggttggcctatgcgagctgatgctgacttcttttgtcagcctgatgaaagaaatgaaagcacaaggatcagcaaacagaagggaaaggtcaacttcgttgagctacgctcattttggcacatattcagaagttttgacagactctggagcttctttattttagctcttcaggttatgataattctcgcttgggacggaggttcactagccagtatttttgattatgctgttttcaagaaggttttgagtatctttatcacttctgctatactaaatcttggacaagctacacttgatattatctttaattggaaggccagacgaacgatggaatttgcagttaagctgagatatgtnn

SEQ ID NO: 6290 - DNA, 1093 bp, Zea Mays
  misc_feature (1092)..(1093): n is a, c, g, or t
atgtggtgtctagctggggctgcagggctgaaagacagtggcaatcaggcaatcatgaaatttcctgagatccaagctgctgcttccgctcttcgcaatacaaggggtcttccatggcctaaaacttatgagcataaagttaacgaggacctcttggattggctgcaagctatgtttggctttcagacagatagtgtttcaaatcagagggaacatttgattttacttcttgctaacatacatatacgaagaaatccgaagactgatcaacaatccaagttggatgacaatgcactgaatgatgtgatgaaaagattgtttaagaattacaagaaatggtgcaaatatcttggtcgcaagagcagcctttggttgccaacaattcagcaggagatgcaacaacgaaaattactgtatatgggcttgtaccttctcatttggggtgaagctgcaaacttgcgttttatgccagagtgcatttgctacatatatcatcatatggcatttgaaatgtatggtatgttagctggaaatgtcagtgccttgacgggtgaatatgtgaagccggcctatggtggtgagaaagaagcctttctgaagaaagttgttacaccgatttaccataccatagcaaaggaagctgaaaggagcaaaagagagaaagggaatcattctgagtggagaaactatgatgatcttaatgagtacttctggtctgctgactgctttcggcttggttggcctatgcgagctgatgctgacttcttttgtcagcctgatgaaagaaatgaaagcacaaggatcagcaaacagaagggaaaggtcaacttcgttgagctacgctcattttggcacatattcagaagttttgacagactctggagcttctttattttagctcttcaggttatgataattctcgcttgggacggaggttcactagccagtatttttgattatgctgttttcaagaaggttttgagtatctttatcacttctgctatactaaatcttggacaagctacacttgatattatctttaattggaaggccagacgaacgatggaatttgcagttaagctgagatatgtnn

SEQ ID NO: 6291 - DNA, 1117 bp, Zea Mays
  misc_feature (1116)..(1117): n is a, c, g, or t
atgtggtgtctagctggggctgcagggctgaaagacagtggcaatcaggcaatcatgaaatttcctgagatccaagctgctgcttccgctcttcgcaatacaaggggtcttccatggcctaaaacttatgagcataaagttaacgaggacctcttggattggctgcaagctatgtttggctttcagacagatagtgtttcaaatcagagggaacatttgattttacttcttgctaacatacatatacgaagaaatccgaagactgatcaacaatccaagttggatgacaatgcactgaatgatgtgatgaaaagattgtttaagaattacaagaaatggtgcaaatatcttggtcgcaagagcagcctttggttgccaacaattcagcaggagatgcaacaacgaaaattactgtatatgggcttgtaccttctcatttggggtgaagctgcaaacttgcgttttatgccagagtgcatttgctacatatatcatcatatggcatttgaaatgtatggtatgttagctggaaatgtcagtgccttgacgggtgaatatgtgaagccggcctatggtggtgagaaagaagcctttctgaagaaagttgttacaccgatttaccataccatagcaaaggaagctgaaaggagcaaaagagagaaagggaatcattctgagtggagaaactatgatgatcttaatgagtacttctggtctgctgactgctttcggcttggttggcctatgcgagctgatgctgacttcttttgtcagcctgatgaaagaaatgaaagcacaaggatcagcaaacagaagggaaaggtcaacttcgttgagctacgctcattttggcacatattcagaagttttgacagactctggagcttctttattttagctcttcaggttatgataattctcgcttgggacggaggttcactagccagtatttttgattatgctgttttcaagaaggttttgagtatctttatcacttctgctatactaaatcttggacaaggtgtgtaaactttgcattgatctgctacacttgatattatctttaattggaaggccagacgaacgatggaatttgcagttaagctgagatatgtnn

SEQ ID NO: 6292 - DNA, 1004 bp, Zea Mays
  misc_feature (1003)..(1004): n is a, c, g, or t
caagatgtggtgtctagctggggctgcagggctgaaagacagtggcaatcaggcaatcatgaaatttcctgagatccaagctgctgcttccgctcttcgcaatacaaggggtcttccatggcctaaaacttatgagcataaagttaacgaggacctcttggattggctgcaagctatgtttggctttcagttggatgacaatgcactgaatgatgtgatgaaaagattgtttaagaattacaagaaatggtgcaaatatcttggtcgcaagagcagcctttggttgccaacaattcagcaggagatgcaacaacgaaaattactgtatatgggcttgtaccttctcatttggggtgaagctgcaaacttgcgttttatgccagagtgcatttgctacatatatcatcatatggcatttgaaatgtatggtatgttagctggaaatgtcagtgccttgacgggtgaatatgtgaagccggcctatggtggtgagaaagaagcctttctgaagaaagttgttacaccgatttaccataccatagcaaaggaagctgaaaggagcaaaagagagaaagggaatcattctgagtggagaaactatgatgatcttaatgagtacttctggtctgctgactgctttcggcttggttggcctatgcgagctgatgctgacttcttttgtcagcctgatgaaagaaatgaaagcacaaggatcagcaaacagaagggaaaggtcaacttcgttgagctacgctcattttggcacatattcagaagttttgacagactctggagcttctttattttagctcttcaggttatgataattctcgcttgggacggaggttcactagccagtatttttgattatgctgttttcaagaaggttttgagtatctttatcacttctgctatactaaatcttggacaagctacacttgatattatctttaattggaaggccagacgaacgatggaatttgcagttaagctgagatatgtnn

SEQ ID NO: 6293 - DNA, 1183 bp, Zea Mays
  misc_feature (1182)..(1183): n is a, c, g, or t
ctttgatggggctactccggacatctctaggattactcaagacattagggacgatgccaagatgtggtgtctagctggggctgcagggctgaaagacagtggcaatcaggcaatcatgaaatttcctgagatccaagctgctgcttccgctcttcgcaatacaaggggtcttccatggcctaaaacttatgagcataaagttaacgaggacctcttggattggctgcaagctatgtttggctttcagacagatagtgtttcaaatcagagggaacatttgattttacttcttgctaacatacatatacgaagaaatccgaagactgatcaacaatccaaggttttcttctgtaaatattcaaccactagttggatgacaatgcactgaatgatgtgatgaaaagattgtttaagaattacaagaaatggtgcaaatatcttggtcgcaagagcagcctttggttgccaacaattcagcaggagatgcaacaacgaaaattactgtatatgggcttgtaccttctcatttggggtgaagctgcaaacttgcgttttatgccagagtgcatttgctacatatatcatcatatggcatttgaaatgtatggtatgttagctggaaatgtcagtgccttgacgggtgaatatgtgaagccggcctatggtggtgagaaagaagcctttctgaagaaagttgttacaccgatttaccataccatagcaaaggaagctgaaaggagcaaaagagagaaagggaatcattctgagtggagaaactatgatgatcttaatgagtacttctggtctgctgactgctttcggcttggttggcctatgcgagctgatgctgacttcttttgtcagcctgatgaaagaaatgaaagcacaaggatcagcaaacagaagggaaaggtcaacttcgttgagctacgctcattttggcacatattcagaagttttgacagactctggagcttctttattttagctcttcaggttatgataattctcgcttgggacggaggttcactagccagtatttttgattatgctgttttcaagaaggttttgagtatctttatcacttctgctatactaaatcttggacaagctacacttgatattatctttaattggaaggccagacgaacgatggaatttgcagttaagctgagatatgtnn

SEQ ID NO: 6294 - DNA, 1509 bp, Zea Mays
  misc_feature (1508)..(1509): n is a, c, g, or t
atgacgtccttgtcacgcacgctgtctcggggcgggccgatgcagtcgccaggggctcgccgcatccaaaggacgcagactgctgtgaattttggtgagcccatgtttgacagcgaggtggtgccgtcgtcgcttgttgagattgcgcccatcctccgtgttgccaatgaggccggttctatgcattcgaaaaggctcacaggttagatccgacttcaagtggtcgtggtgtccgacagttcaagacagctcttctgcagcggcttgaaagggagaacgagcccaccttgatgggaaggggacaaaagagtgatgcacgggaaatacagaccttctatcatagctattacaagaaatatattcaagcactccagaatgcttctgaccaactggatcgtgctcaactaaccaaagcctaccagactgctgctattctgtttgaagttttaaaagcagttacacaacaacatgctgttgaagttgatcatgagatattggaagctgctgataaggttaaagagaaaacgaagatctatctcccttttaatattctccctcttgatccagacagtggcaatcaggcaatcatgaaatttcctgagacagatagtgtttcaaatcagagggaacatttgattttacttcttgctaacatacatatacgaagaaatccgaagactgatcaacaatccaagttggatgacaatgcactgaatgatgtgatgaaaagattgtttaagaattacaagaaatggtgcaaatatcttggtcgcaagagcagcctttggttgccaacaattcagcaggagatgcaacaacgaaaattactgtatatgggcttgtaccttctcatttggggtgaagctgcaaacttgcgttttatgccagagtgcatttgctacatatatcatcatatggcatttgaaatgtatggtatgttagctggaaatgtcagtgccttgacgggtgaatatgtgaagccggcctatggtggtgagaaagaagcctttctgaagaaagttgttacaccgatttaccataccatagcaaaggaagctgaaaggagcaaaagagagaaagggaatcattctgagtggagaaactatgatgatcttaatgagtacttctggtctgctgactgctttcggcttggttggcctatgcgagctgatgctgacttcttttgtcagcctgatgaaagaaatgaaagcacaaggatcagcaaacagaagggaaaggtcaacttcgttgagctacgctcattttggcacatattcagaagttttgacagactctggagcttctttattttagctcttcaggttatgataattctcgcttgggacggaggttcactagccagtatttttgattatgctgttttcaagaaggttttgagtatctttatcacttctgctatactaaatcttggacaagctacacttgatattatctttaattggaaggccagacgaacgatggaatttgcagttaagctgagatatgtnn

SEQ ID NO: 6295 - DNA, 1995 bp, Zea Mays
  misc_feature (1994)..(1995): n is a, c, g, or t
ctcttgcgcgtctaccgtacgtaagtacgttggtcgcgtggttttcactcgagttcctgcggattggtgcgcgcgctacccgtgtggccgtgtccccgactccacatgagcgagctttcccatgcgcgcgccaccaaaagctcggtgctggatttctgaatcttcaagcttgggctagctgcctagcttcaaaacggggcctctatttccgttggttggttgaattgcctgacgtgattcgtctcagcatcatcaaattgttgtaccgagtgacaaggtttagggtggtgactgcaagtcaccgagatgacgtccttgtcacgcacgctgtctcggggcgggccgatgcagtcgccaggggctcgccgcatccaaaggacgcagactgctgtgaattttggtgagcccatgtttgacagcgaggtggtgccgtcgtcgcttgttgagattgcgcccatcctccgtgttgccaatgaggttgagatggccaaccctcgtgtcgcttatctctgccggttctatgcattcgaaaaggctcacaggttagatccgacttcaagtggtcgtggtgtccgacagttcaagacagctcttctgcagcggcttgaaagggagaacgagcccaccttgatgggaaggggacaaaagagtgatgcacgggaaatacagaccttctatcatagctattacaagaaatatattcaagcactccagaatgcttctgaccaactggatcgtgctcaactaaccaaagcctaccagactgctgctattctgtttgaagttttaaaagcagttacacaacaacatgctgttgaagttgatcatgagatattggaagctgctgataaggttaaagagaaaacgaagatctatctcccttttaatattctccctcttgatccagacagtggcaatcaggcaatcatgaaatttcctgagatccaagctgctgcttccgctcttcgcaatacaaggggtcttccatggcctaaaacttatgagcataaagttaacgaggacctcttggattggctgcaagctatgtttggctttcagacagatagtgtttcaaatcagagggaacatttgattttacttcttgctaacatacatatacgaagaaatccgaagactgatcaacaatccaaggttttcttctgtaaatattcaaccactagttggatgacaatgcactgaatgatgtgatgaaaagattgtttaagaattacaagaaatggtgcaaatatcttggtcgcaagagcagcctttggttgccaacaattcagcaggagatgcaacaacgaaaattactgtatatgggcttgtaccttctcatttggggtgaagctgcaaacttgcgttttatgccagagtgcatttgctacatatatcatcatatggcatttgaaatgtatggtatgttagctggaaatgtcagtgccttgacgggtgaatatgtgaagccggcctatggtggtgagaaagaagcctttctgaagaaagttgttacaccgatttaccataccatagcaaaggaagctgaaaggagcaaaagagagaaagggaatcattctgagtggagaaactatgatgatcttaatgagtacttctggtctgctgactgctttcggcttggttggcctatgcgagctgatgctgacttcttttgtcagcctgatgaaagaaatgaaagcacaaggatcagcaaacagaagggaaaggtcaacttcgttgagctacgctcattttggcacatattcagaagttttgacagactctggagcttctttattttagctcttcaggttatgataattctcgcttgggacggaggttcactagccagtatttttgattatgctgttttcaagaaggttttgagtatctttatcacttctgctatactaaatcttggacaagctacacttgatattatctttaattggaaggccagacgaacgatggaatttgcagttaagctgagatatgtnn

SEQ ID NO: 6296 - DNA, 1960 bp, Zea Mays
  misc_feature (1959)..(1960): n is a, c, g, or t
ctcttgcgcgtctaccgtacgtaagtacgttggtcgcgtggttttcactcgagttcctgcggattggtgcgcgcgctacccgtgtggccgtgtccccgactccacatgagcgagctttcccatgcgcgcgccaccaaaagctcggtgctggatttctgaatcttcaagcttgggctagctgcctagcttcaaaacggggcctctatttccgttggttggttgaattgcctgacgtgattcgtctcagcatcatcaaattgttgtaccgagtgacaagggtggtgactgcaagtcaccgagatgacgtccttgtcacgcacgctgtctcggggcgggccgatgcagtcgccaggggctcgccgcatccaaaggacgcagactgctgtgaattttggtgagcccatgtttgacagcgaggtggtgccgtcgtcgcttgttgagattgcgcccatcctccgtgttgccaatgaggttgagatggccaaccctcgtgtcgcttatctctgccggttctatgcattcgaaaaggctcacaggttagatccgacttcaagtggtcgtggtgtccgacagttcaagacagctcttctgcagcggcttgaaagggagaacgagcccaccttgatgggaaggggacaaaagagtgatgcacgggaaatacagaccttctatcatagctattacaagaaatatattcaagcactccagaatgcttctgaccaactggatcgtgctcaactaaccaaagcctaccagactgctgctattctgtttgaagttttaaaagcagttacacaacaacatgctgttgaagttgatcatgagatattggaagctgctgataaggttaaagagaaaacgaagatctatctcccttttaatattctccctcttgatccagacagtggcaatcaggcaatcatgaaatttcctgagatccaagctgctgcttccgctcttcgcaatacaaggggtcttccatggcctaaaacttatgagcataaagttaacgaggacctcttggattggctgcaagctatgtttggctttcagacagatagtgtttcaaatcagagggaacatttgattttacttcttgctaacatacatatacgaagaaatccgaagactgatcaacaatccaagttggatgacaatgcactgaatgatgtgatgaaaagattgtttaagaattacaagaaatggtgcaaatatcttggtcgcaagagcagcctttggttgccaacaattcagcaggagatgcaacaacgaaaattactgtatatgggcttgtaccttctcatttggggtgaagctgcaaacttgcgttttatgccagagtgcatttgctacatatatcatcatatggcatttgaaatgtatggtatgttagctggaaatgtcagtgccttgacgggtgaatatgtgaagccggcctatggtggtgagaaagaagcctttctgaagaaagttgttacaccgatttaccataccatagcaaaggaagctgaaaggagcaaaagagagaaagggaatcattctgagtggagaaactatgatgatcttaatgagtacttctggtctgctgactgctttcggcttggttggcctatgcgagctgatgctgacttcttttgtcagcctgatgaaagaaatgaaagcacaaggatcagcaaacagaagggaaaggtcaacttcgttgagctacgctcattttggcacatattcagaagttttgacagactctggagcttctttattttagctcttcaggttatgataattctcgcttgggacggaggttcactagccagtatttttgattatgctgttttcaagaaggttttgagtatctttatcacttctgctatactaaatcttggacaagctacacttgatattatctttaattggaaggccagacgaacgatggaatttgcagttaagctgagatatgtnn

SEQ ID NO: 6297 - DNA, 1932 bp, Zea Mays
  misc_feature (1931)..(1932): n is a, c, g, or t
ctcttgcgcgtctaccgtacgtaagtacgttggtcgcgtggttttcactcgagttcctgcggattggtgcgcgcgctacccgtgtggccgtgtccccgactccacatgagcgagctttcccatgcgcgcgccaccaaaagctcggtgctggatttctgaatcttcaagcttgggctagctgcctagcttcaaaacggggcctctatttccgttggttggttgaattgcctgacgtgattcgtctcagcatcatcaaattgttgtaccgagtgacaaggtttagggtggtgactgcaagtcaccgagatgacgtccttgtcacgcacgctgtctcggggcgggccgatgcagtcgccaggggctcgccgcatccaaaggacgcagactgctgtgaattttggtgagcccatgtttgacagcgaggtggtgccgtcgtcgcttgttgagattgcgcccatcctccgtgttgccaatgaggccggttctatgcattcgaaaaggctcacaggttagatccgacttcaagtggtcgtggtgtccgacagttcaagacagctcttctgcagcggcttgaaagggagaacgagcccaccttgatgggaaggggacaaaagagtgatgcacgggaaatacagaccttctatcatagctattacaagaaatatattcaagcactccagaatgcttctgaccaactggatcgtgctcaactaaccaaagcctaccagactgctgctattctgtttgaagttttaaaagcagttacacaacaacatgctgttgaagttgatcatgagatattggaagctgctgataaggttaaagagaaaacgaagatctatctcccttttaatattctccctcttgatccagacagtggcaatcaggcaatcatgaaatttcctgagatccaagctgctgcttccgctcttcgcaatacaaggggtcttccatggcctaaaacttatgagcataaagttaacgaggacctcttggattggctgcaagctatgtttggctttcagacagatagtgtttcaaatcagagggaacatttgattttacttcttgctaacatacatatacgaagaaatccgaagactgatcaacaatccaagttggatgacaatgcactgaatgatgtgatgaaaagattgtttaagaattacaagaaatggtgcaaatatcttggtcgcaagagcagcctttggttgccaacaattcagcaggagatgcaacaacgaaaattactgtatatgggcttgtaccttctcatttggggtgaagctgcaaacttgcgttttatgccagagtgcatttgctacatatatcatcatatggcatttgaaatgtatggtatgttagctggaaatgtcagtgccttgacgggtgaatatgtgaagccggcctatggtggtgagaaagaagcctttctgaagaaagttgttacaccgatttaccataccatagcaaaggaagctgaaaggagcaaaagagagaaagggaatcattctgagtggagaaactatgatgatcttaatgagtacttctggtctgctgactgctttcggcttggttggcctatgcgagctgatgctgacttcttttgtcagcctgatgaaagaaatgaaagcacaaggatcagcaaacagaagggaaaggtcaacttcgttgagctacgctcattttggcacatattcagaagttttgacagactctggagcttctttattttagctcttcaggttatgataattctcgcttgggacggaggttcactagccagtatttttgattatgctgttttcaagaaggttttgagtatctttatcacttctgctatactaaatcttggacaagctacacttgatattatctttaattggaaggccagacgaacgatggaatttgcagttaagctgagatatgtnn

SEQ ID NO: 6298 - DNA, 1839 bp, Zea Mays
  misc_feature (1838)..(1839): n is a, c, g, or t
atcacctcccacgcgcggaggtagccgccgagcagctcgccgccgtccatccagaggctcccgccgagggtttcctcgacgcggctcttgcgcgtctaccgtacctttcccatgcgcgcgccaccaaaagctcggtgctggatttctgaatcttcaagcttgggctagctgcctagcttcaaaacggggcctctatttccgttggttggttgaattgcctgacgtgattcgtctcagcatcatcaaattgttgtaccgagtgacaaggtttagggtggtgactgcaagtcaccgagatgacgtccttgtcacgcacgctgtctcggggcgggccgatgcagtcgccaggggctcgccgcatccaaaggacgcagactgctgtgaattttggtgagcccatgtttgacagcgaggtggtgccgtcgtcgcttgttgagattgcgcccatcctccgtgttgccaatgaggttgagatggccaaccctcgtgtcgcttatctctgccggttctatgcattcgaaaaggctcacaggttagatccgacttcaagtggtcgtggtgtccgacagttcaagacagctcttctgcagcggcttgaaagggagaacgagcccaccttgatgggaaggggacaaaagagtgatgcacgggaaatacagaccttctatcatagctattacaagaaatatattcaagcactccagaatgcttctgaccaactggatcgtgctcaactaaccaaagcctaccagactgctgctattctgtttgaagttttaaaagcagttacacaacaacatgctgttgaagttgatcatgagatattggaagctgctgataaggttaaagagaaaacgaagatctatctcccttttaatattctccctcttgatccagacagtggcaatcaggcaatcatgaaatttcctgagacagatagtgtttcaaatcagagggaacatttgattttacttcttgctaacatacatatacgaagaaatccgaagactgatcaacaatccaagttggatgacaatgcactgaatgatgtgatgaaaagattgtttaagaattacaagaaatggtgcaaatatcttggtcgcaagagcagcctttggttgccaacaattcagcaggagatgcaacaacgaaaattactgtatatgggcttgtaccttctcatttggggtgaagctgcaaacttgcgttttatgccagagtgcatttgctacatatatcatcatatggcatttgaaatgtatggtatgttagctggaaatgtcagtgccttgacgggtgaatatgtgaagccggcctatggtggtgagaaagaagcctttctgaagaaagttgttacaccgatttaccataccatagcaaaggaagctgaaaggagcaaaagagagaaagggaatcattctgagtggagaaactatgatgatcttaatgagtacttctggtctgctgactgctttcggcttggttggcctatgcgagctgatgctgacttcttttgtcagcctgatgaaagaaatgaaagcacaaggatcagcaaacagaagggaaaggtcaacttcgttgagctacgctcattttggcacatattcagaagttttgacagactctggagcttctttattttagctcttcaggttatgataattctcgcttgggacggaggttcactagccagtatttttgattatgctgttttcaagaaggttttgagtatctttatcacttctgctatactaaatcttggacaagctacacttgatattatctttaattggaaggccagacgaacgatggaatttgcagttaagctgagatatgtnn

SEQ ID NO: 6299 - DNA, 2086 bp, Zea Mays
  misc_feature (2085)..(2086): n is a, c, g, or t
cgtcgtccccaacaccgcttcgcctcgaccgcgatgatcacctcccacgcgcggaggtagccgccgagcagctcgccgccgtccatccagaggctcccgccgagggtttcctcgacgcggctcttgcgcgtctaccgtacgtaagtacgttggtcgcgtggttttcactcgagttcctgcggattggtgcgcgcgctacccgtgtggccgtgtccccgactccacatgagcgagctttcccatgcgcgcgccaccaaaagctcggtgctggatttctgaatcttcaagcttgggctagctgcctagcttcaaaacggggcctctatttccgttggttggttgaattgcctgacgtgattcgtctcagcatcatcaaattgttgtaccgagtgacaaggtttagggtggtgactgcaagtcaccgagatgacgtccttgtcacgcacgctgtctcggggcgggccgatgcagtcgccaggggctcgccgcatccaaaggacgcagactgctgtgaattttggtgagcccatgtttgacagcgaggtggtgccgtcgtcgcttgttgagattgcgcccatcctccgtgttgccaatgaggttgagatggccaaccctcgtgtcgcttatctctgccggttctatgcattcgaaaaggctcacaggttagatccgacttcaagtggtcgtggtgtccgacagttcaagacagctcttctgcagcggcttgaaagggagaacgagcccaccttgatgggaaggggacaaaagagtgatgcacgggaaatacagaccttctatcatagctattacaagaaatatattcaagcactccagaatgcttctgaccaactggatcgtgctcaactaaccaaagcctaccagactgctgctattctgtttgaagttttaaaagcagttacacaacaacatgctgttgaagttgatcatgagatattggaagctgctgataaggttaaagagaaaacgaagatctatctcccttttaatattctccctcttgatccagacagtggcaatcaggcaatcatgaaatttcctgagatccaagctgctgcttccgctcttcgcaatacaaggggtcttccatggcctaaaacttatgagcataaagttaacgaggacctcttggattggctgcaagctatgtttggctttcagacagatagtgtttcaaatcagagggaacatttgattttacttcttgctaacatacatatacgaagaaatccgaagactgatcaacaatccaagttggatgacaatgcactgaatgatgtgatgaaaagattgtttaagaattacaagaaatggtgcaaatatcttggtcgcaagagcagcctttggttgccaacaattcagcaggagatgcaacaacgaaaattactgtatatgggcttgtaccttctcatttggggtgaagctgcaaacttgcgttttatgccagagtgcatttgctacatatatcatcatatggcatttgaaatgtatggtatgttagctggaaatgtcagtgccttgacgggtgaatatgtgaagccggcctatggtggtgagaaagaagcctttctgaagaaagttgttacaccgatttaccataccatagcaaaggaagctgaaaggagcaaaagagagaaagggaatcattctgagtggagaaactatgatgatcttaatgagtacttctggtctgctgactgctttcggcttggttggcctatgcgagctgatgctgacttcttttgtcagcctgatgaaagaaatgaaagcacaaggatcagcaaacagaagggaaaggtcaacttcgttgagctacgctcattttggcacatattcagaagttttgacagactctggagcttctttattttagctcttcaggttatgataattctcgcttgggacggaggttcactagccagtatttttgattatgctgttttcaagaaggttttgagtatctttatcacttctgctatactaaatcttggacaagctacacttgatattatctttaattggaaggccagacgaacgatggaatttgcagttaagctgagatatgtnn

SEQ ID NO: 6300 - DNA, 2000 bp, Zea Mays
  misc_feature (1999)..(2000): n is a, c, g, or t
ctgcctgccaagtcccaacacaaaaccctctcgtcgtccccaacaccgcttcgcctcgaccgcgatgatcacctcccacgcgcggaggtagccgccgagcagctcgccgccgtccatccagaggctcccgccgagggtttcctcgacgcggctcttgcgcgtctaccgtacgtaagtacgttggtcgcgtggttttcactcgagttcctgcggattggtgcgcgcgctacccgtgtggccgtgtccccgactccacatgagcgagctttcccatgcgcgcgccaccaaaagctcggtgctggatttctgaatcttcaagcttgggctagctgcctagcttcaaaacggggcctctatttccgttggttggttgaattgcctgacgtgattcgtctcagcatcatcaaattgttgtaccgagtgacaaggtttagggtggtgactgcaagtcaccgagatgacgtccttgtcacgcacgctgtctcggggcgggccgatgcagtcgccaggggctcgccgcatccaaaggacgcagactgctgtgaattttggtgagcccatgtttgacagcgaggtggtgccgtcgtcgcttgttgagattgcgcccatcctccgtgttgccaatgaggttgagatggccaaccctcgtgtcgcttatctctgccggttctatgcattcgaaaaggctcacaggttagatccgacttcaagtggtcgtggtgtccgacagttcaagacagctcttctgcagcggcttgaaagggagaacgagcccaccttgatgggaaggggacaaaagagtgatgcacgggaaatacagaccttctatcatagctattacaagaaatatattcaagcactccagaatgcttctgaccaactggatcgtgctcaactaaccaaagcctaccagactgctgctattctgtttgaagttttaaaagcagttacacaacaacatgctgttgaagttgatcatgagatattggaagctgctgataaggttaaagagaaaacgaagatctatctcccttttaatattctccctcttgatccagacagtggcaatcaggcaatcatgaaatttcctgagacagatagtgtttcaaatcagagggaacatttgattttacttcttgctaacatacatatacgaagaaatccgaagactgatcaacaatccaagttggatgacaatgcactgaatgatgtgatgaaaagattgtttaagaattacaagaaatggtgcaaatatcttggtcgcaagagcagcctttggttgccaacaattcagcaggagatgcaacaacgaaaattactgtatatgggcttgtaccttctcatttggggtgaagctgcaaacttgcgttttatgccagagtgcatttgctacatatatcatcatatggcatttgaaatgtatggtatgttagctggaaatgtcagtgccttgacgggtgaatatgtgaagccggcctatggtggtgagaaagaagcctttctgaagaaagttgttacaccgatttaccataccatagcaaaggaagctgaaaggagcaaaagagagaaagggaatcattctgagtggagaaactatgatgatcttaatgagtacttctggtctgctgactgctttcggcttggttggcctatgcgagctgatgctgacttcttttgtcagcctgatgaaagaaatgaaagcacaaggatcagcaaacagaagggaaaggtcaacttcgttgagctacgctcattttggcacatattcagaagttttgacagactctggagcttctttattttagctcttcaggttatgataattctcgcttgggacggaggttcactagccagtatttttgattatgctgttttcaagaaggttttgagtatctttatcacttctgctatactaaatcttggacaagctacacttgatattatctttaattggaaggccagacgaacgatggaatttgcagttaagctgagatatgtnn

SEQ ID NO: 6301 - DNA, 307 bp, Zea Mays
cccatttccccacctccctcccagtcccaacgtcccacagcagtaccccacatctctctctctctctcctccctgcctgccaagtcccaacacaaaaccctctcgtcgtccccaacaccgcttcgcctcgaccgcgatgatcacctcccacgcgcggaggtagccgccgagcagctcgccgccgtccatccagaggctcccgccgagggtttcctcgacgcggctcttgcgcgtctaccgtacgttggtttgggtcgcgtactcgtgttattatgttatgcgaacgacgaggttcaagttgtagaag

SEQ ID NO: 6302 - DNA, 2044 bp, Zea Mays
cactcaggtactgcacatctttcagtggctacagctagaggccaccacagcaaactgacaaaccgcagcaacagatccatttctgcggccagtgctctcctatctcctccattcccctcgtctcttcgccatggtcgccatctccgctcacctcatcgccactcttccgtctctcccgacactccggccctgtcctcgccggcttcagccgagcgccttcgctacatccgaggccccgcaccgagcccccgcccccggcgtcgccctccgtggctgcaggcgttgcagcccttccgtaagaagatttcatgggtttcagaatgcaataagctttgggaaggagcacaacaggtgtcaccgtgttccttcttgtcctctgggtcgttggatcggtcgttacctggattgtgggcttggtctttggcgctgcgaaatcttagaaggtggatgttttcgctgcaagatcattccttctgctgcgttgcacgaatgggcgaccaacagggaggtaggcaaccaagctagcacttctgcattgtaggcaacgtcccgttcctatacaacactatagctgttgcacaaagttagactttttgagctatattttaattcagaaaataaacaactgttgataatagaaggtgtatgccctgttcctatgcaacaccacagctgccacacatggacgtcactgtagcagaaaccttccgctgagctctggagcggaagaagagagaaatgtgcacagagcaagcccggagtgtcaggacgccaaaacagtttccatggcactgctcatgaatcagaccaccccaatccattcgtgccatcgctgtcgtcacgactcacgagcgagcgtgatcgcgtctaacggcccgaatcatcaagcgctggcagtcacgggagaaataaaaactcgcccgcccatccggcaggccgtcagtccggctgccaggcgcgccagcgcggtggaccagcgcgcggccgatgcagtcatgcagaccccccgcgtccggcaacgtcgcgcgggcgcggcacgtgagatccacaccgcacccgcgctccccaacggctatattcgacccgtccccaccaaaaccccccgcatttaaatccgccgcgatctcccgccgctctcccccccgcatcccatgcccaccaccactcgaccaaggcacccagccctccttccctcagcgcttgccggccgacgcactgcttggtgcctgtctgcctttctccttccattgacagccgtcgatggcgacgccgcctcagcagaagcagcagccgcagcaggtgtcggtgcagcacgtgggcagggcgtcctcggacgagctcctccgcaagttcgcggacccggacgcgccccgcgccgccgccaccccgccgcgccgcagcctcaagcgctcgtcccgccgcgtggcgtcggggctctccgcgcgggactccgacgcgtcggcggccgcgggcgtcacggccgcggcgctggcggcgcccaagcggcggcggagcatcggcgggtccaccggcctgctcctgccgaccgcgtccgcgaggaaggcccgggcacgccgcgcgcgcgccgacgacgccgcgggcatcggcctcctcctggccgcgctggagcggacgtggaggaagacggtggcgggggcgtccaagatgttcgtggagaggcaccggaccaaccacgtcctgctcatcagcgacatggtctgagcgcagaccctgctggcgctccctctctcgtctgctcgggtttgatcgctgagatgttgttttattcggttggattcagcattcgttttagaagcaggtagcagaataaatcggctggcgcctggcggtgcagtccaggttcctcgttccctccctgccacttgccactgtgatttcccttgtgtttcgtttgtgatttcttttttttttgggttctctctctctctctctctggtggcgaatcattgtgccagcgaccacgttgtaaattgaagtttgcaaaccacgttaccagcgttgtgctaagaaatggatttacacc

SEQ ID NO: 6303 - DNA, 2125 bp, Zea Mays
gcaaaatcatgttaactcatcaatgatcacatgaaataaattatacatctcctgaactgaaacaggaggaaatcaggtcactcaggtactgcacatctttcagtggctacagctagaggccaccacagcaaactgacaaaccgcagcaacagatccatttctgcggccagtgctctcctatctcctccattcccctcgtctcttcgccatggtcgccatctccgctcacctcatcgccactcttccgtctctcccgacactccggccctgtcctcgccggcttcagccgagcgccttcgctacatccgaggccccgcaccgagcccccgcccccggcgtcgccctccgtggctgcagcaggcgttgcagcccttccgtaagaagatttcatgggtttcagaatgcaataagctttgggaaggagcacaacaggtgtcaccgtgttccttcttgtcctctgggtcgttggatcggtcgttacctggattgtgggcttggtctttggcgctgcgaaatcttagaaggtggatgttttcgctgcaagatcattccttctgctgcgttgcacgaatgggcgaccaacagggaggtaggcaaccaagctagcacttctgcattgtaggcaacgtcccgttcctatacaacactatagctgttgcacaaagttagactttttgagctatattttaattcagaaaataaacaactgttgataatagaaggtgtatgccctgttcctatgcaacaccacagctgccacacatggacgtcactgtagcagaaaccttccgctgagctctggagcggaagaagagagaaatgtgcacagagcaagcccggagtgtcaggacgccaaaacagtttccatggcactgctcatgaatcagaccaccccaatccattcgtgccatcgctgtcgtcacgactcacgagcgagcgtgatcgcgtctaacggcccgaatcatcaagcgctggcagtcacgggagaaataaaaactcgcccgcccatccggcaggccgtcagtccggctgccaggcgcgccagcgcggtggaccagcgcgcggccgatgcagtcatgcagaccccccgcgtccggcaacgtcgcgcgggcgcggcacgtgagatccacaccgcacccgcgctccccaacggctatattcgacccgtccccaccaaaaccccccgcatttaaatccgccgcgatctcccgccgctctcccccccgcatcccatgcccaccaccactcgaccaaggcacccagccctccttccctcagcgcttgccggccgacgcactgcttggtgcctgtctgcctttctccttccattgacagccgtcgatggcgacgccgcctcagcagaagcagcagccgcagcaggtgtcggtgcagcacgtgggcagggcgtcctcggacgagctcctccgcaagttcgcggacccggacgcgccccgcgccgccgccaccccgccgcgccgcagcctcaagcgctcgtcccgccgcgtggcgtcggggctctccgcgcgggactccgacgcgtcggcggccgcgggcgtcacggccgcggcgctggcggcgcccaagcggcggcggagcatcggcgggtccaccggcctgctcctgccgaccgcgtccgcgaggaaggcccgggcacgccgcgcgcgcgccgacgacgccgcgggcatcggcctcctcctggccgcgctggagcggacgtggaggaagacggtggcgggggcgtccaagatgttcgtggagaggcaccggaccaaccacgtcctgctcatcagcgacatggtctgagcgcagaccctgctggcgctccctctctcgtctgctcgggtttgatcgctgagatgttgttttattcggttggattcagcattcgttttagaagcaggtagcagaataaatcggctggcgcctggcggtgcagtccaggttcctcgttccctccctgccacttgccactgtgatttcccttgtgtttcgtttgtgatttcttttttttttgggttctctctctctctctctctggtggcgaatcattgtgccagcgaccacgttgtaaattgaagtttgcaaaccacgttaccagcgttgtgctaagaaatggatttacacc

SEQ ID NO: 6304 - DNA, 1775 bp, Zea Mays
cgagtgccgacggccggtcggccgccagggcgcgccgctcgagctaccagacgatttcggctgataaatttggacgcgcgggcgggagaaggggagaaaacgcggagccacaccccgtgtcgaaaccccagggcgccaagcttcccgcgggccaccgccgctgccgatgccggtgccgaagccgatggagaggaagcaagccgcctacagcaacctcgatgagaggtacgcgatccagggggagaagtaccaggggcagcagtacagccatatctacttcacgcgcctccaccacatgcggaatctcctccacgccctcgtcccctcctggaagccgcaactccctgtcactacagtgttaggacttgaagaaggaaaggattgcataattgttggaactttatataagcacatgaagttgaagccttcaattcttgatgaatatgccaaagagatgaaagcggaagagttacacttgcaggagccatacctccagcagcattcgtgactggggttgtagtggctctccatgggaaggaaacaagtgctggcaattttcttgtggaagatgttcttgaggctggtcttccaccccaaagtgcattgtctagcgcagaagaagacaagtatgtagtattcatatcagggctaagtgtaggaagtgacacattcaatcctctacagttccaacttcttattgaccatgtcacaggacatctgggtgacgagaatgagcaatccatagcatcaaatatagtacgcattgtggttgttgggaattcagtgcatatttcaccaaggtttgtcaatggtcagacggtaccatcaaaagatcaatcaaggatagcagaacctattaaggaactggatataatgcttacccagctcgtggcttcgttgcctgtagatatgatgccggggtgtcatgatccggcaaatttttctttgcctcagcagcctctgcacagatgccttttctctggggcatccacctacaacactttttcgtcttgttcaaatccccatcaattcgagcttgacagtgtccagtttcttggaacatctggtcagaacatagatgacctgtacaagtactctgatgctaaagacaagctggaattcatggaaagaacactgagatggcgccatcttgctcctactgctccaaatagcctaggctgttatccatacacagacaaggatcctttccttgttgaaagttgcccgcacgtctactttgttgggaatcaagataaatatgaaactcgactgttggaagggcaagaaaaacagaaagtgaggctaatctccatcccaaggttctcggagagtggagttgctgtaatgctcaatctgaggaacttggaatgcagcacattgagtttctcaacaagctttgatgcctgaatatgctctgatgtttggaagtgcagaagacttcaatgtacaatgttgagcggcatgaccacgagggtgtatttgtactagagcagttctttattagatgtatgatgatgaccttaggttttgccaagtagatcttttagaatgcagatgctgtaacttgtaaccacaaccgaaactgaggctggaccgagtgtagcgtttaacaatcgagttggtgctcatgcctcgttttgcaatcacaatcagcaggcacgtttgtcagatgtgctactcttttatcatcatttctgtgcgtctgtaatgaacactcgggccaaatatttggagtaaaaacatcaactcaccaggcggtagttgattgaacgatc

SEQ ID NO: 6305 - DNA, 689 bp, Zea Mays
caagggttccagcggagatcgctgccgcccacgagcgccgggtgtcggagaccacttgacttcggggccaattggccatacccgatccaacagagaacaaaacgcgctgctcgatgagccaactcaatttggtatcttcgaatcgaaggtcgtgtggagaaacgatgaacacgagaagagaacaaaatctgtacatggcgagcgcatcagtgacagtgtacttgaggtgcatctctcaaggttacattcagagtggtttccatttgttgccacccaagtccaactttgctgccttgcatcatggctacgaattcggcgtagtcaatctgaccgtcctgaaaagcagatgcaagcaaggaacatcagtgcatgcattagttaaacagcacaataaaactcggcataggcactgttactacctggtagtcccaacaactgtatcgtggttttcaccatatatttaactctgtaacgtactcctatttactttctcctaccctttatttatggttgctgaaatcgacagctgtgggttaggtgtgactatgtggttgatgcccagacaccaaaggtgtttatatattctataagtaaaatgtcattcaggataaggaaccattgcaaccttttcctacaaagcaaccccacatgactcgaaaggtctagaatgaggttgacatgtttaggaa

SEQ ID NO: 6306 - DNA, 949 bp, Zea Mays
ccaacgacaggccaagccagccggctgcatcccagaccagagccttctctcgtcctctcccatttaaccaccatcggcaccaccactgccactacgcgcgaggcacggcacggcacggcacgaccgagctccagtctgcccccgcccccatccgcaccgcacgtccgccttggcccggcaaatggcgtcgccggcgcggcggctcctgcagaccaactccgtgcagtacccgacgctccccgcggccgacccgccgagcccgctggccgtcgactccgacgtggtggtcatcctcgccgcgctcctatgcgcgctcatctgcgtcgtggggctggcctccgtggcccggtgcgcgcgctcccgcgccgcgcccgccgccgccaggagggggctcaggaagaaggcgctcagggcgctgccgagcctcgcgtacgaggacgccgtggcggcccgggccggggacggggcggcggaggtcctggcggagtgcgccatctgcctctcggagttcgcgccacgggaggaggtccgcgtgctgccgcagtgcggccacgccttccacgtcgcctgcatcgacacctggctcgccgcccactcctcctgtccctcgtgccgccgcgtcctcgtcgtcggcgacgccgccagtaagcgcccgccccagcctaagcgctgccgcaagtgcgaggcggccatggacgaaccctcctcgtcgtccggttccgccggcgacacggctaccggttcctgacccttctcacgagtgccacagccacgccgccgccagtttctagcaactgggccggcaagcttagctccactggaattccgtcatcatcaggtgccgccggtttctagcaactgggttggcaatctttagctccactccagttcattccaaggattcgaacgttgatgctgtaaattgcaggtttgttgtttcgaagataca

SEQ ID NO: 6307 - DNA, 2199 bp, Zea Mays
ccttggcagaatcgcagcgcagcgcacacgcacggacggccccgagggtttagagcccaacttctctcttcacatcgccgcgaagccagctccccgatgcgatctggccgagggaagatggcgactccgccgccgccaatccgccccgccgccgcgctcctcctcctcgtcctcgctggcgtcctcgcctccgccgcgagcgccgatctcgtcatctccaaggcagatcggagggttgatctgacctcgcatatcgttcgcgtcctcgcttccctcaaggctgaaaatgttggaccagaccctgtctctcaagttttactgccttttcccaatattcaagccaagaacttggcagctattagagcattcggcagtgaagggaaagtgaagggtcaaagtactgttctgccaattgaagttgttcaaccttctggagctcccccggagctgacattcttttcagcattgttgcccaaacctttggaaaaaggaaagactctgtacttggatgttctgactgtgttcacacactctcttcaaccattcccagaagaaatcactcaagccgaagcacaacttgttgtctatcaggatagtgctcactatctgtcaccttaccctgttaaggctcagacacttgctatcagattgcctggtggaagggttgaatcatacacaaggcatccaaacgcaaaacttgtggattcagaactgaaatatggaccatttcatgaccttcccccgttctcctacttacctgtgattgtgcattttgagaacaacaatccttttgcagttgcaaaggaagttataagggagattgagatatctcactggggaaatgtacagattacggaacactacaacattgctcatggtggtgccagactcaagggtgaattttccaggattgattatcaatctagaccttacgtaaggggtgtttcatcttttagacatcttattgcaaaactgcctccaagggcacactctatttattaccgagatgagattggtaatatttccacatcacatttgtggagtgattctatgaagaaccaaggtttccattgtttggtgggtggcaaacaaccttcactgttggttatggtttaccacttgaagactttgttttctattctgatggaaagagatttctcaatatcacatttggttctccattggaggaaattctcattgaaaagcttatcgtaaaggttgttctacctgaagggtcaaaggatatcgaagtttcagctccctttccaacacagcagcagcaagaggttaagtattcacaccttgacattgtcggaagaccagttgttgtcttggagaaacctgatgttattccagagcataatttgtatttccaggtttactacagattcaacaacatatccttgctcagagagccgttgatgctgattactggtttcttcctcctgtttgtggcctgtattgtttacatgcgtactgatatgtcaatatccaagagctctccttcctacttggccaagctgcaatgggatgaggtgcaagcaactgttcagaaaatccagggtatctttgagcaatgcttagcagttcatgataaactggaggcctcattgcgggatttgtctaggacaggagacattcagtcttgcaaggcagctcgtaaagctgctgacacgcagtttaaggagctatcgaaagatctgaagccactgttggcgactctacagtcatctccccagtcttatcagatattgccaaaggtagaggacttgatcgtaaaggagagagagatgcaggagaagctcatgacaaggcattccaccgttgtcgacagctttgagaagaagctgcgcgggcaagatgtagagaacaggattgctttgcagcagcagaaaattgctgccctgaggcaggaggttgaatctcttttagagtacattagtgagatttgagcaaatgagtgctgctgtggcgtgatacatctttagcgattagactgcctttgtttggtttagggtttaccccaatattgaaatctactactctgagattgtgtcggtaaccatctagtttcccagttgagagacctggaagttgcaatgaccttgtaacatgataatcagtgtaattctggagctgactaaatttttgcatttaatatcaatatcacaggaaccgtcatcttttggactgaatgtg

SEQ ID NO: 6308 - DNA, 2365 bp, Zea Mays
ccttggcagaatcgcagcgcagcgcacacgcacggacggccccgagggtttagagcccaacttctctcttcacatcgccgcgaagccagctccccgatgcgatctggccgagggaagatggcgactccgccgccgccaatccgccccgccgccgcgctcctcctcctcgtcctcgctggcgtcctcgcctccgccgcgagcgccgatctcgtcatctccaaggcagatcggagggttgatctgacctcgcatatcgttcgcgtcctcgcttccctcaaggctgaaaatgttggaccagaccctgtctctcaagttttactgccttttcccaatattcaagccaagaacttggcagctattagagcattcggcagtgaagggaaagtgaagggtcaaagtactgttctgccaattgaagttgttcaaccttctggagctcccccggagctgacattcttttcagcattgttgcccaaacctttggaaaaaggaaagactctgtacttggatgttctgactgtgttcacacactctcttcaaccattcccagaagaaatcactcaagccgaagcacaacttgttgtctatcaggatagtgctcactatctgtcaccttaccctgttaaggctcagacacttgctatcagattgcctggtggaagggttgaatcatacacaaggcatccaaacgcaaaacttgtggattcagaactgaaatatggaccatttcatgaccttcccccgttctcctacttacctgtgattgtgcattttgagaacaacaatccttttgcagttgcaaaggaagttataagggagattgagatatctcactggggaaatgtacagattacggaacactacaacattgctcatggtggtgccagactcaagggattgattatcaatctagaccttacgtaaggggtgtttcatcttttagacatcttattgcaaaactgcctccaagggcacactctatttattaccgagatgagattggtaatatttccacatcacatttgtggagtgattctatgaagacccaactggaaatagaaccaaggtttccattgtttggtgggtggcaaacaaccttcactgttggttatggtttaccacttgaagactttgttttctattctgatggaaagagatttctcaatatcacatttggttctccattggaggaaattctcattgaaaagcttatcgtaaaggtacgtgtgaatgtgcatcaaacgaataaattatatttcgtttgtttaaggctacatggcatactttgcagatttgtggccattgtgtttggtattcattataaactgccatctttatttgtgtcgtgatcataggaatgtggatagcaagaataatgacagggttgttctacctgaagggtcaaaggatatcgaagtttcagctccctttccaacacagcagcagcaagaggttaagtattcacaccttgacattgtcggaagaccagttgttgtcttggagaaacctgatgttattccagagcataatttgtatttccaggtttactacagattcaacaacatatccttgctcagagagccgttgatgctgattactggtttcttcctcctgtttgtggcctgtattgtttacatgcgtactgatatgtcaatatccaagagctctccttcctacttggccaagctgcaatgggatgaggtgcaagcaactgttcagaaaatccagggtatctttgagcaatgcttagcagttcatgataaactggaggcctcattgcgggatttgtctaggacaggagacattcagtcttgcaaggcagctcgtaaagctgctgacacgcagtttaaggagctatcgaaagatctgaagccactgttggcgactctacagtcatctccccagtcttatcagatattgccaaaggtagaggacttgatcgtaaaggagagagagatgcaggagaagctcatgacaaggcattccaccgttgtcgacagctttgagaagaagctgcgcgggcaagatgtagagaacaggattgctttgcagcagcagaaaattgctgccctgaggcaggaggttgaatctcttttagagtacattagtgagatttgagcaaatgagtgctgctgtggcgtgatacatctttagcgattagactgcctttgtttggtttagggtttaccccaatattgaaatctactactctgagattgtgtcggtaaccatctagtttcccagttgagagacctggaagttgcaatgaccttgtaacatgataatcagtgtaattctggagctgactaaatttttgcatttaatatcaatatcacaggaaccgtcatcttttggactgaatgtg

SEQ ID NO: 6309 - DNA, 2464 bp, Zea Mays
ccttggcagaatcgcagcgcagcgcacacgcacggacggccccgagggtttagagcccaacttctctcttcacatcgccgcgaagccagctccccgatgcgatctggccgagggaagatggcgactccgccgccgccaatccgccccgccgccgcgctcctcctcctcgtcctcgctggcgtcctcgcctccgccgcgagcgccgatctcgtcatctccaaggcagatcggagggttgatctgacctcgcatatcgttcgcgtcctcgcttccctcaaggctgaaaatgttggaccagaccctgtctctcaagttttactgccttttcccaatattcaagccaagaacttggcagctattagagcattcggcagtgaagggaaagtgaagggtcaaagtactgttctgccaattgaagttgttcaaccttctggagctcccccggagctgacattcttttcagcattgttgcccaaacctttggaaaaaggaaagactctgtacttggatgttctgactgtgttcacacactctcttcaaccattcccagaagaaatcactcaagccgaagcacaacttgttgtctatcaggatagtgctcactatctgtcaccttaccctgttaaggctcagacacttgctatcagattgcctggtggaagggttgaatcatacacaaggcatccaaacgcaaaacttgtggattcagaactgaaatatggaccatttcatgaccttcccccgttctcctacttacctgtgattgtgcattttgagaacaacaatccttttgcagttgcaaaggaagttataagggagattgagatatctcactggggaaatgtacagattacggaacactacaacattgctcatggtggtgccagactcaagggtgaattttccaggattgattatcaatctagaccttacgtaaggggtgtttcatcttttagacatcttattgcaaaactgcctccaagggcacactctatttattaccgagatgagattggtaatatttccacatcacatttgtggagtgattctatgaagacccaactggaaatagaaccaaggtttccattgtttggtgggtggcaaacaaccttcactgttggttatggtttaccacttgaagactttgttttctattctgatggaaagagatttctcaatatcacatttggttctccattggaggaaattctcattgaaaagcttatcgtaaaggtacgtgtgaatgtgcatcaaacgaataaattatatttcgtttgtttaaggctacatggcatactttgcagatttgtggccattgtgtttggtattcattataaactgccatctttatttgtgtcgtgatcataggaatgtggatagcaagaataatgacagggtattatgtactattaaatttccatattccatgcctttgcgtcagttgtctttgccccttgtatgagtatctttgttgttgaacaggttgttctacctgaagggtcaaaggatatcgaagtttcagctccctttccaacacagcagcagcaagaggttaagtattcacaccttgacattgtcggaagaccagttgttgtcttggagaaacctgatgttattccagagcataatttgtatttccaggtttactacagattcaacaacatatccttgctcagagagccgttgatgctgattactggtttcttcctcctgtttgtggcctgtattgtttacatgcgtactgatatgtcaatatccaagagctctccttcctacttggccaagctgcaatgggatgaggtgcaagcaactgttcagaaaatccagggtatctttgagcaatgcttagcagttcatgataaactggaggcctcattgcgggatttgtctaggacaggagacattcagtcttgcaaggcagctcgtaaagctgctgacacgcagtttaaggagctatcgaaagatctgaagccactgttggcgactctacagtcatctccccagtcttatcagatattgccaaaggtagaggacttgatcgtaaaggagagagagatgcaggagaagctcatgacaaggcattccaccgttgtcgacagctttgagaagaagctgcgcgggcaagatgtagagaacaggattgctttgcagcagcagaaaattgctgccctgaggcaggaggttgaatctcttttagagtacattagtgagatttgagcaaatgagtgctgctgtggcgtgatacatctttagcgattagactgcctttgtttggtttagggtttaccccaatattgaaatctactactctgagattgtgtcggtaaccatctagtttcccagttgagagacctggaagttgcaatgaccttgtaacatgataatcagtgtaattctggagctgactaaatttttgcatttaatatcaatatcacaggaaccgtcatcttttggactgaatgtg

SEQ ID NO: 6310 - DNA, 447 bp, Zea Mays
gaaaagatgtagaggacttgatcgtaaaggagagagagatgcaggagaagctcatgacaaggcattccaccgttgtcgacagctttgagaagaagctgcgcgggcaagatgtagagaacaggattgctttgcagcagcagaaaattgctgccctgaggcaggaggttgaatctcttttagagtacattagtgagatttgagcaaatgagtgctgctgtggcgtgatacatctttagcgattagactgcctttgtttggtttagggtttaccccaatattgaaatctactactctgagattgtgtcggtaaccatctagtttcccagttgagagacctggaagttgcaatgaccttgtaacatgataatcagtgtaattctggagctgactaaatttttgcatttaatatcaatatcacaggaaccgtcatcttttggactgaatgtg

SEQ ID NO: 6311 - DNA, 3014 bp, Zea Mays
gttccgctcgctcgcccgccaccgagagacgacactctacgtgtgtgcctgcgagagcgagagcgcaccagcagagcagacagcttcctctgcggcctgctggtcgcttcgcttcgctccagtccagggcaaaggacggcacatggcggggggcgggggcggccgggacctgccgtcgacgccgacgtgggcggtggccctggtgtgcgccgtcatcgtgctcgtctccgtcgccatggagcatggcctccacaagctcggccactggttccatacgcggcagaagaaggccatgcgggaggccctggagaagatcaaagcagagttgatgctgatgggcttcatctcgctgctcctcgccgtggggcagacgcccatctccaagatatgcatcccggccaaggctggcagcatcatgctgccgtgcaagccgccgaaaggcgccgccgccgccgccgacgacgacaagagcgacggccgccggagactcctctggtacccgccgtaccctggatacgatgagcccgggcaccaccgccgtttcctcgccggcgcggctccggacgacaactactgcagtgaccaaggcaaggtgtccctcatctcctcggccggcgtccaccagctgcacatcttcatcttcgtgctcgcggtgttccatatcgtctacagcgtcgccaccatggcgctggggcgtctcaaaatgaggaaatggaagaaatgggaatcggagaccaactccctggaataccagtacgcaaacgacccttcacggttccggttcacgcaccagacgtcgttcgtgaagcggcacctgggcctctcgagcacccctggagtgagatgggtcgtggcgttcttcaggcagttcttcgcgtccgtgaccaaggtggattacctgaccatgcggcaggggttcatcaactaccatctgtcgcccagcaccaagttcaacttccagcagtacatcaagcggtccttggaggacgacttcaaagtcgtcgttggcatcagtctcccgctgtggttcgtcgccatcttcactctcttgatcgatatcaagggattcggcacgcttgtctggatctcttttgtcccgctcgttatactcctgctagttggggccaagctggaggttgtcatcatggagatggccaaggagatacaggacaaggcgacggtcatcaagggggcgcctgtggtggagccaagtgacaggttcttctggtttaaccgccctggctgggtcctcttcctcatccacctcacgctcttccagaacgccttccagatggcgcatttcgtttggacactgctcaccccagacctgaagaaatgctaccacgagaggctgggcctgagcatcatgaaagttgcggtggggctggttctccaggtcctctgcagctacatcaccttcccgctctacgcgctcgtcacgcagatggggtcgcacatgaagaagaccatcttcgaggagcagacggccaaggcggtgatgaagtggcgcaagacggccaaggataaggtgcggcagcgggaggcggcaggcttcctcgacgtgctgacgagcgccgacaccacgccgagccacagccgcgcgacgtcgccgagccggggcaactcgccggtgcacctgctccacaagtacaggggcaggtcggaggaaccgcagagcgggccggcgtcgccggggcgggagctcggggacatgtacccggtggctgaccagcatcgcctgcacaggctggaccccgagaggatgaggcccgcctcgtccaccgccgtcaacattgacatcgctgatgccgatttttcttttagcatgcggtgacctgaccttgaacgaattctgtgtccttactcttgtatagggaagcaaaagcatagacggagaacataatgacacgttacgttagggaaagtttcgtttattcatcataaaatagaatacgtaataaactagtatctccctcttctctgtggaaaaaaaactgaactgagacccttacaatgtacagctgcaaaaaaaaatattaaaaaagaatagagcaatcgaaccaggatgaagctatacattggaaacaaccagtactcacactaacaagataggttatcagcaaatacattgttcttgtgaacagctattaggacagctgcactcatcatccacaggaccacaggctagtcagcttttgcacgaacccttctattgtgaacagctactaggaccactgacactgccattccaaccaaatacccagcaacggcaccataagagacacagattggccattcctacagaacatcaaagaaacagaatagtagcaatcagtcataactcataaggtccagaaaaggaatcgtcatcaatgtgacacttgaagataagatctatggttaagtacatgttatgagataaactcatttcttcttattataatgatacacacctctccttcatttttttttgaaaaaaaaagctaaggtaaactcataaaagggacatcaggatattgagaactccaaaggacaaaacacccaacagcacgttaggcaaaccaatgaattccatgtgcttgccttgcaccaaggagcctgcatatatcgtagccaggatattttgggacacgttcacactgcaactagccgtgtttggtattcttgcagcaaacaaaccagaccaacgcaggttcttgtatgttacctgcactgctgtgggcctccacattgcccaaaggcagaatacatgagtcggttctcaaaaaaacaaagtaaaattccatttcccctccatccaggtaatcaaacacgagttactgcatcccagtggcctggcttggcccttggtgcagggaaacaaacaagcccttagaacttgcatccctacatgtttgtgatccccatatgtttaccccagccaggccataaacacaagtatgtttcgtagagctgtttagtgtcatgttaaccatcaagtgtgcacaaacatatccatatgacctagcttttcc

SEQ ID NO: 6312 - DNA, 3007 bp, Zea Mays
atgggaagaattaatagctttggtagatgcccatgttctgagaaggctacagcttcctaatgcaaaattgttaatgtgtgtatcattacttgcaagcttacactcttcttgacattgcatctttcaaagggatatagaaatggattagctgcatgaaaaaaggcaatagaactcctaattctacagaactaggtcaatcgcagcaatctatgttggcctgcaaaaatattctctgccgtctagaatgcaagtgcctatgaatgggaaattttgaaatctaattgcttcagcttctagttgtgtagtcctgtaaatcgtgtaagctttttatatcaatacttgtgtcttgatggcagccttctctttcatttgccattatatgttcaccttttactcaaaaaacagggatacttacgtcaaagacatggttggggagagctctaatgatcgtaatgacagagcaattcgtgttgctgcacgttggtaccaaagtcatcttggtgagagcgtgaaggttctactgatcacaaatgacagagataacaaaaggaaagcgattgaagaaggccttaacgctgagacagttgagtcatatgtaagatcgcttgcacagcctggtttgcttgatttggttgttgttccaactagcggagatgtttctatggaagatgtagacgatcatagaccatcaaagaagaaagtaatctacaatgagcacaaacctatgtcagaaattacatctggtttgcggtgtggaatctaccatcaagggaagcttcgagttaatcgttacaatccgtttgaagcttatgttggaagcgagagcattggtgatgagattgttatccgtggccgctcaaatatgaacagggcctttgatggtgatatagttgctgttgagctcttgccacaagatcaatggcacgagtcaaagtcttttatagcagatgatgatgaagaagaagaagatgttcatttagtccctaatagtgctgatgatgctcctcggaacactaattccacacaatcaacagttggatcatcagctccttccatttctagtcgtccagttgggcgtgttatgggtataatcaagcgaaattggaattcgtactgtggatccttgcagccgatgcccatgcctgctggtagtgggggtgtcgctcatgctttatttgtttcaaaagatcgaagagttcctaagattcgaattcaaaccaggcagcttgagaatcttgtgaacaaaagaattgttgtcgcggttgattcatgggatgttttgtctcgatatccatcaggacactatgtacgaaccattggagatattggtgacaaagaaactgaaacagaggttgtcttaatagagaatgatatcaacaccaggcctttctctacacaagtccttgcttgtttgccacctttaccttggacattatcaccagaagatctggctaatcctaatagacaagacttacgccaagtgagagtctttagtgtggatccaccagatgtttgttcacttcgtgctgatgttgaacggttggcattctctgtcatttgggaaatgactccggatgctgatgttatatcaacgagatatacaaagagtgttatcaaatcttgtgctgcaatgtcttatgttgaagcccaggcaagaatggatgacagccgcttagttgatccactaactgtagacttgcggaacttaaattcattggcaaagatcatgcgacaacgccgttgtgaaagaggggctttgactcttgcttctgcagaagtaaaatttgagattgatagtgaaactcatgatcctcttgacataggaatttatcaaatccgtgaggcaaatcaaatgattgaagaatttatgttggctgcaaatgtttctgttgctgagaagattttgaagcatttccccttatgttcattgctaaggcgccatcctagcccaacaaaagagatgcttgagccattactccgtactgcctcttcgattggcctaaatctggacgtgtcatcctcaaaggcattagctgaatcacttgacaacgcaaagagcaatgacccatacttcaacaagcttattagaattttggcgactagatgcatgacacagtggagatttgaccttttctgaatattaccattatgggcttgctgcttctctttacactcatttcacttctcccattcgcagatatgcagatgttgttgttcatagattgctagctgcagctctgaatattgcaaagctcccaccaatctttcaggatggtccacaacttacaggcattgctgacaacctgaattacaggcacagaaatgcccagatggcaagcagagcatcagttgaactccacacccacatatatttcaagacaaggccaactgacactgaagctaggatagtaaagatcaaggcaaatggtttcatagtatttgtcccaaagtttggcatagaagggcccatctaccttactccgaagggcgacaaaggcggtgattgggttgttgacgaggtgcaccagagagtaaccaagcccggaacaaacatcagctatgctatcctccagactgtcaggattcatatggaggttgttgaacctcagcctcatcgcccaaagctgcaactcaccctgatatgaaaaatgtacagctgaattgtagcaacattgtagtgttttcccgggcctctcacacctccagctcactctttagttcaacattggtgtgattttcgatttgtaaaactaatcagtaatcaccacatggtcaagattttgtagtatcagatagttttttctcaatacatggggctctatgcatggaagcttagtttctgaatggtactcacaatagagaaaatatacgacattgtattctgtttatgtgaaagagatgtatgttaatgtgacaagggtggttattgtgcgcacgcaccattcatttatatgggaagcgaacattatttttgcatggccaaatcttgctgaacttttaccattac

SEQ ID NO: 6313 - DNA, 3115 bp, Zea Mays
cccagaccaggcaggcaggcagccagccactcacctcgaaccaaattattagccccgttgtcgccgccggctgctacacacacttctccgcgttcctcgccgccgccggagcaatcccgcggcgcactgtctaactcaccaccatgctgcagagcaagtcattcgtgaagaagacgaagcaaggccgcatccaaaaggtcgtcagggagcactacctccgcgacgacatctactgcggcttcgtcccctgcaccgcctgcgccgcagccgcggagcgaaagcttggcgccgctgccgccgccatcctcgtcgtcgacaccaacgtcgtgctccaccagatcgatttgctggagaacccggcgattgaggatgtcgtcctgctgtcagtggtgctggacgaggtgaagaataagaacctttcagttttcaacaggatcaaggcactgtgtatcaacaaagcacgtagattctatgttttcgccaacgagcagcatagggatacttacgtcaaagacatggttggggagagctctaatgatcgtaatgacagagcaattcgtgttgctgcacgttggtaccaaagtcatcttggtgagagcgtgaaggttctactgatcacaaatgacagagataacaaaaggaaagcgattgaagaaggccttaacgctgagacagttgagtcatatgtaagatcgcttgcacagcctggtttgcttgatttggttgttgttccaactagcggagatgtttctatggaagatgtagacgatcatagaccatcaaagaagaaagtaatctacaatgagcacaaacctatgtcagaaattacatctggtttgcggtgtggaatctaccatcaagggaagcttcgagttaatcgttacaatccgtttgaagcttatgttggaagcgagagcattggtgatgagattgttatccgtggccgctcaaatatgaacagggcctttgatggtgatatagttgctgttgagctcttgccacaagatcaatggcacgagtcaaagtcttttatagcagatgatgatgaagaagaagaagatgttcatttagtccctaatagtgctgatgatgctcctcggaacactaattccacacaatcaacagttggatcatcagctccttccatttctagtcgtccagttgggcgtgttatgggtataatcaagcgaaattggaattcgtactgtggatccttgcagccgatgcccatgcctgctggtagtgggggtgtcgctcatgctttatttgtttcaaaagatcgaagagttcctaagattcgaattcaaaccaggcagcttgagaatcttgtgaacaaaagaattgttgtcgcggttgattcatgggatgttttgtctcgatatccatcaggacactatgtacgaaccattggagatattggtgacaaagaaactgaaacagaggttgtcttaatagagaatgatatcaacaccaggcctttctctacacaagtccttgcttgtttgccacctttaccttggacattatcaccagaagatctggctaatcctaatagacaagacttacgccaagtgagagtctttagtgtggatccaccagatgtttgttcacttcgtgctgatgttgaacggttggcattctctgtcatttgggaaatgactccggatgctgatgttatatcaacgagatatacaaagagtgttatcaaatcttgtgctgcaatgtcttatgttgaagcccaggcaagaatggatgacagccgcttagttgatccactaactgtagacttgcggaacttaaattcattggcaaagatcatgcgacaacgccgttgtgaaagaggggctttgactcttgcttctgcagaagtaaaatttgagattgatagtgaaactcatgatcctcttgacataggaatttatcaaatccgtgaggcaaatcaaatgattgaagaatttatgttggctgcaaatgtttctgttgctgagaagattttgaagcatttccccttatgttcattgctaaggcgccatcctagcccaacaaaagagatgcttgagccattactccgtactgcctcttcgattggcctaaatctggacgtgtcatcctcaaaggcattagctgaatcacttgacaacgcaaagagcaatgacccatacttcaacaagcttattagaattttggcgactagatgcatgacacaggctgtttatttctgcagtggagatttgaccttttctgaatattaccattatgggcttgctgcttctctttacactcatttcacttctcccattcgcagatatgcagatgttgttgttcatagattgctagctgcagctctgaatattgcaaagctcccaccaatctttcaggatggtccacaacttacaggcattgctgacaacctgaattacaggcacagaaatgcccagatggcaagcagagcatcagttgaactccacacccacatatatttcaagacaaggccaactgacactgaagctaggatagtaaagatcaaggcaaatggtttcatagtatttgtcccaaagtttggcatagaagggcccatctaccttactccgaagggcgacaaaggcggtgattgggttgttgacgaggtgcaccagagagtaaccaagcccggaacaaacatcagctatgctatcctccagactgtcaggattcatatggaggttgttgaacctcagcctcatcgcccaaagctgcaactcaccctgatatgaaaaatgtacagctgaattgtagcaacattgtagtgttttcccgggcctctcacacctccagctcactctttagttcaacattggtgtgattttcgatttgtaaaactaatcagtaatcaccacatggtcaagattttgtagtatcagatagttttttctcaatacatggggctctatgcatggaagcttagtttctgaatggtactcacaatagagaaaatatacgacattgtattctgtttatgtgaaagagatgtatgttaatgtgacaagggtggttattgtgcgcacgcaccattcatttatatgggaagcgaacattatttttgcatggccaaatcttgctgaacttttaccattac

SEQ ID NO: 6314 - DNA, 3944 bp, Zea Mays
cccagaccaggcaggcaggcagccagccactcacctcgaaccaaattattagccccgttgtcgccgccggctgctacacacacttctccgcgttcctcgccgccgccggagcaatcccgcggcgcactgtctaactcaccaccatgctgcagagcaagtcattcgtgaagaagacgaagcaaggccgcatccaaaaggtcgtcagggagcactacctccgcgacgacatctactgcggcttcgtcccctgcaccgcctgcgccgcagccgcggagcgaaagcttggcgccgctgccgccgccatcctcgtcgtcgacaccaacgtcgtgctccaccagatcgatttgctggagaacccggcgattgaggatgtcgtcctgctgtcagtggtgctggacgaggtgaagaataagaacctttcagttttcaacaggatcaaggcactgtgtatcaacaaagcacgtagattctatgttttcgccaacgagcagcatagtttcagcatgattgtatttctttttgaggaaaggggagtgcaaccgagtacggggaaacttacaaagaccagaatcggtgtcttaggcagaatgtgcctagcaactgaaacagctatcctattcagaacgcggatctctgaacaagaatgagtttcagcatgattgtattgatgaaatgtctttatccaatcaccatgaccgcacaattacttatcaaatagtttcatgggaagaattaatagctttggtagatgcccatgttctgagaaggctacagcttcctaatgcaaaattgttaatgtgtgtatcattacttgcaagcttacactcttcttgacattgcatctttcaaagggatatagaaatggattagctgcatgaaaaaaggcaatagaactcctaattctacagaactaggtcaatcgcagcaatctatgttggcctgcaaaaatattctctgccgtctagaatgcaagtgcctatgaatgggaaattttgaaatctaattgcttcagcttctagttgtgtagtcctgtaaatcgtgtaagctttttatatcaatacttgtgtcttgatggcagccttctctttcatttgccattatatgttcaccttttactcaaaaaacagggatacttacgtcaaagacatggttggggagagctctaatgatcgtaatgacagagcaattcgtgttgctgcacgttggtaccaaagtcatcttggtgagagcgtgaaggttctactgatcacaaatgacagagataacaaaaggaaagcgattgaagaaggccttaacgctgagacagttgagtcatatgtaagatcgcttgcacagcctggtttgcttgatttggttgttgttccaactagcggagatgtttctatggaagatgtagacgatcatagaccatcaaagaagaaagtaatctacaatgagcacaaacctatgtcagaaattacatctggtttgcggtgtggaatctaccatcaagggaagcttcgagttaatcgttacaatccgtttgaagcttatgttggaagcgagagcattggtgatgagattgttatccgtggccgctcaaatatgaacagggcctttgatggtgatatagttgctgttgagctcttgccacaagatcaatggcacgagtcaaagtcttttatagcagatgatgatgaagaagaagaagaagatgttcatttagtccctaatagtgctgatgatgctcctcggaacactaattccacacaatcaacagttggatcatcagctccttccatttctagtcgtccagttgggcgtgttatgggtataatcaagcgaaattggaattcgtactgtggatccttgcagccgatgcccatgcctgctggtagtgggggtgtcgctcatgctttatttgtttcaaaagatcgaagagttcctaagattcgaattcaaaccaggcagcttgagaatcttgtgaacaaaagaattgttgtcgcggttgattcatgggatgttttgtctcgatatccatcaggacactatgtacgaaccattggagatattggtgacaaagaaactgaaacagaggttgtcttaatagagaatgatatcaacaccaggcctttctctacacaagtccttgcttgtttgccacctttaccttggacattatcaccagaagatctggctaatcctaatagacaagacttacgccaagtgagagtctttagtgtggatccaccaggttgtcgagacattgatgatgcactacattgcacactacttccaaatgggaactttgaagttggagttcatatcgctgatgtcactaattttgttcaccctggtacccctcttgatgaggaagctgcgcaaaggggcacttctgtttatcttgttgggcagcggattgatatgcttccaaagcccctgactgaagatgtttgttcacttcgtgctgatgttgaacggttggcattctctgtcatttgggaaatgactccggatgctgatgttatatcaacgagatatacaaagagtgttatcaaatcttgtgctgcaatgtcttatgttgaagcccaggcaagaatggatgacagccgcttagttgatccactaactgtagacttgcggaacttaaattcattggcaaagatcatgcgacaacgccgttgtgaaagaggggctttgactcttgcttctgcagaagtaaaatttgagattgatagtgaaactcatgatcctcttgacataggaatttatcaaatccgtgaggcaaatcaaatgattgaagaatttatgttggctgcaaatgtttctgttgctgagaagattttgaagcatttccccttatgttcattgctaaggcgccatcctagcccaacaaaagagatgcttgagccattactccgtactgcctcttcgattggcctaaatctggacgtgtcatcctcaaaggcattagctgaatcacttgacaacgcaaagagcaatgacccatacttcaacaagcttattagaattttggcgactagatgcatgacacaggctgtttatttctgcagtggagatttgaccttttctgaatattaccattatgggcttgctgcttctctttacactcatttcacttctcccattcgcagatatgcagatgttgttgttcatagattgctagctgcagctctgaatattgcaaagctcccaccaatctttcaggatggtccacaacttacaggcattgctgacaacctgaattacaggcacagaaatgcccagatggcaagcagagcatcagttgaactccacacccacatatatttcaagacaaggccaactgacactgaagctaggatagtaaagatcaaggcaaatggtttcatagtatttgtcccaaagtttggcatagaagggcccatctaccttactccgaagggcgacaaaggcggtgattgggttgttgacgaggtgcaccagagagtaaccaagcccggaacaaacatcagctatgctatcctccagactgtcaggattcatatggaggttgttgaacctcagcctcatcgcccaaagctgcaactcaccctgatatgaaaaatgtacagctgaattgtagcaacattgtagtgttttcccgggcctctcacacctccagctcactctttagttcaacattggtgtgattttcgatttgtaaaactaatcagtaatcaccacatggtcaagattttgtagtatcagatagttttttctcaatacatggggctctatgcatggaagcttagtttctgaatggtactcacaatagagaaaatatacgacattgtattctgtttatgtgaaagagatgtatgttaatgtgacaagggtggttattgtgcgcacgcaccattcatttatatgggaagcgaacattatttttgcatggccaaatcttgctgaacttttaccattac

SEQ ID NO: 6315 - DNA, 2433 bp, Zea Mays
cgcccattctcattcgttctctctctacgctgtcccctcctctctctctctctctctctccagcggcaaaagtgttgcactgcagcactgctagctaggagtatactatgagcttgctagctagcctggctgatggatggtcactactcatgtgcataaacgtgcatgtgaagtggctgggcatccaaccaaatatataagctactggcaaccggctgccggctgctggcaggtcgttcttcgtgttgtatgtagcttgaggctgaggccgggagatgaccatggtgagaacgacgatggtcggcgccagggagaggagcgggggagtgaggcagtacaacaggtccaaggtgcctcgcctgcggtggacgcccgatctgcaccactgcttcgtccacgccatccacaagctcggaggccaggacaaggctacgccgaagcgagtcctgcagctgatgggtgtgggaggactcaccatatctcatgtcaaaagccatctgcagatgtacaggaacatgagaaatgatcttggaatgcaagggacgacgatgcagctggtgcaccgggcggaggagcacgtatacggcctaggcggcatgcatatggaactctgcgccgatacacagcgacgacagccgcagtgcggtcatgatgagtgcgatggcccggcctgctgctgcatcgtcgtctgccgctcgccaccaccaccaaagcctggaaaggaggcgacgacgctgttccaacgccaactgaaaaggtcactgccttttattttttactcatttttctttctctgtatatgctcatcggtcacgtcagggaggccatccattcgcgtcccgacccggataatgacagacgatgaccatgacctgctgcagccgcatttgccatgcattggaaccagtcagtttttgccaatggaatggaatatttactccttcctggcacagtggaatagtggcggcagtgtctttgaaataatttgttttttgttttttgttttgacaagagggacaccgtcagtctactgcagatcttgatggaatgtctttctacaaatgcatgccagctagctaattggttggtccgttcttttttatttgtcatgttttagtttaaaatgaactacaaaatattcgagaaaggtggttgtagtataaaactttgatcaacttggttcgtgtcagttttactagcagctttaattttctcctgcacgtacacggcacgatgtgaagttgtgaaccaaccatgcatgcatgcatgcatgttgctttgcttgccgtgtagtgtgtttgcaatggaggagccaaacaacagtggtgcggggaggaggcgtgagcgggaggagatggatgggagcgcgagccccaagagggtgctgctgcgaggaggcccaggcccaggaacatgtgagggcgacgggtcaccatcaccacccagcgccagcggcggcctgtgctgggcgctcgcaacagcagcagcaggtggctacaacagctacatgcgcatgatgcaagcggccatggggatggctgccggcgctcgtgctccgcctccgcgcacgcttcgtcatccacctcgtcacgcggagacgacggtggagcccagccgggggccgggaataaagcggcaggcgcagatgcagtcggcgtcggcgcggcccggcgcacaaggcggcgaacacgccgcgccagctcttcgtcctcgcagcaccagcagcagcgagcagctcatcacattctcgggcttcgtggtggcgcagaagcagccgcctcctcctcctcctccctgctgcagccgtgaccaccctttcgagatggtcggcacggctctcatcgctcatggcgcctctgccgaagcgcgctgcggcctggagacgccgccgaggctgcccgcagtggccgaacaagcaggcggcgatccctgctggacgtcgtcggcgggttcagaagacgaccacgacgaggaggaggacggctgctcgctctcgctgtccctagctacgagaagcagccgcagcagcggcgacgagggcggccggctctcgcctacggcggccacgtcgtgggggagccagatcagcctcgacctgtccttgtccacgctatagaatagacccgtcatgttggtatgatgcgagtttgtgaatgggatagcttcttgggccttgcggcggccgggctgccttcctggtgtagcgtttcctacaattttcgcttgctcttgttgttgttgaagctcttggctcgttaggttagtcccacgtagtaatatcagttataatttcattgttgggaggagctagatggtcttgatctttaccattccgattcgggccaatttggcaaggctcggtctagataaggtaaacaccttcctgctcaggtttccaaagctggcattgccacccatcaccaggattacgtc

SEQ ID NO: 6316 - DNA, 596 bp, Zea Mays
ttttttttttcgatcctaaggtccccggcggcccggccggaacaaaacccgttcgatgcgtctccgccgtttcaggacacaatcaagggctagaagccactacaggcccaaattcagcccatacccactctcccatccacgagaccacaagccacaccaaacccgcgttcatcgacggacgagctcgccggcgagagagcgactgagatggaggcggcggcagcggcggccggcgtggagctgggctcctcgaagccccagatcgcgacgcaggcggagatggcggaggcccgggtgccgctcgcctaccgcgatcagtgcgcgcacctcctcatcccgctcaacaagtgccgcgtcgccgagttctacctcccctggaagtgcgagcccgagcgccacgcctacgagaagtgccagtacgagctcgtcatggagcggatgctccagatgcagaagatccgcgaggcgcaggagaccaaggtcaagggcggcgcctccattggcctcatcccggccaccgccaagctcgcctgatacgggtcccagaccgatccgcttgatttaggttgaactttacaatggggtttgcagttact

SEQ ID NO: 6317 - DNA, 3713 bp, Zea Mays
ggaactgataactcgaaggggacgattgagaaatttgtccgctcaccatctcggtcggcgacagcgggaaaccactgggcctcctgcacctgcagccagcagccccgccgcgacacgctcccccgagatctccagcgcccgacttggcagatccagcaagctgcacccaccgcaggcgtgatctcctctcttggatcccgaagatggcggcgggaacggaggcctttgaggcatacttccgccgcgcggatttggaccaggacggccgcatcagcggccaggaagctgtcgccttcttccagggcgccaacctgccgcagccagtcctcgcccaggtatggatgcacgccgatcagaacaagactggtttcctcggccgcccggaattcttcaacgcgctgcgcctggtcaccgtagcgcagagcgggcgtcagctcacgcccgacatagtgcagtcggcactgtatggtcccgccgcggctcgaattccagctcccaagatagccgcgggggcggctcgttcacagatgggtgctgcgggggcgcctaggcctcaggggagcgctgcgatgacgcccgggcaggttggagcagctcagatgaatccggctggcacaccaaggccccagggaagcggtatgatgccgacatctacccaagttagtatgctgcaggtgaaccctggtgctgctccaaggccccaagggatcagttctatgatgccagctgcgagtcagggtggtgctctacaagcaactcaatttgctgcaccaagggcaatgcagccacagcctcctaacctgggaattactcaacagcaaccttctagtaccggtttcatgcggccaccacaggttggaactccagcagcttcatttcaagctcaagcgcctggaatcaatcaaggtttggtccatggaggcagcatggaaggatctatcagttggcaaggcggtaatgctgcctcagttggaggcatcccacgagctataccaggagctgctccttctcagacaacacgtggatttggtccaggtttacctagcacaatgggcatggtgcctggacaacaggtacaagcaatgtcttcatcgccattgcctccacagagcaacagtgctgttttgcctcagaattcaaaagctttggtactgtctggaaatggccctgccagcagctctggatcaagcacagacatcttctctgcacttacacagccaaagccaagcttatctgcacctcagacaagctcgattccgagttcatccagttttatggccacgcctactggctcccagaacctgactaatctcactcagtttggttctttgcaaggtagcagccaacctcaacagactcagcctatcgtaaagtccattcctgctccagctacacctgttgtctctgctgggatttctaattcagcttctcaatggcccaaaattactcaaccggacatccagaagtacatgaaagtctttggggatgttgatagggacagagatggcaaaataactggtgcagaagctcgcactctgttcctcagttggaggcttccaagggaggtcctgaagcaagtgtgggatttgtctgaccaagacaatgatggcatgctttctttgagagagttttgcatcgctctttatttaatggagaggcaccgagctggaattcctcttcccccagcccttcctgactctcttaggcatgatgagacactgttacgagctacaggcttgccttcaacagcatacaatagtccatcatggcaacacaatcaaggaggataccacaaagaggccctggagcacctggggtgcctgctggtggtgtgcggccacccttgccatcacatttgcattcacaaactgatggagctagcagacaagggcaaccaagatctcacatgcctgggatggataatcatgtggtaattcaaggaaacaaagatgacaaaagtgcgctgaaccaggctgcacaggaggtggtggatgctcctaagaaggttgaggtggagaagcaggtcctggattccagagagaaattggagtattaccgcacaaagatgcaagatcttgtcctgtataaaagtcggtgcgagaataggctgaatgagattacagaaagggcgtcctctgataaacgcgaggtggaatcattggctaagaaatatgaagagaagtacaagcaagtagctgagttagcttccaaactagcagttgaagaagctgcatatcgtgatgttcaggagagaaaagttgagctgcatgatgcactgattaaaatggtacaaggtggaagtgttgatggtttacttcaggttcgagctgatcgaatccaatatcaattagaagagatggaaaaagctcttagtgaacggtgcaaacactttgaacttaaattcaaaccatctgcatcagttgggaacctgggccacaagagggactcattgagtgggatgaagactgggataaatttgaagatgaagggtttagtattgttaaggataatggtacaatacaggaaaacccagtttctgctgaaaatggaaaagtgccatctctttgggatgatggtgatatgtctcctgttgcatcctctaatggtcatatcaaggaagaaaggcgttacagtggaggtgatcaagtggctgagagtgaaatagcatatgattttggtgatgaatctgtgaggagtcctggcagtgctggaagaagtgcctcagggagtccatttaaatcttccggctttggcatgcatgactcatctcccagcaaaagagaaagttacagtgaccatggtggttctgaatccgtttttggtgacaagtttgctgatgaaacttcctggaactttgatgatcaagatactgactctgtttggggttctactgtactgaacactgaggccgaccaacgcggtggcacgcataactctttctttgggtcggaggcaggctcaccaagtggcgctagtgtatttggaaagaagaggaattcattcttcgacgattctgttccaagttctcctgcatacacatctgggttctctccaaaatttggcgaaagccgtgacgatagctcctcttataacttcgggaggtttgattccttcagatcccaagacactggatccttccctcaggaaagccgtttctccaggttcgactccattagcagctccaagggcgagaatgtatcaggatttgacacagggaatagctcacgaaattttggccggtttgactcttttgatgacgccgacccattcggttcaagtggaccttttaaagcatcgggaagccggtctccacccaagttctgatatgctctctgctctgattagggttttgtgtcttgcgtcttgatttgtcaatacaaggtttagattctttgagcgaactctggcgtaacatggatttttttacctgacatttcttccattttccttatgtgcaattttcgagtccatctcacgcacaaagtggacaggtttgggtttatatctttgtttttgtaaacattttttctgtatcttgtaaattacgccaagtctgtctttgtttatatagtttacatgtatgaaacaacttctcgccatataacctattatttccttcactatattaacgttgatatggtatagcagcaggaaatgctgtacttacgttgctatggtcaaagatattagggcagttgccccagcaaaactcc

SEQ ID NO: 6318 - DNA, 3694 bp, Zea Mays
ggaactgataactcgaaggggacgattgagaaatttgtccgctcaccatctcggtcggcgacagcgggaaaccactgggcctcctgcacctgcagccagcagccccgccgcgacacgctcccccgagatctccagcgcccgacttggcagatccagcaagctgcacccaccgcaggcgtgatctcctctcttggatcccgaagatggcggcgggaacggaggcctttgaggcatacttccgccgcgcggatttggaccaggacggccgcatcagcggccaggaagctgtcgccttcttccagggcgccaacctgccgcagccagtcctcgcccaggtatggatgcacgccgatcagaacaagactggtttcctcggccgcccggaattcttcaacgcgctgcgcctggtcaccgtagcgcagagcgggcgtcagctcacgcccgacatagtgcagtcggcactgtatggtcccgccgcggctcgaattccagctcccaagatagccgcgggggcggctcgttcacagatgggtgctgcgggggcgcctaggcctcaggggagcgctgcgatgacgcccgggcaggttggagcagctcagatgaatccggctggcacaccaaggccccagggaagcggtatgatgccgacatctacccaagttagtatgctgcaggtgaaccctggtgctgctccaaggccccaagggatcagttctatgatgccagctgcgagtcagggtggtgctctacaagcaactcaatttgctgcaccaagggcaatgcagccacagcctcctaacctgggaattactcaacagcaaccttctagtaccggtttcatgcggccaccacaggttggaactccagcagcttcatttcaagctcaagcgcctggaatcaatcaaggtttggtccatggaggcagcatggaaggatctatcagttggcaaggcggtaatgctgcctcagttggaggcatcccacgagctataccaggagctgctccttctcagacaacacgtggatttggtccaggtttacctagcacaatgggcatggtgcctggacaacaggtacaagcaatgtcttcatcgccattgcctccacagagcaacagtgctgttttgcctcagaattcaaaagctttggtactgtctggaaatggccctgccagcagctctggatcaagcacagacatcttctctgcacttacacagccaaagccaagcttatctgcacctcagacaagctcgattccgagttcatccagttttatggccacgcctactggctcccagaacctgactaatctcactcagtttggttctttgcaaggtagcagccaacctcaacagactcagcctatcgtaaagtccattcctgctccagctacacctgttgtctctgctgggatttctaattcagcttctcaatggcccaaaattactcaaccggacatccagaagtacatgaaagtctttggggatgttgatagggacagagatggcaaaataactggtgcagaagctcgcactctgttcctcagttggaggcttccaagggaggtcctgaagcaagtgtgggatttgtctgaccaagacaatgatggcatgctttctttgagagagttttgcatcgctctttatttaatggagaggcaccgagctggaattcctcttcccccagcccttcctgactctcttaggcatgatgagacactgttacgagctacaggcttgccttcaacagcatacaatagtccatcatggcaacacaatcaaggaggataccacaaagaggccctggagcacctggggtgcctgctggtggtgtgcggccacccttgccatcacatttgcattcacaaactgatggagctagcagacaagggcaaccaagatctcacatgcctgggatggataatcatgtggtaattcaaggaaacaaagatgacaaaagtgcgctgaaccaggctgcacaggaggtggtggatgctcctaagaaggttgaggtggagaagcaggtcctggattccagagagaaattggagtattaccgcacaaagatgcaagatcttgtcctgtataaaagtcggtgcgagaataggctgaatgagattacagaaagggcgtcctctgataaacgcgaggtggaatcattggctaagaaatatgaagagaagtacaagcaagtagctgagttagcttccaaactagcagttgaagaagctgcatatcgtgatgttcaggagagaaaagttgagctgcatgatgcactgattaaaatggtacaaggtggaagtgttgatggtttacttcaggttcgagctgatcgaatccaatatcaattagaagagatggaaaaagctcttagtgaacggtgcaaacactttgaacttaaattcaaaccatctgcatcagttgagcttccttccggttgggaacctgggccacaagagggactcattgagtgggatgaagactgggataaatttgaagatgaaggaaaacccagtttctgctgaaaatggaaaagtgccatctctttgggatgatggtgatatgtctcctgttgcatcctctaatggtcatatcaaggaagaaaggcgttacagtggaggtgatcaagtggctgagagtgaaatagcatatgattttggtgatgaatctgtgaggagtcctggcagtgctggaagaagtgcctcagggagtccatttaaatcttccggctttggcatgcatgactcatctcccagcaaaagagaaagttacagtgaccatggtggttctgaatccgtttttggtgacaagtttgctgatgaaacttcctggaactttgatgatcaagatactgactctgtttggggttctactgtactgaacactgaggccgaccaacgcggtggcacgcataactctttctttgggtcggaggcaggctcaccaagtggcgctagtgtatttggaaagaagaggaattcattcttcgacgattctgttccaagttctcctgcatacacatctgggttctctccaaaatttggcgaaagccgtgacgatagctcctcttataacttcgggaggtttgattccttcagatcccaagacactggatccttccctcaggaaagccgtttctccaggttcgactccattagcagctccaagggcgagaatgtatcaggatttgacacagggaatagctcacgaaattttggccggtttgactcttttgatgacgccgacccattcggttcaagtggaccttttaaagcatcgggaagccggtctccacccaagttctgatatgctctctgctctgattagggttttgtgtcttgcgtcttgatttgtcaatacaaggtttagattctttgagcgaactctggcgtaacatggatttttttacctgacatttcttccattttccttatgtgcaattttcgagtccatctcacgcacaaagtggacaggtttgggtttatatctttgtttttgtaaacattttttctgtatcttgtaaattacgccaagtctgtctttgtttatatagtttacatgtatgaaacaacttctcgccatataacctattatttccttcactatattaacgttgatatggtatagcagcaggaaatgctgtacttacgttgctatggtcaaagatattagggcagttgccccagcaaaactcc

SEQ ID NO: 6319 - DNA, 4320 bp, Zea Mays
ggaactgataactcgaaggggacgattgagaaatttgtccgctcaccatctcggtcggcgacagcgggaaaccactgggcctcctgcacctgcagccagcagccccgccgcgacacgctcccccgagatctccagcgcccgacttggcagatccagcaagctgcacccaccgcaggcgtgatctcctctcttggatcccgaagatggcggcgggaacggaggcctttgaggcatacttccgccgcgcggatttggaccaggacggccgcatcagcggccaggaagctgtcgccttcttccagggcgccaacctgccgcagccagtcctcgcccaggtatggatgcacgccgatcagaacaagactggtttcctcggccgcccggaattcttcaacgcgctgcgcctggtcaccgtagcgcagagcgggcgtcagctcacgcccgacatagtgcagtcggcactgtatggtcccgccgcggctcgaattccagctcccaagatagccgcgggggcggctcgttcacagatgggtgctgcgggggcgcctaggcctcaggggagcgctgcgatgacgcccgggcaggttggagcagctcagatgaatccggctggcacaccaaggccccagggaagcggtatgatgccgacatctacccaagttagtatgctgcaggtgaaccctggtgctgctccaaggccccaagggatcagttctatgatgccagctgcgagtcagggtggtgctctacaagcaactcaatttgctgcaccaagggcaatgcagccacagcctcctaacctgggaattactcaacagcaaccttctagtaccggtttcatgcggccaccacaggttggaactccagcagcttcatttcaagctcaagcgcctggaatcaatcaaggtttggtccatggaggcagcatggaaggatctatcagttggcaaggcggtaatgctgcctcagttggaggcatcccacgagctataccaggagctgctccttctcagacaacacgtggatttggtccaggtttacctagcacaatgggcatggtgcctggacaacaggtacaagcaatgtcttcatcgccattgcctccacagagcaacagtgctgttttgcctcagaattcaaaagctttggtactgtctggaaatggccctgccagcagctctggatcaagcacagacatcttctctgcacttacacagccaaagccaagcttatctgcacctcagacaagctcgattccgagttcatccagttttatggccacgcctactggctcccagaacctgactaatctcactcagtttggttctttgcaaggtagcagccaacctcaacagactcagcctatcgtaaagtccattcctgctccagctacacctgttgtctctgctgggatttctaattcagcttctcaatggcccaaaattactcaaccggacatccagaagtacatgaaagtctttggggatgttgatagggacagagatggcaaaataactggtgcagaagctcgcactctgttcctcagttggaggcttccaagggaggtcctgaagcaagtgtgggatttgtctgaccaagacaatgatggcatgctttctttgagagagttttgcatcgctctttatttaatggagaggcaccgagctggaattcctcttcccccagcccttcctgactctcttaggcatgatgagacactgttacgagctacaggcttgccttcaacagcatacaatagtccatcatggcaacacaatcaaggaggataccacaaagaggccctggagcacctggggtgcctgctggtggtgtgcggccacccttgccatcacatttgcattcacaaactgatggagctagcagacaagggcaaccaagatctcacatgcctgggatggataatcatgtggtaattcaaggaaacaaagatgacaaaagtgcgctgaaccaggctgcacaggaggtggtggatgctcctaagaaggttgaggtggagaagcaggtcctggattccagagagaaattggagtattaccgcacaaagatgcaagatcttgtcctgtataaaagtcggtgcgagaataggctgaatgagattacagaaagggcgtcctctgataaacgcgaggtggaatcattggctaagaaatatgaagagaagtacaagcaagtagctgagttagcttccaaactagcagttgaagaagctgcatatcgtgatgttcaggagagaaaagttgagctgcatgatgcactgattaaaatggtacaaggtggaagtgttgatggtttacttcaggttcgagctgatcgaatccaatatcaattagaagagatggaaaaagctcttagtgaacggtgcaaacactttgaacttaaattcaaaccatctgcatcagttgagcttccttccggttgggaacctgggccacaagagggactcattgagtgggatgaagactgggataaatttgaagatgaaggttaaatacttccactgcattctcctctgctattactcaagcatccctgaagtctggttactttttaaagctggcaattgtctgtttatatatcggagtactctgcatggttgcaagctgagttttgcaatccagtgtttgccatgctactgttttaaaaaatatttgtgactttactactgtgtgttttaagaaattcaatactagtaactaatctgtgaaagagacaaaagatttcataccttttacacgtgttaacgtatactagcaaagccatatcctgaaataagcaaccttgactgtttctaagcttgatatttgtgtagctgatattatttattagtgccatttatggagataatttttctgctatgatatccttgtttaggttcctttcattgaacataccaagcccccgcctctgttctagtgaaccttctgttgttagaacattgtttgtgtgatatactgtacatagattttgatgacatgagctattgttaattttgtgtcttacacttggggcaattttttccctttcatttccaatttatcacatcgtattccttattgaatcatatgacatgacagggtttagtattgttaaggataatggtacaatacaggaaaacccagtttctgctgaaaatggaaaagtgccatctctttgggatgatggtgatatgtctcctgttgcatcctctaatggtcatatcaaggaagaaaggcgttacagtggaggtgatcaagtggctgagagtgaaatagcatatgattttggtgatgaatctgtgaggagtcctggcagtgctggaagaagtgcctcagggagtccatttaaatcttccggctttggcatgcatgactcatctcccagcaaaagagaaagttacagtgaccatggtggttctgaatccgtttttggtgacaagtttgctgatgaaacttcctggaactttgatgatcaagatactgactctgtttggggttctactgtactgaacactgaggccgaccaacgcggtggcacgcataactctttctttgggtcggaggcaggctcaccaagtggcgctagtgtatttggaaagaagaggaattcattcttcgacgattctgttccaagttctcctgcatacacatctgggttctctccaaaatttggcgaaagccgtgacgatagctcctcttataacttcgggaggtttgattccttcagatcccaagacactggatccttccctcaggaaagccgtttctccaggttcgactccattagcagctccaagggcgagaatgtatcaggatttgacacagggaatagctcacgaaattttggccggtttgactcttttgatgacgccgacccattcggttcaagtggaccttttaaagcatcgggaagccggtctccacccaagttctgatatgctctctgctctgattagggttttgtgtcttgcgtcttgatttgtcaatacaaggtttagattctttgagcgaactctggcgtaacatggatttttttacctgacatttcttccattttccttatgtgcaattttcgagtccatctcacgcacaaagtggacaggtttgggtttatatctttgtttttgtaaacattttttctgtatcttgtaaattacgccaagtctgtctttgtttatatagtttacatgtatgaaacaacttctcgccatataacctattatttccttcactatattaacgttgatatggtatagcagcaggaaatgctgtacttacgttgctatggtcaaagatattagggcagttgccccagcaaaactcc

SEQ ID NO: 6320 - DNA, 3614 bp, Zea Mays
ggaactgataactcgaaggggacgattgagaaatttgtccgctcaccatctcggtcggcgacagcgggaaaccactgggcctcctgcacctgcagccagcagccccgccgcgacacgctcccccgagatctccagcgcccgacttggcagatccagcaagctgcacccaccgcaggcgtgatctcctctcttggatcccgaagatggcggcgggaacggaggcctttgaggcatacttccgccgcgcggatttggaccaggacggccgcatcagcggccaggaagctgtcgccttcttccagggcgccaacctgccgcagccagtcctcgcccaggtatggatgcacgccgatcagaacaagactggtttcctcggccgcccggaattcttcaacgcgctgcgcctggtcaccgtagcgcagagcgggcgtcagctcacgcccgacatagtgcagtcggcactgtatggtcccgccgcggctcgaattccagctcccaagatagccgcgggggcggctcgttcacagatgggtgctgcgggggcgcctaggcctcaggggagcgctgcgatgacgcccgggcaggttggagcagctcagatgaatccggctggcacaccaaggccccagggaagcggtatgatgccgacatctacccaagttagtatgctgcaggtgaaccctggtgctgctccaaggccccaagggatcagttctatgatgccagctgcgagtcagggtggtgctctacaagcaactcaatttgctgcaccaagggcaatgcagccacagcctcctaacctgggaattactcaacagcaaccttctagtaccggtttcatgcggccaccacaggttggaactccagcagcttcatttcaagctcaagcgcctggaatcaatcaaggtttggtccatggaggcagcatggaaggatctatcagttggcaaggcggtaatgctgcctcagttggaggcatcccacgagctataccaggagctgctccttctcagacaacacgtggatttggtccaggtttacctagcacaatgggcatggtgcctggacaacaggtacaagcaatgtcttcatcgccattgcctccacagagcaacagtgctgttttgcctcagaattcaaaagctttggtactgtctggaaatggccctgccagcagctctggatcaagcacagacatcttctctgcacttacacagccaaagccaagcttatctgcacctcagacaagctcgattccgagttcatccagttttatggccacgcctactggctcccagaacctgactaatctcactcagtttggttctttgcaaggtagcagccaacctcaacagactcagcctatcgtaaagtccattcctgctccagctacacctgttgtctctgctgggatttctaattcagcttctcaatggcccaaaattactcaaccggacatccagaagtacatgaaagtctttggggatgttgatagggacagagatggcaaaataactggtgcagaagctcgcactctgttcctcagttggaggcttccaagggaggtcctgaagcaagtgtgggatttgtctgaccaagacaatgatggcatgctttctttgagagagttttgcatcgctctttatttaatggagaggcaccgagctggaattcctcttcccccagcccttcctgactctcttaggcatgatgagacactgttacgagctacaggcttgccttcaacagcatacaatagtccatcatggcaacacaatcaaggaggataccacaaagaggccctggagcacctggggtgcctgctggtggtgtgcggccacccttgccatcacatttgcattcacaaactgatggagctagcagacaagggcaaccaagatctcacatgcctgggatggataatcatgtggtaattcaaggaaacaaagatgacaaaagtgcgctgaaccaggctgcacaggaggtggtggatgctcctaagaaggttgaggtggagaagcaggtcctggattccagagagaaattggagtattaccgcacaaagatgcaagatcttgtcctgtataaaagtcggtgcgagaataggctgaatgagattacagaaagggcgtcctctgataaacgcgaggtggaatcattggctaagaaatatgaagagaagtacaagcaagtagctgagttagcttccaaactagcagttgaagaagctgcatatcgtgatgttcaggagagaaaagttgagctgcatgatgcactgattaaaatggtacaaggtggaagtgttgatggtttacttcaggttgggaacctgggccacaagagggactcattgagtgggatgaagactgggataaatttgaagatgaagggtttagtattgttaaggataatggtacaatacaggaaaacccagtttctgctgaaaatggaaaagtgccatctctttgggatgatggtgatatgtctcctgttgcatcctctaatggtcatatcaaggaagaaaggcgttacagtggaggtgatcaagtggctgagagtgaaatagcatatgattttggtgatgaatctgtgaggagtcctggcagtgctggaagaagtgcctcagggagtccatttaaatcttccggctttggcatgcatgactcatctcccagcaaaagagaaagttacagtgaccatggtggttctgaatccgtttttggtgacaagtttgctgatgaaacttcctggaactttgatgatcaagatactgactctgtttggggttctactgtactgaacactgaggccgaccaacgcggtggcacgcataactctttctttgggtcggaggcaggctcaccaagtggcgctagtgtatttggaaagaagaggaattcattcttcgacgattctgttccaagttctcctgcatacacatctgggttctctccaaaatttggcgaaagccgtgacgatagctcctcttataacttcgggaggtttgattccttcagatcccaagacactggatccttccctcaggaaagccgtttctccaggttcgactccattagcagctccaagggcgagaatgtatcaggatttgacacagggaatagctcacgaaattttggccggtttgactcttttgatgacgccgacccattcggttcaagtggaccttttaaagcatcgggaagccggtctccacccaagttctgatatgctctctgctctgattagggttttgtgtcttgcgtcttgatttgtcaatacaaggtttagattctttgagcgaactctggcgtaacatggatttttttacctgacatttcttccattttccttatgtgcaattttcgagtccatctcacgcacaaagtggacaggtttgggtttatatctttgtttttgtaaacattttttctgtatcttgtaaattacgccaagtctgtctttgtttatatagtttacatgtatgaaacaacttctcgccatataacctattatttccttcactatattaacgttgatatggtatagcagcaggaaatgctgtacttacgttgctatggtcaaagatattagggcagttgccccagcaaaactcc

SEQ ID NO: 6321 - DNA, 3579 bp, Zea Mays
ggaactgataactcgaaggggacgattgagaaatttgtccgctcaccatctcggtcggcgacagcgggaaaccactgggcctcctgcacctgcagccagcagccccgccgcgacacgctcccccgagatctccagcgcccgacttggcagatccagcaagctgcacccaccgcaggcgtgatctcctctcttggatcccgaagatggcggcgggaacggaggcctttgaggcatacttccgccgcgcggatttggaccaggacggccgcatcagcggccaggaagctgtcgccttcttccagggcgccaacctgccgcagccagtcctcgcccaggtatggatgcacgccgatcagaacaagactggtttcctcggccgcccggaattcttcaacgcgctgcgcctggtcaccgtagcgcagagcgggcgtcagctcacgcccgacatagtgcagtcggcactgtatggtcccgccgcggctcgaattccagctcccaagatagccgcgggggcggctcgttcacagatgggtgctgcgggggcgcctaggcctcaggggagcgctgcgatgacgcccgggcaggttggagcagctcagatgaatccggctggcacaccaaggccccagggaagcggtatgatgccgacatctacccaagttagtatgctgcaggtgaaccctggtgctgctccaaggccccaagggatcagttctatgatgccagctgcgagtcagggtggtgctctacaagcaactcaatttgctgcaccaagggcaatgcagccacagcctcctaacctgggaattactcaacagcaaccttctagtaccggtttcatgcggccaccacaggttggaactccagcagcttcatttcaagctcaagcgcctggaatcaatcaaggtttggtccatggaggcagcatggaaggatctatcagttggcaaggcggtaatgctgcctcagttggaggcatcccacgagctataccaggagctgctccttctcagacaacacgtggatttggtccaggtttacctagcacaatgggcatggtgcctggacaacaggtacaagcaatgtcttcatcgccattgcctccacagagcaacagtgctgttttgcctcagaattcaaaagctttggtactgtctggaaatggccctgccagcagctctggatcaagcacagacatcttctctgcacttacacagccaaagccaagcttatctgcacctcagacaagctcgattccgagttcatccagttttatggccacgcctactggctcccagaacctgactaatctcactcagtttggttctttgcaaggtagcagccaacctcaacagactcagcctatcgtaaagtccattcctgctccagctacacctgttgtctctgctgggatttctaattcagcttctcaatggcccaaaattactcaaccggacatccagaagtacatgaaagtctttggggatgttgatagggacagagatggcaaaataactggtgcagaagctcgcactctgttcctcagttggaggcttccaagggaggtcctgaagcaagtgtgggatttgtctgaccaagacaatgatggcatgctttctttgagagagttttgcatcgctctttatttaatggagaggcaccgagctggaattcctcttcccccagcccttcctgactctcttaggcatgatgagacactgttacgagctacaggcttgccttcaacagcatacaatagtccatcatggcaacacaatcaaggaggataccacaaagaggccctggagcacctggggtgcctgctggtggtgtgcggccacccttgccatcacatttgcattcacaaactgatggagctagcagacaagggcaaccaagatctcacatgcctgggatggataatcatgtggtaattcaaggaaacaaagatgacaaaagtgcgctgaaccaggctgcacaggaggtggtggatgctcctaagaaggttgaggtggagaagcaggtcctggattccagagagaaattggagtattaccgcacaaagatgcaagatcttgtcctgtataaaagtcggtgcgagaataggctgaatgagattacagaaagggcgtcctctgataaacgcgaggtggaatcattggctaagaaatatgaagagaagtacaagcaagtagctgagttagcttccaaactagcagttgaagaagctgcatatcgtgatgttcaggagagaaaagttgagctgcatgatgcactgattaaaatggtacaaggtggaagtgttgatggtttacttcaggttgggaacctgggccacaagagggactcattgagtgggatgaagactgggataaatttgaagatgaaggaaaacccagtttctgctgaaaatggaaaagtgccatctctttgggatgatggtgatatgtctcctgttgcatcctctaatggtcatatcaaggaagaaaggcgttacagtggaggtgatcaagtggctgagagtgaaatagcatatgattttggtgatgaatctgtgaggagtcctggcagtgctggaagaagtgcctcagggagtccatttaaatcttccggctttggcatgcatgactcatctcccagcaaaagagaaagttacagtgaccatggtggttctgaatccgtttttggtgacaagtttgctgatgaaacttcctggaactttgatgatcaagatactgactctgtttggggttctactgtactgaacactgaggccgaccaacgcggtggcacgcataactctttctttgggtcggaggcaggctcaccaagtggcgctagtgtatttggaaagaagaggaattcattcttcgacgattctgttccaagttctcctgcatacacatctgggttctctccaaaatttggcgaaagccgtgacgatagctcctcttataacttcgggaggtttgattccttcagatcccaagacactggatccttccctcaggaaagccgtttctccaggttcgactccattagcagctccaagggcgagaatgtatcaggatttgacacagggaatagctcacgaaattttggccggtttgactcttttgatgacgccgacccattcggttcaagtggaccttttaaagcatcgggaagccggtctccacccaagttctgatatgctctctgctctgattagggttttgtgtcttgcgtcttgatttgtcaatacaaggtttagattctttgagcgaactctggcgtaacatggatttttttacctgacatttcttccattttccttatgtgcaattttcgagtccatctcacgcacaaagtggacaggtttgggtttatatctttgtttttgtaaacattttttctgtatcttgtaaattacgccaagtctgtctttgtttatatagtttacatgtatgaaacaacttctcgccatataacctattatttccttcactatattaacgttgatatggtatagcagcaggaaatgctgtacttacgttgctatggtcaaagatattagggcagttgccccagcaaaactcc

SEQ ID NO: 6322 - DNA, 2601 bp, Zea Mays
tttgagcggttaaaggaactgataactcgaaggggacgattgagaaatttgtccgctcaccatctcggtcggcgacagcgggaaaccactgggcctcctgcacctgcagccagcagccccgccgcgacacgctcccccgagatctccagcgcccgacttggcagatccagcaagctgcacccaccgcaggcgtgatctcctctcttggatcccgaagatggcggcgggaacggaggcctttgaggcatacttccgccgcgcggatttggaccaggacggccgcatcagcggccaggaagctgtcgccttcttccagggcgccaacctgccgcagccagtcctcgcccaggtatggatgcacgccgatcagaacaagactggtttcctcggccgcccggaattcttcaacgcgctgcgcctggtcaccgtagcgcagagcgggcgtcagctcacgcccgacatagtgcagtcggcactgtatggtcccgccgcggctcgaattccagctcccaagatagccgcgggggcggctcgttcacagatgggtgctgcgggggcgcctaggcctcaggggagcgctgcgatgacgcccgggcaggttggagcagctcagatgaatccggctggcacaccaaggccccagggaagcggtatgatgccgacatctacccaagttagtatgctgcaggtgaaccctggtgctgctccaaggccccaagggatcagttctatgatgccagctgcgagtcagggtggtgctctacaagcaactcaatttgctgcaccaagggcaatgcagccacagcctcctaacctgggaattactcaacagcaaccttctagtaccggtttcatgcggccaccacaggttggaactccagcagcttcatttcaagctcaagcgcctggaatcaatcaaggtttggtccatggaggcagcatggaaggatctatcagttggcaaggcggtaatgctgcctcagttggaggcatcccacgagctataccaggagctgctccttctcagacaacacgtggatttggtccaggtttacctagcacaatgggcatggtgcctggacaacaggtacaagcaatgtcttcatcgccattgcctccacagagcaacagtgctgttttgcctcagaattcaaaagctttggtactgtctggaaatggccctgccagcagctctggatcaagcacagacatcttctctgcacttacacagccaaagccaagcttatctgcacctcagacaagctcgattccgagttcatccagttttatggccacgcctactggctcccagaacctgactaatctcactcagtttggttctttgcaaggtagcagccaacctcaacagactcagcctatcgtaaagtccattcctgctccagctacacctgttgtctctgctgggatttctaattcagcttctcaatggcccaaaattactcaaccggacatccagaagtacatgaaagtctttggggatgttgatagggacagagatggcaaaataactggtgcagaagctcgcactctgttcctcagttggaggcttccaagggaggtcctgaagcaagtgtgggatttgtctgaccaagacaatgatggcatgctttctttgagagagttttgcatcgctctttatttaatggagaggcaccgagctggaattcctcttcccccagcccttcctgactctcttaggcatgatgagacactgttacgagctacaggcttgccttcaacagcatacaatagtccatcatggcaacacaatcaaggaggataccacaaagaggccctggagcacctggggtgcctgctggtggtgtgcggccacccttgccatcacatttgcattcacaaactgatggagctagcagacaagggcaaccaagatctcacatgcctgggatggataatcatgtggtaattcaaggaaacaaagatgacaaaagtgcgctgaaccaggctgcacaggaggtggtggatgctcctaagaaggttgaggtggagaagcaggtcctggattccagagagaaattggagtattaccgcacaaagatgcaagatcttgtcctgtataaaagtcggtgcgagaataggctgaatgagattacagaaagggcgtcctctgataaacgcgaggtggaatcattggctaagaaatatgaagagaagtacaagcaagtagctgagttagcttccaaactagcagttgaagaagctgcatatcgtgatgttcaggagagaaaagttgagctgcatgatgcactgattaaaatggtacaaggtggaagtgttgatggtttacttcaggttcgagctgatcgaatccaatatcaattagaagagatggaaaaagctcttagtgaacggtgcaaacactttgaacttaaattcaaaccatctgcatcagcggtaaggcgagataaggcgctggaccaccgcctagacgcctaaggcgagcaaggcgacgccttatcaacctgagaatcagcaaaacagccccatggaggaggaagaaaaagaaaaaaagaaaaagaaaaaaggagaaggaagggttcggaggcccagcccaccagc

SEQ ID NO: 6323 - DNA, 2649 bp, Zea Mays
aaaaaatcgggagtctagctaacgaattcatttttgagcggttaaaggaactgataactcgaaggggacgattgagaaatttgtccgctcaccatctcggtcggcgacagcgggaaaccactgggcctcctgcacctgcagccagcagccccgccgcgacacgctcccccgagatctccagcgcccgacttggcagatccagcaagctgcacccaccgcaggcgtgatctcctctcttggatcccgaagatggcggcgggaacggaggcctttgaggcatacttccgccgcgcggatttggaccaggacggccgcatcagcggccaggaagctgtcgccttcttccagggcgccaacctgccgcagccagtcctcgcccaggtatggatgcacgccgatcagaacaagactggtttcctcggccgcccggaattcttcaacgcgctgcgcctggtcaccgtagcgcagagcgggcgtcagctcacgcccgacatagtgcagtcggcactgtatggtcccgccgcggctcgaattccagctcccaagatagccgcgggggcggctcgttcacagatgggtgctgcgggggcgcctaggcctcaggggagcgctgcgatgacgcccgggcaggttggagcagctcagatgaatccggctggcacaccaaggccccagggaagcggtatgatgccgacatctacccaagttagtatgctgcaggtgaaccctggtgctgctccaaggccccaagggatcagttctatgatgccagctgcgagtcagggtggtgctctacaagcaactcaatttgctgcaccaagggcaatgcagccacagcctcctaacctgggaattactcaacagcaaccttctagtaccggtttcatgcggccaccacaggttggaactccagcagcttcatttcaagctcaagcgcctggaatcaatcaaggtttggtccatggaggcagcatggaaggatctatcagttggcaaggcggtaatgctgcctcagttggaggcatcccacgagctataccaggagctgctccttctcagacaacacgtggatttggtccaggtttacctagcacaatgggcatggtgcctggacaacaggtacaagcaatgtcttcatcgccattgcctccacagagcaacagtgctgttttgcctcagaattcaaaagctttggtactgtctggaaatggccctgccagcagctctggatcaagcacagacatcttctctgcacttacacagccaaagccaagcttatctgcacctcagacaagctcgattccgagttcatccagttttatggccacgcctactggctcccagaacctgactaatctcactcagtttggttctttgcaaggtagcagccaacctcaacagactcagcctatcgtaaagtccattcctgctccagctacacctgttgtctctgctgggatttctaattcagcttctcaatggcccaaaattactcaaccggacatccagaagtacatgaaagtctttggggatgttgatagggacagagatggcaaaataactggtgcagaagctcgcactctgttcctcagttggaggcttccaagggaggtcctgaagcaagtgtgggatttgtctgaccaagacaatgatggcatgctttctttgagagagttttgcatcgctctttatttaatggagaggcaccgagctggaattcctcttcccccagcccttcctgactctcttaggcatgatgagacactgttacgagctacaggcttgccttcaacagcatacaatagtccatcatggcaacacaatcaaggaggataccacaaagaggccctggagcacctggggtgcctgctggtggtgtgcggccacccttgccatcacatttgcattcacaaactgatggagctagcagacaagggcaaccaagatctcacatgcctgggatggataatcatgtggtaattcaaggaaacaaagatgacaaaagtgcgctgaaccaggctgcacaggaggtggtggatgctcctaagaaggttgaggtggagaagcaggtcctggattccagagagaaattggagtattaccgcacaaagatgcaagatcttgtcctgtataaaagtcggtgcgagaataggctgaatgagattacagaaagggcgtcctctgataaacgcgaggtggaatcattggctaagaaatatgaagagaagtacaagcaagtagctgagttagcttccaaactagcagttgaagaagctgcatatcgtgatgttcaggagagaaaagttgagctgcatgatgcactgattaaaatggtacaaggtggaagtgttgatggtttacttcaggttcgagctgatcgaatccaatatcaattagaagagatggaaaaagctcttagtgaacggtgcaaacactttgaacttaaattcaaaccatctgcatcagttgagcttccttccggcggtaaggcgagataaggcgctggaccaccgcctagacgcctaaggcgagcaaggcgacgccttatcaacctgagaatcagcaaaacagccccatggaggaggaagaaaaagaaaaaaagaaaaagaaaaaaggagaaggaagggttcggaggcccagcccaccagc

SEQ ID NO: 6324 - DNA, 2031 bp, Zea Mays
ggaactgataactcgaaggggacgattgagaaatttgtccgctcaccatctcggtcggcgacagcgggaaaccactgggcctcctgcacctgcagccagcagccccgccgcgacacgctcccccgagatctccagcgcccgacttggcagatccagcaagctgcacccaccgcaggcgtgatctcctctcttggatcccgaagatggcggcgggaacggaggcctttgaggcatacttccgccgcgcggatttggaccaggacggccgcatcagcggccaggaagctgtcgccttcttccagggcgccaacctgccgcagccagtcctcgcccaggtatggatgcacgccgatcagaacaagactggtttcctcggccgcccggaattcttcaacgcgctgcgcctggtcaccgtagcgcagagcgggcgtcagctcacgcccgacatagtgcagtcggcactgtatggtcccgccgcggctcgaattccagctcccaagatagccgcgggggcggctcgttcacagatgggtgctgcgggggcgcctaggcctcaggggagcgctgcgatgacgcccgggcaggttggagcagctcagatgaatccggctggcacaccaaggccccagggaagcggtatgatgccgacatctacccaagttagtatgctgcaggtgaaccctggtgctgctccaaggccccaagggatcagttctatgatgccagctgcgagtcagggtggtgctctacaagcaactcaatttgctgcaccaagggcaatgcagccacagcctcctaacctgggaattactcaacagcaaccttctagtaccggtttcatgcggccaccacaggttggaactccagcagcttcatttcaagctcaagcgcctggaatcaatcaaggtttggtccatggaggcagcatggaaggatctatcagttggcaaggcggtaatgctgcctcagttggaggcatcccacgagctataccaggagctgctccttctcagacaacacgtggatttggtccaggtttacctagcacaatgggcatggtgcctggacaacaggtacaagcaatgtcttcatcgccattgcctccacagagcaacagtgctgttttgcctcagaattcaaaagctttggtactgtctggaaatggccctgccagcagctctggatcaagcacagacatcttctctgcacttacacagccaaagccaagcttatctgcacctcagacaagctcgattccgagttcatccagttttatggccacgcctactggctcccagaacctgactaatctcactcagtttggttctttgcaaggtagcagccaacctcaacagactcagcctatcgtaaagtccattcctgctccagctacacctgttgtctctgctgggatttctaattcagcttctcaatggcccaaaattactcaaccggacatccagaagtacatgaaagtctttggggatgttgatagggacagagatggcaaaataactggtgcagaagctcgcactctgttcctcagttggaggcttccaagggaggtcctgaagcaagtgtgggatttgtctgaccaagacaatgatggcatgctttctttgagagagttttgcatcgctctttatttaatggagaggcaccgagctggaattcctcttcccccagcccttcctgactctcttaggcatgatgagacactgttacgagctacaggcttgccttcaacagcatacaatagtccatcatggcaacacaatcaaggaggataccacaaagaggccctggagcacctggggtgcctgctggtggtgtgcggccacccttgccatcacatttgcattcacaaactgatggagctagcagacaagggcaaccaagatctcacatgcctgggatggataatcatgtggtaattcaaggaaacaaagatgacaaaagtgcgctgaaccaggctgcacaggaggtggtggatgctcctaagaaggcttatattgcccacgaggaattatc

SEQ ID NO: 6325 - DNA, 2100 bp, Zea Mays
ggaactgataactcgaaggggacgattgagaaatttgtccgctcaccatctcggtcggcgacagcgggaaaccactgggcctcctgcacctgcagccagcagccccgccgcgacacgctcccccgagatctccagcgcccgacttggcagatccagcaagctgcacccaccgcaggcgtgatctcctctcttggatcccgaagatggcggcgggaacggaggcctttgaggcatacttccgccgcgcggatttggaccaggacggccgcatcagcggccaggaagctgtcgccttcttccagggcgccaacctgccgcagccagtcctcgcccaggtatggatgcacgccgatcagaacaagactggtttcctcggccgcccggaattcttcaacgcgctgcgcctggtcaccgtagcgcagagcgggcgtcagctcacgcccgacatagtgcagtcggcactgtatggtcccgccgcggctcgaattccagctcccaagatagccgcgggggcggctcgttcacagatgggtgctgcgggggcgcctaggcctcaggggagcgctgcgatgacgcccgggcaggttggagcagctcagatgaatccggctggcacaccaaggccccagggaagcggtatgatgccgacatctacccaagttagtatgctgcaggtgaaccctggtgctgctccaaggccccaagggatcagttctatgatgccagctgcgagtcagggtggtgctctacaagcaactcaatttgctgcaccaagggcaatgcagccacagcctcctaacctgggaattactcaacagcaaccttctagtaccggtttcatgcggccaccacaggttggaactccagcagcttcatttcaagctcaagcgcctggaatcaatcaaggtttggtccatggaggcagcatggaaggatctatcagttggcaaggcggtaatgctgcctcagttggaggcatcccacgagctataccaggagctgctccttctcagacaacacgtggatttggtccaggtttacctagcacaatgggcatggtgcctggacaacaggtacaagcaatgtcttcatcgccattgcctccacagagcaacagtgctgttttgcctcagaattcaaaagctttggtactgtctggaaatggccctgccagcagctctggatcaagcacagacatcttctctgcacttacacagccaaagccaagcttatctgcacctcagacaagctcgattccgagttcatccagttttatggccacgcctactggctcccagaacctgactaatctcactcagtttggttctttgcaaggtagcagccaacctcaacagactcagcctatcgtaaagtccattcctgctccagctacacctgttgtctctgctgggatttctaattcagcttctcaatggcccaaaattactcaaccggacatccagaagtacatgaaagtctttggggatgttgatagggacagagatggcaaaataactggtgcagaagctcgcactctgttcctcagttggaggcttccaagggaggtcctgaagcaagtgtgggatttgtctgaccaagacaatgatggcatgctttctttgagagagttttgcatcgctctttatttaatggagaggcaccgagctggaattcctcttcccccagcccttcctgactctcttaggcatgatgagacactgttacgagctacaggcttgccttcaacagcatacaatagtccatcatggcaacacaatcaaggaggataccacaaagaggccctggagcacctggggtgcctgctggtggtgtgcggccacccttgccatcacatttgcattcacaaactgatggagctagcagacaagggcaaccaagatctcacatgcctgggatggataatcatgtggtaattcaaggaaacaaagatgacaaaagtgcgctgaaccaggctgcacaggaggtggtggatgctcctaagaaggtgggatctgggtttgaagtgtggatcattatgtgtgtcatatctggactggtttaatgcaacctgagctgtgtcctctgtatatttgatttccc

SEQ ID NO: 6326 - DNA, 3668 bp, Zea Mays
ctctcttctcttctcttctcttctcttctctcgccgttcgcgctgtgctctggttctgctgtctggtcggtcctgctgtcgaggctgcattgcatatttgcatgcacaggagcggctgcagggaaggagtgagaggagcaggatgggtaggtgggcgggtgagggcaaaaggaagacttcgcttttcgctttcccggctgttgctgttgctttccttccccttctaatcatcccttctcctcctccctagttattatcgtcgtgccaccataagcgcggcctcgcgccaacaagaacctcggcctcgggaggcagcagtagcaccgccgggggaggcgcagcgcagcgcaacggccggcgccgggacgagagatcctcgaatgtacatgacaaggaaacttttccgtccagctgacccctctctgatctcgccaccgaagcgcacgctggacacccgtggttggtggcaccatgctgcagtacctggacttctcgcacgccagcacctcaaggaagtgggcgcacaggagacagggcgacggtatggcgatcatcagtccaaatgtccaatcctctctatccaccatccttctcagatgaactaggcctgcaatcctgcattcctcgctggacgctacagtttatagcatggtcataggaatgtaggattacatttttttattaatcaagatatccttttttttccccttgatttggtcgatatgatatctttatctgctcttttggtatgccataatcatcttccaggacttgaagctccaaggaacagcatggagttcgctttggaggcttcccacagctatggcgtgtttcaggaagatgttccgcactatccctgcaatatgaggcagtacccaaaatcagggctcaaccacagctttaacccagtcaagaagctgatccaggaggacatctcgttccgaacgaatgaagtccagaagaggcccggcggcgtcatcgccagactgatgggcatggaatcgcctccactgaacgcagctactgaatccatcagtcgttcggagatcaccccgagaccaacaatgccaagaagagatcctcctgaaagggagacctcagccaagcatgtctccttcgtgcagcacggcaacagggactccaccaagcaggcgtcaaagcaggagatccgagcctatggcgaggagagggacgtgtttgggcagcagaacaagaggggcaacgagtggagtaagccgcagccgcgggagcacccgcaggaggaggagctgcagaagttcaagaaggagttcgaggcgtggcaggcgagcagggcgtgggagcactcgagaagcttcgagctggagagtagcaccctcggcgacgacgatgacgacggcaggtgcacggacatcgtgccgtacaggtaccagcaccaccaccaccaccaccacaaggggaaagatgccagccatggcggcaagcacatacgctcctccaacgaggacgtgcattgttggagaagaagcagcaaggagagcggcacgtccatctccgggagccgtacgttctctctgacgaccagcgcagacgccgccgcctgctccacgaggctgccgctctccaggttctaccacgaggaggagaggtcgctgtcgccgacgaggatcgtgatcctcaagccctgccccgagctgagcgcggacgacgtcgaggagtcctcgctcgggtcgccggagctggtgaagaaggagaacaacatggaggccttcctggaggaggtcaagaagaggctcaagatcgagctcgagggcggggtggcctccgacgacaaggcggaccgccgttggttcgccgccgcagccgccgccgacgttattccggccgacccgaagcagatcgcgcggagcatcgccaaccagatcagggagaacgtcacgagggacatgcacccggcgctgctgcggtcggagtccacgcgctcgtaccgcagcgacgtgccgttcgacgggcagggacagatggattacatcggccgagacgccaggaggcagctctccgacagctcaagaacgtgctgaggagggacccgccggacgccgagacgcccttctcgttctcccaccggagaagggccacctcgacgtcgttcgacgaggagccaacgaggcccaagccgacgaggcacgaggtggcgccgccgtcgtcgaggaaggggaaggtcaggagcaaggaggaggagaagaagtgcgcggtggagtccgacgtccggtcgttcagatacggaccgagcaacaccccgacgacgacccagctggactccgagcccgtgtcgccgcgaaacctcatgaggtcgttctcggcgccggtgtccgggacgaccttcgtgaagctcctctcggaggagccgcgggtgctgaccggagcgaggctgcagcgcaagcaggaaggccacgggagcagcaggccagcgtcgtcggaggagaggaaagggaggaaggacgcgttcagcatcagaggcaaggtgtccaacctgaggcagaactttgggctcagagccaagctgttcggcaagaagttccacgcctccgacgagccgttccccgacgacctcccgcccatcggcaccctcgtcaccgcaccatcggtcctcatacaccccggcgtcctgcaggagaactccaccgaggtaccaccgagcccggcgtcatggtgcagcagcccgcctgacgagatgagcaggggaggctacccaagccctgtctcgccattggaggcatcctttagcgagcaccggtctcccatgaggacggaagccaaagacatggcttcagctgcttctgaaccaggagaacaagcccatgctgaagaggggcgcgccgagacaagtcctgtcctggacgagcaggacgacggcgacatggacgatacagatcaccccatgaagtccttcgtcagagctgttctcgtcgtcgccggcatgtacgggcggaggcacaaccctggcaacgccaccatgtcagagtgcgaggtcaagcctatccccaagtgggtgctggaggaagtcgtgtccccgtcctcagccccggcgggcagcggcgcggcagccgtcatggaccaccggctcctcttcgacctcgtcaacgaggcgctgccgggagccgtccgggcctccacgacgctgtgcgcgttcgacaagtgccacgccatggcgccaaggagagcctccggtggcaaggcgctgctagaggcgctgtggaagtccatgcaggtgtggatagagccgccgagcgaccgcaggacggcgagctctgcctccgtggacgtgctgatcggccgtgacctgagcgtgtcggcgtggcacggcgcgttccgcgaggacgcggacgcgctggctggggacgtggaggcggagctgctggacgagctgctcgaagagacggtgtgggacgtgctcctcaatgtgggggactcatgatcggatcgtatgcctcttctgacgagtatacttgtacattttggggtgcctttttttctgcctcttttgggtgcttgccgggtttgtgaacggtgttgcattggcgagtgagatatgtaactatgcttgcgtgtggaagaatgctgaatttacactgagaaatgcttaaagaagagagagaaaaagatgaataataaaaggaacagctgtc

SEQ ID NO: 6327 - DNA, 3441 bp, Zea Mays
ctctcttctcttctcttctcttctcttctctcgccgttcgcgctgtgctctggttctgctgtctggtcggtcctgctgtcgaggctgcattgcatatttgcatgcacaggagcggctgcagggaaggagtgagaggagcaggatgggtaggtgggcgggtgagggcaaaaggaagacttcgcttttcgctttcccggctgttgctgttgctttccttccccttctaatcatcccttctcctcctccctagttattatcgtcgtgccaccataagcgcggcctcgcgccaacaagaacctcggcctcgggaggcagcagtagcaccgccgggggaggcgcagcgcagcgcaacggccggcgccgggacgagagatcctcgaatgtacatgacaaggaaacttttccgtccagctgacccctctctgatctcgccaccgaagcgcacgctggacacccgtggttggtggcaccatgctgcagtacctggacttctcgcacgccagcacctcaaggaagtgggcgcacaggagacagggcgacggacttgaagctccaaggaacagcatggagttcgctttggaggcttcccacagctatggcgtgtttcaggaagatgttccgcactatccctgcaatatgaggcagtacccaaaatcagggctcaaccacagctttaacccagtcaagaagctgatccaggaggacatctcgttccgaacgaatgaagtccagaagaggcccggcggcgtcatcgccagactgatgggcatggaatcgcctccactgaacgcagctactgaatccatcagtcgttcggagatcaccccgagaccaacaatgccaagaagagatcctcctgaaagggagacctcagccaagcatgtctccttcgtgcagcacggcaacagggactccaccaagcaggcgtcaaagcaggagatccgagcctatggcgaggagagggacgtgtttgggcagcagaacaagaggggcaacgagtggagtaagccgcagccgcgggagcacccgcaggaggaggagctgcagaagttcaagaaggagttcgaggcgtggcaggcgagcagggcgtgggagcactcgagaagcttcgagctggagagtagcaccctcggcgacgacgatgacgacggcaggtgcacggacatcgtgccgtacaggtaccagcaccaccaccaccaccaccacaaggggaaagatgccagccatggcggcaagcacatacgctcctccaacgaggacgtgcattgttggagaagaagcagcaaggagagcggcacgtccatctccgggagccgtacgttctctctgacgaccagcgcagacgccgccgcctgctccacgaggctgccgctctccaggttctaccacgaggaggagaggtcgctgtcgccgacgaggatcgtgatcctcaagccctgccccgagctgagcgcggacgacgtcgaggagtcctcgctcgggtcgccggagctggtgaagaaggagaacaacatggaggccttcctggaggaggtcaagaagaggctcaagatcgagctcgagggcggggtggcctccgacgacaaggcggaccgccgttggttcgccgccgcagccgccgccgacgttattccggccgacccgaagcagatcgcgcggagcatcgccaaccagatcagggagaacgtcacgagggacatgcacccggcgctgctgcggtcggagtccacgcgctcgtaccgcagcgacgtgccgttcgacgggcagggacagatggattacatcggccgagacgccaggaggcagctctccgacagctcaagaacgtgctgaggagggacccgccggacgccgagacgcccttctcgttctcccaccggagaagggccacctcgacgtcgttcgacgaggagccaacgaggcccaagccgacgaggcacgaggtggcgccgccgtcgtcgaggaaggggaaggtcaggagcaaggaggaggagaagaagtgcgcggtggagtccgacgtccggtcgttcagatacggaccgagcaacaccccgacgacgacccagctggactccgagcccgtgtcgccgcgaaacctcatgaggtcgttctcggcgccggtgtccgggacgaccttcgtgaagctcctctcggaggagccgcgggtgctgaccggagcgaggctgcagcgcaagcaggaaggccacgggagcagcaggccagcgtcgtcggaggagaggaaagggaggaaggacgcgttcagcatcagaggcaaggtgtccaacctgaggcagaactttgggctcagagccaagctgttcggcaagaagttccacgcctccgacgagccgttccccgacgacctcccgcccatcggcaccctcgtcaccgcaccatcggtcctcatacaccccggcgtcctgcaggagaactccaccgaggtaccaccgagcccggcgtcatggtgcagcagcccgcctgacgagatgagcaggggaggctacccaagccctgtctcgccattggaggcatcctttagcgagcaccggtctcccatgaggacggaagccaaagacatggcttcagctgcttctgaaccaggagaacaagcccatgctgaagaggggcgcgccgagacaagtcctgtcctggacgagcaggacgacggcgacatggacgatacagatcaccccatgaagtccttcgtcagagctgttctcgtcgtcgccggcatgtacgggcggaggcacaaccctggcaacgccaccatgtcagagtgcgaggtcaagcctatccccaagtgggtgctggaggaagtcgtgtccccgtcctcagccccggcgggcagcggcgcggcagccgtcatggaccaccggctcctcttcgacctcgtcaacgaggcgctgccgggagccgtccgggcctccacgacgctgtgcgcgttcgacaagtgccacgccatggcgccaaggagagcctccggtggcaaggcgctgctagaggcgctgtggaagtccatgcaggtgtggatagagccgccgagcgaccgcaggacggcgagctctgcctccgtggacgtgctgatcggccgtgacctgagcgtgtcggcgtggcacggcgcgttccgcgaggacgcggacgcgctggctggggacgtggaggcggagctgctggacgagctgctcgaagagacggtgtgggacgtgctcctcaatgtgggggactcatgatcggatcgtatgcctcttctgacgagtatacttgtacattttggggtgcctttttttctgcctcttttgggtgcttgccgggtttgtgaacggtgttgcattggcgagtgagatatgtaactatgcttgcgtgtggaagaatgctgaatttacactgagaaatgcttaaagaagagagagaaaaagatgaataataaaaggaacagctgtc

SEQ ID NO: 6328 - DNA, 3604 bp, Zea Mays
ctggtgtcctcgcataaccgagctgtccccccggcctaaacctaaactactgtctcaggaattcagatcagatgccggccctccgctcctcatttgtctagtagtactaaccgatggctaagtaaaccatgcctcgccagctagctaatccatggcagagtcagtttaaccactgcgcgcagctcaccctgcatcttcttcccgctttcaccacctacccctaacagagcgacgcgaaggacaaggaaacttttccgtccagctgacccctctctgatctcgccaccgaagcgcacgctggacacccgtggttggtggcaccatgctgcagtacctggacttctcgcacgccagcacctcaaggaagtgggcgcacaggagacagggcgacggtatggcgatcatcagtccaaatgtccaatcctctctatccaccatccttctcagatgaactaggcctgcaatcctgcattcctcgctggacgctacagtttatagcatggtcataggaatgtaggattacatttttttattaatcaagatatccttttttttccccttgatttggtcgatatgatatctttatctgctcttttggtatgccataatcatcttccaggacttgaagctccaaggaacagcatggagttcgctttggaggcttcccacagctatggcgtgtttcaggaagatgttccgcactatccctgcaatatgaggcagtacccaaaatcagggctcaaccacagctttaacccagtcaagaagctgatccaggaggacatctcgttccgaacgaatgaagtccagaagaggcccggcggcgtcatcgccagactgatgggcatggaatcgcctccactgaacgcagctactgaatccatcagtcgttcggagatcaccccgagaccaacaatgccaagaagagatcctcctgaaagggagacctcagccaagcatgtctccttcgtgcagcacggcaacagggactccaccaagcaggcgtcaaagcaggagatccgagcctatggcgaggagagggacgtgtttgggcagcagaacaagaggggcaacgagtggagtaagccgcagccgcgggagcacccgcaggaggaggagctgcagaagttcaagaaggagttcgaggcgtggcaggcgagcagggcgtgggagcactcgagaagcttcgagctggagagtagcaccctcggcgacgacgatgacgacggcaggtgcacggacatcgtgccgtacaggtaccagcaccaccaccaccaccaccacaaggggaaagatgccagccatggcggcaagcacatacgctcctccaacgaggacgtgcattgttggagaagaagcagcaaggagagcggcacgtccatctccgggagccgtacgttctctctgacgaccagcgcagacgccgccgcctgctccacgaggctgccgctctccaggttctaccacgaggaggagaggtcgctgtcgccgacgaggatcgtgatcctcaagccctgccccgagctgagcgcggacgacgtcgaggagtcctcgctcgggtcgccggagctggtgaagaaggagaacaacatggaggccttcctggaggaggtcaagaagaggctcaagatcgagctcgagggcggggtggcctccgacgacaaggcggaccgccgttggttcgccgccgcagccgccgccgacgttattccggccgacccgaagcagatcgcgcggagcatcgccaaccagatcagggagaacgtcacgagggacatgcacccggcgctgctgcggtcggagtccacgcgctcgtaccgcagcgacgtgccgttcgacgggcagggacagatggattacatcggccgagacgccaggaggcagctctccgacagctcaagaacgtgctgaggagggacccgccggacgccgagacgcccttctcgttctcccaccggagaagggccacctcgacgtcgttcgacgaggagccaacgaggcccaagccgacgaggcacgaggtggcgccgccgtcgtcgaggaaggggaaggtcaggagcaaggaggaggagaagaagtgcgcggtggagtccgacgtccggtcgttcagatacggaccgagcaacaccccgacgacgacccagctggactccgagcccgtgtcgccgcgaaacctcatgaggtcgttctcggcgccggtgtccgggacgaccttcgtgaagctcctctcggaggagccgcgggtgctgaccggagcgaggctgcagcgcaagcaggaaggccacgggagcagcaggccagcgtcgtcggaggagaggaaagggaggaaggacgcgttcagcatcagaggcaaggtgtccaacctgaggcagaactttgggctcagagccaagctgttcggcaagaagttccacgcctccgacgagccgttccccgacgacctcccgcccatcggcaccctcgtcaccgcaccatcggtcctcatacaccccggcgtcctgcaggagaactccaccgaggtaccaccgagcccggcgtcatggtgcagcagcccgcctgacgagatgagcaggggaggctacccaagccctgtctcgccattggaggcatcctttagcgagcaccggtctcccatgaggacggaagccaaagacatggcttcagctgcttctggtaagtacacagtgccaaaaacattgtgcaggagcagtttatgccttgccacgaccatgagttctgatcagagaacctctcgcagaaccaggagaacaagcccatgctgaagaggggcgcgccgagacaagtcctgtcctggacgagcaggacgacggcgacatggacgatacagatcaccccatgaagtccttcgtcagagctgttctcgtcgtcgccggcatgtacgggcggaggcacaaccctggcaacgccaccatgtcagagtgcgaggtcaagcctatccccaagtgggtgctggaggaagtcgtgtccccgtcctcagccccggcgggcagcggcgcggcagccgtcatggaccaccggctcctcttcgacctcgtcaacgaggcgctgccgggagccgtccgggcctccacgacgctgtgcgcgttcgacaagtgccacgccatggcgccaaggagagcctccggtggcaaggcgctgctagaggcgctgtggaagtccatgcaggtgtggatagagccgccgagcgaccgcaggacggcgagctctgcctccgtggacgtgctgatcggccgtgacctgagcgtgtcggcgtggcacggcgcgttccgcgaggacgcggacgcgctggctggggacgtggaggcggagctgctggacgagctgctcgaagagacggtgtgggacgtgctcctcaatgtgggggactcatgatcggatcgtatgcctcttctgacgagtatacttgtacattttggggtgcctttttttctgcctcttttgggtgcttgccgggtttgtgaacggtgttgcattggcgagtgagatatgtaactatgcttgcgtgtggaagaatgctgaatttacactgagaaatgcttaaagaagagagagaaaaagatgaataataaaaggaacagctgtc

SEQ ID NO: 6329 - DNA, 2066 bp, Zea Mays
gtcatgtttgcaaaattctctgtgatgatgtgaacgaaggtctgaaaaaatcacagaactcactcgaacgacggtgccgccgcttgcctcgccggaccatggccgctgtgccgtcggggttcctcctcatcactggcccgccgggcgtggggaagacgacgctggtcatgcgggtgtttgaaaccctcagaggctcccacccgaacctcaacattcgcggattctatacccgagaggtgagagagggcggagaaaggatagggttcgaggttgtcacgctcgacggtagaactggaccactttcctcatgcaaggtttccaggttgctattatgcatttatgcttgttctaaattctgatattaataaggtaattgttggtatttgtttagcaccgtgtatttgggtatttggaattttgaaatgcgttatctgatactggagattgtcagtagtttaaattgtatctaacagcagcgcgaacacacttcactgaaatgtccacttcttaagtccatcttgcagaataagattcacaatatgtgtagcacatctcatatgaaggtactttcctacaagtatggtacctttactattatttagttgtttcttcagatatgataaaccactgttattagcactagcattatcaactgttactgtcataatttttcctaacccattccatcaagcatctatgtaagttcttcccaatgacatcccccttatgaccctttacttggaagaagctaatgaccttcttatgcaaattccaattatcatcaacgaagtgtgcagtcactgtaatatagtagtcttgttgttgagaagtccaacaatcagtgtgcaagtccatcgggatggaggctcaaaacgagggcaagcaatggacataaactttctaaagcctgccttctcaccaaacgcaaaaggaagttcatcttgtatgaccatttcattaaaagcttgtctaagcaactcaggatcataccttcatgcgctaacaccttgtccatcagtagcttgcaaagtaccttgcttattgtccttgttcagtttatggggattgcgcttacatgtattaaagtgctttcgcattctagatgtaccattggttgttgtatcagcccaaatattatggctgcaatacttgcactgtcccttctttaccatgttgtttgcatcctttattttgatgaaatgctaccacatttcggaacggggagccatcactttcctttcacttcctttgttttctccatcactaacttgaacaacctcaacagaaccacctgtatctcccacatttgaagcacaagcaccatcaacaacaggtttcagtgcagatgacatctacaaaagaataaaatgggcaacacatgatacacatcaacaatcatcccggagtctgttagatggcctaccgtcgggaaatacaaagtagacgtagcatccttggaatcattagcagtacctgagctgcaggttaaggaagaaacagatctcttcatcattgacgaagtgggtaaaatggagctgttcagttcagcatttttccctgcggtaatgagagttattgaatccaatataccagtgttggccaccatacccattcctaggcagggccgggacattccaggagttgcgaggttgcggaatcatcctggagcagctgttttcaccttagacactggtaacagagatacgatgagagatactatatgcagtcagctaaggagtttgttgcagaggtgatctgctaacctccctgtgtctatgtagccactgctttttttgacataagataacaagcaaacgatcaagagtagaagttttctctcagaacctcgagtatctgttttcaagtttagctctgaatggatgataagcatgtcgttcagtttgttcttagttccgtatgtggttattcaatcatgtatttgcattcggtgggggcaaggttttattgccacaataactctcgcttgtatggatgcggttagcatgtagtgactctacaacaggtatcacatgatttgcacaactaatttgctaataggccattat

SEQ ID NO: 6330 - DNA, 4587 bp, Zea Mays
tgaaaatagatgtgtgcagtactgtgtttcttactgctaccactttctttctcgccattggggacgcacaggcgcgggagcgtgatggcgatgtgtctctctatccctttccgcaatggggacgtttcgtccgtaggctctgcctccccggctcgccttgcgtggtgcgaggcggagtagctagtggcttccgttgtggcagccatgcgcccaaaaagatcgccaattgcgtgctcgattccttggagtacttggctgaaaatattattagcgttttcttcttcttggtgcccaggctcttacgctcgtggcctggcttccttcgctgcgctgtgctgcggcgcccagttgcggctgcgcctttcgcttgtgctgttgcgtcccccgattggcatgccaagaagtccgtgaatcactgagctgcctggtgctgcttgtccgggcatggagcaggcgccgcagacccacggcggcggcggcttgctggcctgcggcgtcatggaggacgtcgcggtcggcgacctggatctcatggaggagctgtttatggcggcgccgggcttcgatttctccgacttctcccagcccggggccggcggcgagtccccgggggtctgcttctcgccgctgttcgacatctgcagcacaaccaccacggcaactcccccgccgccgccgccgtcaggcgacgacaacagggaccagcccaccccgccgcgccgcggctgggtgttccagccccggctggaggtcgatgccacggtgaaggagcggctgcggcgcgcgctagagcgcatcgcgtcgctgtcgcagacgcagcccggggagctgctggcgcaggtctgggtccccaccgtcatcggcgaccgccaggtgctcaccacgtgcggccagcccttctggctcgactgccggaacgagcgcctcgccaactaccggacggtgtccatgaagtaccagttctccgccgacgagaccgcgcgcaccgacctggggatgcccggccgcgtcttcgtcggccgcgtccccgagtggacccccgacgtccgctacttctccaccgaggagtaccctcgcgtacaccacgcgcagtacttcgacatccgcggcagcgtcgcgctccccatcttcgagccccgcagccgggtatgcctcggcgtcgtcgagctcgtcatgaccacggagaaagtcaactataatgccgagatccagaacatctgcagcgctctcaaggaggttgatctcaggagctctgatgtttcgagtgattcccgtgcaaaggtgactgatacttcataccgagcaatcataccagagatcgttgacgttctcagaactgtttgtgagacgcacaaactgccactggcccagacgtggataccctgcatctgccaggcaaagaggggaagccgccacaccgatgaaaaactcaagtattgtgtgtctaccctggacgaagcgtgttacgtccgcgacctgaatgtaaatggctttcacgaagcttgctctgagcatcatttgttcagaggtgagggtgttgttggcagggcctttgcaacgaacgagccatgtttctctgaagacattaccgcctccagcaagatccaataccctctctctcatcatgccaaacttttcagcttaagggctgcagtggccatccggttacggagtatcagcactggaagccttgactatgtcttggaattcttcctgccagtggactgcatagagattgaagagcaacgagccatgctgaattctttgtccattacaatacagcaaacatgctacacacttcgagttgtcagcttgaaagagctggtggatgaaggatcaattgaaacaagtgctctaactccaccagaatatgacaaatctatgcatgaaaacatagatgaggtttgtagtggcattggtgttcctgcaaggacagcatcactggaaacttccgaggaggtgtcctcatggatagcaagccttgtgtgcgctcaaaataagggagtgaaagaaatggatggtgacctgccatttggattcagcaagcaagaggatgaagggtttagtgttacagctggctggcatacctctccagtaatagagcctgaaggtagcatcttttcaggcttcaagcagcatgaagaatacaaggtcaaggaggtaacttgtctcagagatccaagctcatccaacttggaaaaaactgtagaaaagagacggactaagatggagaaaactgttagcctggaagaacttcggaagcattttgctggcagcctgaaagaagctgcaaagaatttaggagtgtgccccactacactgaagagaatatgcaggcagcatggaattaatcgttggccatcacggaagattaagaaagttgggcactccctgaagaaattgcaaatggtgatcgattcagtacatggtagcgaaggaacggttcagctcagctcgctctatgaaaactttaccaagaccacatggtcagaaagagagttacaaggggatgccacttatccattgtcagaggaaaaaggtcccttggaaccttctgttcctgatcggtattgcgagggcagattcacctcgcatacttctggttctaattccctctcaccctcttgtagccaaagctcaaattccagccatggttgttccagtggttcgaaatcacaacaacatgtcagtgctcctcaacttgcagtaaagaaagaagttttcatggaggagaatcagagctccacactactcaaagctgcaagccatgctgaactgcagatgcttcctgaagaaagacttgtcaccctgcctaggtctcatagccaagtgcttttaagtgaacaaaagccagtggaaaatataacaggtatgcaaatgtctaagcctgattctctcaagataaaagccatgtacggcgaagaaagatgtatattccgactgcagcctagttggggatttgaaaagctaaaagaagaaattctaaagcggtttggcattgctcgggaggtgtatgtggacctcaagtatttggatgatgaatctgagtgggttcttctaacatgcaacgcagacctgcttgagtgtattgatgtgtacaagtcatcaagtactcaaacagtaaggatcttggtacattctagtgaccagtaagtgcctgttcctttggtcaaactggtttgtcctgacaatggcgcaaagctcatcaggatgctgaagaaagcatacaatctctctttgaagtaaagtgcttgttgacatcgcgctcagtttcaagtcataatcatatatgcaaaagcagcatctgtaaatacctacactcgtgttgtcatcccgtggtcaagtgcctagtaagttctgtatgttgctgtttggtggctgtgtggcagaattggagagaaagtgattgttggtgttccctgtcagctcttgggattggtttgtatgcagtaagctgcatacagtctttgatataacagaagatgggacttctgtacctctagttcagtttgttaacagtacaggtagttcgttgaatgtaacaaactagtgtacaatattgtaggccggagggtggaatcagtaggaatttgtcgatatgaagctttggattaggttaagtaatcacgaccaagttgcatcgcgcttgtaagttcttttggattaggttttgaaattcaaaaactcgccaaaaaaccacaagctgtggaaagtggaatcaacagaagcatgcccatgccgtcatgtgtcgttttagtgggcacaatgaaatgtcttctcaccagtggcaaaaggtgtcgagcagagagcaactggctggagcaacactacgagctcatcacctggtcaaaatgagatttggttggttcaaggtcaatgttactttttcatgttcttgcttcaaccatgcagaaggggtggtggttttaggtatcctgaataattccacagttagaaagcaggagatgtcttagtctcctagacgacaatgcagcatagatattttcttttgtttcgctcttattaatttttgtccagcagtgtatttctcttgtgttttttgaggtagccttgtgtgtaatctgtcctcggattcgcagcatgtgtgtctgtttcataactcatagtctgcatgtatgttgctacgactgtggccatcctgtccgattccaagaacattgctgaacctatatactgctgtaataatgagggatcaatcgagtaaaaatgtgtactctgtggcgattagttgaatgaagctgaagaatcaatgccagtactgttctgagtcagcagctatagccttgctcaagccaagcaacgaccatgccgcatcagcaaggcctggaaaaatcatggtgcggcgacgaccggcgcgccccgggccgcggcggcaggtcccgctgccccaccgcccccctgctgcagggcctcgatgtcctcgagcgcggcgacgacgtcgtccatggaagggcggctcttgcggtcgctgttgaggcacttgccggcgagcctggcgaccccgagagcgcggccttggtgtggtactggccgtccatccgctcgtccatgaggctcttgagcttg

SEQ ID NO: 6331 - DNA, 3319 bp, Zea Mays
tccgaggagaggacgcctgtgattgcactacacaacgtgcctctcgctcgctccccacgtcgctgtgagtgagatcgatcagacggaaccaccagggcaggagcaagctgctcatctccactccatccactgttttattggcgggcgcactgcttctgcgaccagagaacggcctcgctcgtcgtcgtgccactgtgccagtgaggaggttgatctcaggagctctgatgtttcgagtgattcccgtgcaaaggtgactgatacttcataccgagcaatcataccagagatcgttgacgttctcagaactgtttgtgagacgcacaaactgccactggcccagacgtggataccctgcatctgccaggcaaagaggggaagccgccacaccgatgaaaaactcaagtattgtgtgtctaccctggacgaagcgtgttacgtccgcgacctgaatgtaaatggctttcacgaagcttgctctgagcatcatttgttcagaggtgagggtgttgttggcagggcctttgcaacgaacgagccatgtttctctgaagacattaccgcctccagcaagatccaataccctctctctcatcatgccaaacttttcagcttaagggctgcagtggccatccggttacggagtatcagcactggaagccttgactatgtcttggaattcttcctgccagtggactgcatagagattgaagagcaacgagccatgctgaattctttgtccattacaatacagcaaacatgctacacacttcgagttgtcagcttgaaagagctggtggatgaaggatcaattgaaacaagtgctctaactccaccagaatatgacaaatctatgcatgaaaacatagatgaggtttgtagtggcattggtgttcctgcaaggacagcatcactggaaacttccgaggaggtgtcctcatggatagcaagccttgtgtgcgctcaaaataagggagtgaaagaaatggatggtgacctgccatttggattcagcaagcaagaggatgaagggtttagtgttacagctggctggcatacctctccagtaatagagcctgaaggtagcatcttttcaggcttcaagcagcatgaagaatacaaggtcaaggaggtaacttgtctcagagatccaagctcatccaacttggaaaaaactgtagaaaagagacggactaagatggagaaaactgttagcctggaagaacttcggaagcattttgctggcagcctgaaagaagctgcaaagaatttaggagtgtgccccactacactgaagagaatatgcaggcagcatggaattaatcgttggccatcacggaagattaagaaagttgggcactccctgaagaaattgcaaatggtgatcgattcagtacatggtagcgaaggaacggttcagctcagctcgctctatgaaaactttaccaagaccacatggtcagaaagagagttacaaggggatgccacttatccattgtcagaggaaaaaggtcccttggaaccttctgttcctgatcggtattgcgagggcagattcacctcgcatacttctggttctaattccctctcaccctcttgtagccaaagctcaaattccagccatggttgttccagtggttcgaaatcacaacaacatgtcagtgctcctcaacttgcagtaaagaaagaagttttcatggaggagaatcagagctccacactactcaaagctgcaagccatgctgaactgcagatgcttcctgaagaaagacttgtcaccctgcctaggtctcatagccaagtgcttttaagtgaacaaaagccagtggaaaatataacaggtatgcaaatgtctaagcctgattctctcaagataaaagccatgtacggcgaagaaagatgtatattccgactgcagcctagttggggatttgaaaagctaaaagaagaaattctaaagcggtttggcattgctcgggaggtgtatgtggacctcaagtatttggatgatgaatctgagtgggttcttctaacatgcaacgcagacctgcttgagtgtattgatgtgtacaagtcatcaagtactcaaacagtaaggatcttggtacattctagtgaccaaattggagagaaagtgattgttggtgttccctgtcagctcttgggattggtttgtatgcagtaagctgcatacagtctttgatataacagaagatgggacttctgtacctctagttcagtttgttaacagtacaggtagttcgttgaatgtaacaaactagtgtacaatattgtaggccggagggtggaatcagtaggaatttgtcgatatgaagctttggattaggttaagtaatcacgaccaagttgcatcgcgcttgtaagttcttttggattaggttttgaaattcaaaaactcgccaaaaaaccacaagctgtggaaagtggaatcaacagaagcatgcccatgccgtcatgtgtcgttttagtgggcacaatgaaatgtcttctcaccagtggcaaaaggtgtcgagcagagagcaactggctggagcaacactacgagctcatcacctggtcaaaatgagatttggttggttcaaggtcaatgttactttttcatgttcttgcttcaaccatgcagaaggggtggtggttttaggtatcctgaataattccacagttagaaagcaggagatgtcttagtctcctagacgacaatgcagcatagatattttcttttgtttcgctcttattaatttttgtccagcagtgtatttctcttgtgttttttgaggtagccttgtgtgtaatctgtcctcggattcgcagcatgtgtgtctgtttcataactcatagtctgcatgtatgttgctacgactgtggccatcctgtccgattccaagaacattgctgaacctatatactgctgtaataatgagggatcaatcgagtaaaaatgtgtactctgtggcgattagttgaatgaagctgaagaatcaatgccagtactgttctgagtcagcagctatagccttgctcaagccaagcaacgaccatgccgcatcagcaaggcctggaaaaatcatggtgcggcgacgaccggcgcgccccgggccgcggcggcaggtcccgctgccccaccgcccccctgctgcagggcctcgatgtcctcgagcgcggcgacgacgtcgtccatggaagggcggctcttgcggtcgctgttgaggcacttgccggcgagcctggcgaccccgagagcgcggccttggtgtggtactggccgtccatccgctcgtccatgaggctcttgagcttg

SEQ ID NO: 6332 - DNA, 4432 bp, Zea Mays
tccgaggagaggacgcctgtgattgcactacacaacgtgcctctcgctcgctccccacgtcgctgtgagtgagatcgatcagacggaaccaccagggcaggagcaagctgctcatctccactccatccactgttttattggcgggcgcactgcttctgcgaccagagaacggcctcgctcgtcgtcgtgccactgtgccagtgaggcgccgcagacccacggcggcggcggcttgctggcctgcggcgtcatggaggacgtcgcggtcggcgacctggatctcatggaggagctgtttatggcggcgccgggcttcgatttctccgacttctcccagcccggggccggcggcgagtccccgggggtctgcttctcgccgctgttcgacatctgcagcacaaccaccacggcaactcccccgccgccgccgccgtcaggcgacgacaacagggaccagcccaccccgccgcgccgcggctgggtgttccagccccggctggaggtcgatgccacggtgaaggagcggctgcggcgcgcgctagagcgcatcgcgtcgctgtcgcagacgcagcccggggagctgctggcgcaggtctgggtccccaccgtcatcggcgaccgccaggtgctcaccacgtgcggccagcccttctggctcgactgccggaacgagcgcctcgccaactaccggacggtgtccatgaagtaccagttctccgccgacgagaccgcgcgcaccgacctggggatgcccggccgcgtcttcgtcggccgcgtccccgagtggacccccgacgtccgctacttctccaccgaggagtaccctcgcgtacaccacgcgcagtacttcgacatccgcggcagcgtcgcgctccccatcttcgagccccgcagccgggtatgcctcggcgtcgtcgagctcgtcatgaccacggagaaagtcaactataatgccgagatccagaacatctgcagcgctctcaagctctgcaggctgttatgccgttacactcttaacctgttcgatgaaatgcccttaggaaaagacgtgataactaccgggcacgccaatccccgaagtaatcagtcttttcaccttactttgtttggtgatgttcttgtctcagtgactgatacttcataccgagcaatcataccagagatcgttgacgttctcagaactgtttgtgagacgcacaaactgccactggcccagacgtggataccctgcatctgccaggcaaagaggggaagccgccacaccgatgaaaaactcaagtattgtgtgtctaccctggacgaagcgtgttacgtccgcgacctgaatgtaaatggctttcacgaagcttgctctgagcatcatttgttcagaggtgagggtgttgttggcagggcctttgcaacgaacgagccatgtttctctgaagacattaccgcctccagcaagatccaataccctctctctcatcatgccaaacttttcagcttaagggctgcagtggccatccggttacggagtatcagcactggaagccttgactatgtcttggaattcttcctgccagtggactgcatagagattgaagagcaacgagccatgctgaattctttgtccattacaatacagcaaacatgctacacacttcgagttgtcagcttgaaagagctggtggatgaaggatcaattgaaacaagtgctctaactccaccagaatatgacaaatctatgcatgaaaacatagatgaggtttgtagtggcattggtgttcctgcaaggacagcatcactggaaacttccgaggaggtgtcctcatggatagcaagccttgtgtgcgctcaaaataagggagtgaaagaaatggatggtgacctgccatttggattcagcaagcaagaggatgaagggtttagtgttacagctggctggcatacctctccagtaatagagcctgaaggtagcatcttttcaggcttcaagcagcatgaagaatacaaggtcaaggaggtaacttgtctcagagatccaagctcatccaacttggaaaaaactgtagaaaagagacggactaagatggagaaaactgttagcctggaagaacttcggaagcattttgctggcagcctgaaagaagctgcaaagaatttaggagtgtgccccactacactgaagagaatatgcaggcagcatggaattaatcgttggccatcacggaagattaagaaagttgggcactccctgaagaaattgcaaatggtgatcgattcagtacatggtagcgaaggaacggttcagctcagctcgctctatgaaaactttaccaagaccacatggtcagaaagagagttacaaggggatgccacttatccattgtcagaggaaaaaggtcccttggaaccttctgttcctgatcggtattgcgagggcagattcacctcgcatacttctggttctaattccctctcaccctcttgtagccaaagctcaaattccagccatggttgttccagtggttcgaaatcacaacaacatgtcagtgctcctcaacttgcagtaaagaaagaagttttcatggaggagaatcagagctccacactactcaaagctgcaagccatgctgaactgcagatgcttcctgaagaaagacttgtcaccctgcctaggtctcatagccaagtgcttttaagtgaacaaaagccagtggaaaatataacaggtatgcaaatgtctaagcctgattctctcaagataaaagccatgtacggcgaagaaagatgtatattccgactgcagcctagttggggatttgaaaagctaaaagaagaaattctaaagcggtttggcattgctcgggaggtgtatgtggacctcaagtatttggatgatgaatctgagtgggttcttctaacatgcaacgcagacctgcttgagtgtattgatgtgtacaagtcatcaagtactcaaacagtaaggatcttggtacattctagtgaccagtaagtgcctgttcctttggtcaaactggtttgtcctgacaatggcgcaaagctcatcaggatgctgaagaaagcatacaatctctctttgaagtaaagtgcttgttgacatcgcgctcagtttcaagtcataatcatatatgcaaaagcagcatctgtaaatacctacactcgtgttgtcatcccgtggtcaagtgcctagtaagttctgtatgttgctgtttggtggctgtgtggcagaattggagagaaagtgattgttggtgttccctgtcagctcttgggattggtttgtatgcagtaagctgcatacagtctttgatataacagaagatgggacttctgtacctctagttcagtttgttaacagtacaggtagttcgttgaatgtaacaaactagtgtacaatattgtaggccggagggtggaatcagtaggaatttgtcgatatgaagctttggattaggttaagtaatcacgaccaagttgcatcgcgcttgtaagttcttttggattaggttttgaaattcaaaaactcgccaaaaaaccacaagctgtggaaagtggaatcaacagaagcatgcccatgccgtcatgtgtcgttttagtgggcacaatgaaatgtcttctcaccagtggcaaaaggtgtcgagcagagagcaactggctggagcaacactacgagctcatcacctggtcaaaatgagatttggttggttcaaggtcaatgttactttttcatgttcttgcttcaaccatgcagaaggggtggtggttttaggtatcctgaataattccacagttagaaagcaggagatgtcttagtctcctagacgacaatgcagcatagatattttcttttgtttcgctcttattaatttttgtccagcagtgtatttctcttgtgttttttgaggtagccttgtgtgtaatctgtcctcggattcgcagcatgtgtgtctgtttcataactcatagtctgcatgtatgttgctacgactgtggccatcctgtccgattccaagaacattgctgaacctatatactgctgtaataatgagggatcaatcgagtaaaaatgtgtactctgtggcgattagttgaatgaagctgaagaatcaatgccagtactgttctgagtcagcagctatagccttgctcaagccaagcaacgaccatgccgcatcagcaaggcctggaaaaatcatggtgcggcgacgaccggcgcgccccgggccgcggcggcaggtcccgctgccccaccgcccccctgctgcagggcctcgatgtcctcgagcgcggcgacgacgtcgtccatggaagggcggctcttgcggtcgctgttgaggcacttgccggcgagcctggcgaccccgagagcgcggccttggtgtggtactggccgtccatccgctcgtccatgaggctcttgagcttg

SEQ ID NO: 6333 - DNA, 3564 bp, Zea Mays
cgcactccgaggagaggacgcctgtgattgcactacacaacgtgcctctcgctcgctccccacgtcgctgtgagtgagatcgatcagacggaaccaccagggcaggagcaagctgctcatctccactccatccactgttttattggcgggcgcactgcttctgcgaccagagaacggcctcgctcgtcgtcgtgccactgtgccagtgaggaggttgatctcaggagctctgatgtttcgagtgattcccgtgcaaaggtgactgatacttcataccgagcaatcataccagagatcgttgacgttctcagaactgtttgtgagacgcacaaactgccactggcccagacgtggataccctgcatctgccaggcaaagaggggaagccgccacaccgatgaaaaactcaagtattgtgtgtctaccctggacgaagcgtgttacgtccgcgacctgaatgtaaatggctttcacgaagcttgctctgagcatcatttgttcagaggtgagggtgttgttggcagggcctttgcaacgaacgagccatgtttctctgaagacattaccgcctccagcaagatccaataccctctctctcatcatgccaaacttttcagcttaagggctgcagtggccatccggttacggagtatcagcactggaagccttgactatgtcttggaattcttcctgccagtggactgcatagagattgaagagcaacgagccatgctgaattctttgtccattacaatacagcaaacatgctacacacttcgagttgtcagcttgaaagagctggtggatgaaggatcaattgaaacaagtgctctaactccaccagaatatgacaaatctatgcatgaaaacatagatgaggtttgtagtggcattggtgttcctgcaaggacagcatcactggaaacttccgaggaggtgtcctcatggatagcaagccttgtgtgcgctcaaaataagggagtgaaagaaatggatggtgacctgccatttggattcagcaagcaagaggatgaagggtttagtgttacagctggctggcatacctctccagtaatagagcctgaaggtagcatcttttcaggcttcaagcagcatgaagaatacaaggtcaaggaggtaacttgtctcagagatccaagctcatccaacttggaaaaaactgtagaaaagagacggactaagatggagaaaactgttagcctggaagaacttcggaagcattttgctggcagcctgaaagaagctgcaaagaatttaggagtgtgccccactacactgaagagaatatgcaggcagcatggaattaatcgttggccatcacggaagattaagaaagttgggcactccctgaagaaattgcaaatggtgatcgattcagtacatggtagcgaaggaacggttcagctcagctcgctctatgaaaactttaccaagaccacatggtcagaaagagagttacaaggggatgccacttatccattgtcagaggaaaaaggtcccttggaaccttctgttcctgatcggtattgcgagggcagattcacctcgcatacttctggttctaattccctctcaccctcttgtagccaaagctcaaattccagccatggttgttccagtggttcgaaatcacaacaacatgtcagtgctcctcaacttgcagtaaagaaagaagttttcatggaggagaatcagagctccacactactcaaagctgcaagccatgctgaactgcagatgcttcctgaagaaagacttgtcaccctgcctaggtctcatagccaagtgcttttaagtgaacaaaagccagtggaaaatataacaggtatgcaaatgtctaagcctgattctctcaagataaaagccatgtacggcgaagaaagatgtatattccgactgcagcctagttggggatttgaaaagctaaaagaagaaattctaaagcggtttggcattgctcgggaggtgtatgtggacctcaagtatttggatgatgaatctgagtgggttcttctaacatgcaacgcagacctgcttgagtgtattgatgtgtacaagtcatcaagtactcaaacagtaaggatcttggtacattctagtgaccagtaagtgcctgttcctttggtcaaactggtttgtcctgacaatggcgcaaagctcatcaggatgctgaagaaagcatacaatctctctttgaagtaaagtgcttgttgacatcgcgctcagtttcaagtcataatcatatatgcaaaagcagcatctgtaaatacctacactcgtgttgtcatcccgtggtcaagtgcctagtaagttctgtatgttgctgtttggtggctgtgtggcagaattggagagaaagtgattgttggtgttccctgtcagctcttgggattggtttgtatgcagtaagctgcatacagtctttgatataacagaagatgggacttctgtacctctagttcagtttgttaacagtacaggtagttcgttgaatgtaacaaactagtgtacaatattgtaggccggagggtggaatcagtaggaatttgtcgatatgaagctttggattaggttaagtaatcacgaccaagttgcatcgcgcttgtaagttcttttggattaggttttgaaattcaaaaactcgccaaaaaaccacaagctgtggaaagtggaatcaacagaagcatgcccatgccgtcatgtgtcgttttagtgggcacaatgaaatgtcttctcaccagtggcaaaaggtgtcgagcagagagcaactggctggagcaacactacgagctcatcacctggtcaaaatgagatttggttggttcaaggtcaatgttactttttcatgttcttgcttcaaccatgcagaaggggtggtggttttaggtatcctgaataattccacagttagaaagcaggagatgtcttagtctcctagacgacaatgcagcatagatattttcttttgtttcgctcttattaatttttgtccagcagtgtatttctcttgtgttttttgaggtagccttgtgtgtaatctgtcctcggattcgcagcatgtgtgtctgtttcataactcatagtctgcatgtatgttgctacgactgtggccatcctgtccgattccaagaacattgctgaacctatatactgctgtaataatgagggatcaatcgagtaaaaatgtgtactctgtggcgattagttgaatgaagctgaagaatcaatgccagtactgttctgagtcagcagctatagccttgctcaagccaagcaacgaccatgccgcatcagcaaggcctggaaaaatcatggtgcggcgacgaccggcgcgccccgggccgcggcggcaggtcccgctgccccaccgcccccctgctgcagggcctcgatgtcctcgagcgcggcgacgacgtcgtccatggaagggcggctcttgcggtcgctgttgaggcacttgccggcgagcctggcgaccccgagagcgcggccttggtgtggtactggccgtccatccgctcgtccatgaggctcttgagcttg

SEQ ID NO: 6334 - DNA, 4717 bp, Zea Mays
gtggcgtcgtgcggctgcacaaacaaagatgcaggcgcagaaagagggcgcactccgaggagaggacgcctgtgattgcactacacaacgtgcctctcgctcgctccccacgtcgctgtgagtgagatcgatcagacggaaccaccagggcaggagcaagctgctcatctccactccatccactgttttattggcgggcgcactgcttctgcgaccagagaacggcctcgctcgtcgtcgtgccactgtgccagtgaggctcttacgctcgtggcctggcttccttcgctgcgctgtgctgcggcgcccagttgcggctgcgcctttcgcttgtgctgttgcgtcccccgattggcatgccaagaagtccgtgaatcactgagctgcctggtgctgcttgtccgggcatggagcaggcgccgcagacccacggcggcggcggcttgctggcctgcggcgtcatggaggacgtcgcggtcggcgacctggatctcatggaggagctgtttatggcggcgccgggcttcgatttctccgacttctcccagcccggggccggcggcgagtccccgggggtctgcttctcgccgctgttcgacatctgcagcacaaccaccacggcaactcccccgccgccgccgccgtcaggcgacgacaacagggaccagcccaccccgccgcgccgcggctgggtgttccagccccggctggaggtcgatgccacggtgaaggagcggctgcggcgcgcgctagagcgcatcgcgtcgctgtcgcagacgcagcccggggagctgctggcgcaggtctgggtccccaccgtcatcggcgaccgccaggtgctcaccacgtgcggccagcccttctggctcgactgccggaacgagcgcctcgccaactaccggacggtgtccatgaagtaccagttctccgccgacgagaccgcgcgcaccgacctggggatgcccggccgcgtcttcgtcggccgcgtccccgagtggacccccgacgtccgctacttctccaccgaggagtaccctcgcgtacaccacgcgcagtacttcgacatccgcggcagcgtcgcgctccccatcttcgagccccgcagccgggtatgcctcggcgtcgtcgagctcgtcatgaccacggagaaagtcaactataatgccgagatccagaacatctgcagcgctctcaagctctgcaggctgttatgccgttacactcttaacctgttcgatgaaatgcccttaggaaaagacgtgataactaccgggcacgccaatccccgaagtaatcagtcttttcaccttactttgtttggtgatgttcttgtctcagtaagattctgcttcctcatgcgcaggaggttgatctcaggagctctgatgtttcgagtgattcccgtgcaaaggtgactgatacttcataccgagcaatcataccagagatcgttgacgttctcagaactgtttgtgagacgcacaaactgccactggcccagacgtggataccctgcatctgccaggcaaagaggggaagccgccacaccgatgaaaaactcaagtattgtgtgtctaccctggacgaagcgtgttacgtccgcgacctgaatgtaaatggctttcacgaagcttgctctgagcatcatttgttcagaggtgagggtgttgttggcagggcctttgcaacgaacgagccatgtttctctgaagacattaccgcctccagcaagatccaataccctctctctcatcatgccaaacttttcagcttaagggctgcagtggccatccggttacggagtatcagcactggaagccttgactatgtcttggaattcttcctgccagtggactgcatagagattgaagagcaacgagccatgctgaattctttgtccattacaatacagcaaacatgctacacacttcgagttgtcagcttgaaagagctggtggatgaaggatcaattgaaacaagtgctctaactccaccagaatatgacaaatctatgcatgaaaacatagatgaggtttgtagtggcattggtgttcctgcaaggacagcatcactggaaacttccgaggaggtgtcctcatggatagcaagccttgtgtgcgctcaaaataagggagtgaaagaaatggatggtgacctgccatttggattcagcaagcaagaggatgaagggtttagtgttacagctggctggcatacctctccagtaatagagcctgaaggtagcatcttttcaggcttcaagcagcatgaagaatacaaggtcaaggaggtaacttgtctcagagatccaagctcatccaacttggaaaaaactgtagaaaagagacggactaagatggagaaaactgttagcctggaagaacttcggaagcattttgctggcagcctgaaagaagctgcaaagaatttaggagtgtgccccactacactgaagagaatatgcaggcagcatggaattaatcgttggccatcacggaagattaagaaagttgggcactccctgaagaaattgcaaatggtgatcgattcagtacatggtagcgaaggaacggttcagctcagctcgctctatgaaaactttaccaagaccacatggtcagaaagagagttacaaggggatgccacttatccattgtcagaggaaaaaggtcccttggaaccttctgttcctgatcggtattgcgagggcagattcacctcgcatacttctggttctaattccctctcaccctcttgtagccaaagctcaaattccagccatggttgttccagtggttcgaaatcacaacaacatgtcagtgctcctcaacttgcagtaaagaaagaagttttcatggaggagaatcagagctccacactactcaaagctgcaagccatgctgaactgcagatgcttcctgaagaaagacttgtcaccctgcctaggtctcatagccaagtgcttttaagtgaacaaaagccagtggaaaatataacaggtatgcaaatgtctaagcctgattctctcaagataaaagccatgtacggcgaagaaagatgtatattccgactgcagcctagttggggatttgaaaagctaaaagaagaaattctaaagcggtttggcattgctcgggaggtgtatgtggacctcaagtatttggatgatgaatctgagtgggttcttctaacatgcaacgcagacctgcttgagtgtattgatgtgtacaagtcatcaagtactcaaacagtaaggatcttggtacattctagtgaccagtaagtgcctgttcctttggtcaaactggtttgtcctgacaatggcgcaaagctcatcaggatgctgaagaaagcatacaatctctctttgaagtaaagtgcttgttgacatcgcgctcagtttcaagtcataatcatatatgcaaaagcagcatctgtaaatacctacactcgtgttgtcatcccgtggtcaagtgcctagtaagttctgtatgttgctgtttggtggctgtgtggcagaattggagagaaagtgattgttggtgttccctgtcagctcttgggattggtttgtatgcagtaagctgcatacagtctttgatataacagaagatgggacttctgtacctctagttcagtttgttaacagtacaggtagttcgttgaatgtaacaaactagtgtacaatattgtaggccggagggtggaatcagtaggaatttgtcgatatgaagctttggattaggttaagtaatcacgaccaagttgcatcgcgcttgtaagttcttttggattaggttttgaaattcaaaaactcgccaaaaaaccacaagctgtggaaagtggaatcaacagaagcatgcccatgccgtcatgtgtcgttttagtgggcacaatgaaatgtcttctcaccagtggcaaaaggtgtcgagcagagagcaactggctggagcaacactacgagctcatcacctggtcaaaatgagatttggttggttcaaggtcaatgttactttttcatgttcttgcttcaaccatgcagaaggggtggtggttttaggtatcctgaataattccacagttagaaagcaggagatgtcttagtctcctagacgacaatgcagcatagatattttcttttgtttcgctcttattaatttttgtccagcagtgtatttctcttgtgttttttgaggtagccttgtgtgtaatctgtcctcggattcgcagcatgtgtgtctgtttcataactcatagtctgcatgtatgttgctacgactgtggccatcctgtccgattccaagaacattgctgaacctatatactgctgtaataatgagggatcaatcgagtaaaaatgtgtactctgtggcgattagttgaatgaagctgaagaatcaatgccagtactgttctgagtcagcagctatagccttgctcaagccaagcaacgaccatgccgcatcagcaaggcctggaaaaatcatggtgcggcgacgaccggcgcgccccgggccgcggcggcaggtcccgctgccccaccgcccccctgctgcagggcctcgatgtcctcgagcgcggcgacgacgtcgtccatggaagggcggctcttgcggtcgctgttgaggcacttgccggcgagcctggcgaccccgagagcgcggccttggtgtggtactggccgtccatccgctcgtccatgaggctcttgagcttg

SEQ ID NO: 6335 - DNA, 4589 bp, Zea Mays
gcgctgcgctggactggaccgggagattccatcgccgtcgtggcgtcgtgcggctgcacaaacaaagatgcaggcgcagaaagagggcgcactccgaggagaggacgcctgtgattgcactacacaacgtgcctctcgctcgctccccacgtcgctgtgagtgagatcgatcagacggaaccaccagggcaggagcaagctgctcatctccactccatccactgttttattggcgggcgcactgcttctgcgaccagagaacggcctcgctcgtcgtcgtgccactgtgccagtgaggctcttacgctcgtggcctggcttccttcgctgcgctgtgctgcggcgcccagttgcggctgcgcctttcgcttgtgctgttgcgtcccccgattggcatgccaagaagtccgtgaatcactgagctgcctggtgctgcttgtccgggcatggagcaggcgccgcagacccacggcggcggcggcttgctggcctgcggcgtcatggaggacgtcgcggtcggcgacctggatctcatggaggagctgtttatggcggcgccgggcttcgatttctccgacttctcccagcccggggccggcggcgagtccccgggggtctgcttctcgccgctgttcgacatctgcagcacaaccaccacggcaactcccccgccgccgccgccgtcaggcgacgacaacagggaccagcccaccccgccgcgccgcggctgggtgttccagccccggctggaggtcgatgccacggtgaaggagcggctgcggcgcgcgctagagcgcatcgcgtcgctgtcgcagacgcagcccggggagctgctggcgcaggtctgggtccccaccgtcatcggcgaccgccaggtgctcaccacgtgcggccagcccttctggctcgactgccggaacgagcgcctcgccaactaccggacggtgtccatgaagtaccagttctccgccgacgagaccgcgcgcaccgacctggggatgcccggccgcgtcttcgtcggccgcgtccccgagtggacccccgacgtccgctacttctccaccgaggagtaccctcgcgtacaccacgcgcagtacttcgacatccgcggcagcgtcgcgctccccatcttcgagccccgcagccgggtatgcctcggcgtcgtcgagctcgtcatgaccacggagaaagtcaactataatgccgagatccagaacatctgcagcgctctcaaggaggttgatctcaggagctctgatgtttcgagtgattcccgtgcaaaggtgactgatacttcataccgagcaatcataccagagatcgttgacgttctcagaactgtttgtgagacgcacaaactgccactggcccagacgtggataccctgcatctgccaggcaaagaggggaagccgccacaccgatgaaaaactcaagtattgtgtgtctaccctggacgaagcgtgttacgtccgcgacctgaatgtaaatggctttcacgaagcttgctctgagcatcatttgttcagaggtgagggtgttgttggcagggcctttgcaacgaacgagccatgtttctctgaagacattaccgcctccagcaagatccaataccctctctctcatcatgccaaacttttcagcttaagggctgcagtggccatccggttacggagtatcagcactggaagccttgactatgtcttggaattcttcctgccagtggactgcatagagattgaagagcaacgagccatgctgaattctttgtccattacaatacagcaaacatgctacacacttcgagttgtcagcttgaaagagctggtggatgaaggatcaattgaaacaagtgctctaactccaccagaatatgacaaatctatgcatgaaaacatagatgaggtttgtagtggcattggtgttcctgcaaggacagcatcactggaaacttccgaggaggtgtcctcatggatagcaagccttgtgtgcgctcaaaataagggagtgaaagaaatggatggtgacctgccatttggattcagcaagcaagaggatgaagggtttagtgttacagctggctggcatacctctccagtaatagagcctgaaggtagcatcttttcaggcttcaagcagcatgaagaatacaaggtcaaggaggtaacttgtctcagagatccaagctcatccaacttggaaaaaactgtagaaaagagacggactaagatggagaaaactgttagcctggaagaacttcggaagcattttgctggcagcctgaaagaagctgcaaagaatttaggagtgtgccccactacactgaagagaatatgcaggcagcatggaattaatcgttggccatcacggaagattaagaaagttgggcactccctgaagaaattgcaaatggtgatcgattcagtacatggtagcgaaggaacggttcagctcagctcgctctatgaaaactttaccaagaccacatggtcagaaagagagttacaaggggatgccacttatccattgtcagaggaaaaaggtcccttggaaccttctgttcctgatcggtattgcgagggcagattcacctcgcatacttctggttctaattccctctcaccctcttgtagccaaagctcaaattccagccatggttgttccagtggttcgaaatcacaacaacatgtcagtgctcctcaacttgcagtaaagaaagaagttttcatggaggagaatcagagctccacactactcaaagctgcaagccatgctgaactgcagatgcttcctgaagaaagacttgtcaccctgcctaggtctcatagccaagtgcttttaagtgaacaaaagccagtggaaaatataacaggtatgcaaatgtctaagcctgattctctcaagataaaagccatgtacggcgaagaaagatgtatattccgactgcagcctagttggggatttgaaaagctaaaagaagaaattctaaagcggtttggcattgctcgggaggtgtatgtggacctcaagtatttggatgatgaatctgagtgggttcttctaacatgcaacgcagacctgcttgagtgtattgatgtgtacaagtcatcaagtactcaaacagtaaggatcttggtacattctagtgaccagtaagtgcctgttcctttggtcaaactggtttgtcctgacaatggcgcaaagctcatcaggatgctgaagaaagcatacaatctctctttgaagtaaagtgcttgttgacatcgcgctcagtttcaagtcataatcatatatgcaaaagcagcatctgtaaatacctacactcgtgttgtcatcccgtggtcaagtgcctagtaagttctgtatgttgctgtttggtggctgtgtggcagaattggagagaaagtgattgttggtgttccctgtcagctcttgggattggtttgtatgcagtaagctgcatacagtctttgatataacagaagatgggacttctgtacctctagttcagtttgttaacagtacaggtagttcgttgaatgtaacaaactagtgtacaatattgtaggccggagggtggaatcagtaggaatttgtcgatatgaagctttggattaggttaagtaatcacgaccaagttgcatcgcgcttgtaagttcttttggattaggttttgaaattcaaaaactcgccaaaaaaccacaagctgtggaaagtggaatcaacagaagcatgcccatgccgtcatgtgtcgttttagtgggcacaatgaaatgtcttctcaccagtggcaaaaggtgtcgagcagagagcaactggctggagcaacactacgagctcatcacctggtcaaaatgagatttggttggttcaaggtcaatgttactttttcatgttcttgcttcaaccatgcagaaggggtggtggttttaggtatcctgaataattccacagttagaaagcaggagatgtcttagtctcctagacgacaatgcagcatagatattttcttttgtttcgctcttattaatttttgtccagcagtgtatttctcttgtgttttttgaggtagccttgtgtgtaatctgtcctcggattcgcagcatgtgtgtctgtttcataactcatagtctgcatgtatgttgctacgactgtggccatcctgtccgattccaagaacattgctgaacctatatactgctgtaataatgagggatcaatcgagtaaaaatgtgtactctgtggcgattagttgaatgaagctgaagaatcaatgccagtactgttctgagtcagcagctatagccttgctcaagccaagcaacgaccatgccgcatcagcaaggcctggaaaaatcatggtgcggcgacgaccggcgcgccccgggccgcggcggcaggtcccgctgccccaccgcccccctgctgcagggcctcgatgtcctcgagcgcggcgacgacgtcgtccatggaagggcggctcttgcggtcgctgttgaggcacttgccggcgagcctggcgaccccgagagcgcggccttggtgtggtactggccgtccatccgctcgtccatgaggctcttgagcttg

SEQ ID NO: 6336 - DNA, 1301 bp, Zea Mays
aaacccttctgtcctcccttcgcccggtccaccctctcgcggccgccaggagaagccgccgccacagcaggcgacaaagatgggcaacaaattttgggctcctaagttttagggggggttcgtcaagacccagaagaccaatgcgtacttcaagcgtttccaagtgaagttcaagagaaggcgtgctggtaagacagactacagggcaaggataaggttgattaaccaagacaagaacaagtacaatacacccaaataccgatttattgtgcgatttaccaacaaggacatcattgcacaaatcgtatctgcaagtatcacgggtgatattattcttgctgctgcatattcccgtgagctgccacgatacggtctagaagttggtctgaccaactatgctgcagcctactgcactggtcttcttttggctcgtcgtgttctcaagatccgtgatttggatcaggagtatgagggcaatgttgaggccactggtgaggacttctctgtcgagccagcggaagagaggaggcctttccgtgccctcttagatgtcggccttattaggactactactggaaaccgtgtctttggtgccctcaagggagctttggatggtggtctagatattcctcacagcgataagaggtttgctggcttcaagaaggatgataagcagctggatgctgatatccaccgcaagtacatctatggtctccatgttgctgagtatatgaagaatctggctgacgaggagcccgagaagtaccaggctcacttcagcgagtacatcaagaaggggattgaagccgatgacatggaagctctgtacaagaaggtccatgcggccatccgtgctgatcctagcatggccaagtcaacaaaggcgcaaccaaaggagcacaagaggtacaaccccaagaagttgacctatgagcagagaaaggccagactcgtggaaaggctcaacgccctcaattcctcgggtggtgtcgatgatgatgaggatgacgagtgaagtgctatcctatttggcgatcagaacttgcgcaatggcatttgttgttccctttactcctgtaacaggcatttttttgtttgagattagagctggatatatggggttcacgatgtgctgccggttgaccttgctctttttatccctggattttgtcagtctttgggctgaaacacaaattttggaatctcctcaattcccagggatgaatggacgtgtagctcacatgggacaagatccgcgtcacgtcttctactgaaaacaaaaaaaaaatctgtactctttg

SEQ ID NO: 6337 - DNA, 788 bp, Zea Mays
caacagcttttagtggccagaaactaacaacaaggtgaaactctagaaccctaaacccttctgtcctcccttcgcccggtccaccctctcgcggccgccaggagaagccgccgccacagcaggcgacaaagatgggggggttcgtcaagacccagaagaccaatgcgtacttcaagcgtttccaagtgaagttcaagagaaggcgtgctggtaagacagactacagggcaaggataaggttgattaaccaagacaagaacaagtacaatacacccaaataccgatttattgtgcgatttaccaacaaggacatcattgcacaaatcgtatctgcaagtatcacgggtgatattattcttgctgctgcatattcccgtgagctgccacgatacggtctagaagttggtctgaccaactatgctgcagcctactgcactggtcttcttttggctcgtcgtgttctcaagatccgtgatttggatcaggagtatgagggcaatgttgaggccactggtgaggacttctctgtcgagccagcggaagagaggaggcctttccgtgccctcttagatgtcggccttattaggactactactggaaaccgtgtctttggtgccctcaagggagctttggatggtggtctagatattcctcacagcgataagaggtttgctggcttcaagaaggatgataagcagctggatgctgatatccaccgcaagtacatctatggtctccatgttgctgagtatatgaaggtgctctatttgggggctgactaaattcca

SEQ ID NO: 6338 - DNA, 2215 bp, Zea Mays
ctgcgtgtggtgcgttgccttcttcctcctcgcacacgccaggcacgagaccaacacccacagcgcacgcactccaaatagcgagccaaaggcgggccgaggccacgagtcctccgcctctcctccgccgcgtcgctcgcgctccaggcacgccgaaagccgaatcggggccgcgaggcagcctccccgggcggatcgaccccagggccaggggcatgggcggaggggacgccgacgccggcggcgagcccgcggccgcgcaggccacgctgcacatccggtgcaccaacggctccaagttcgccgtgcgggccgacctgggcgccaccgtgggaacgttcaaggcgatcgtagccgatagctgcgacgtgccggcgccgcagcagcggctgatctacaagggccggatcttgaaggacgagcaaaccctagccagctacggtgtggagacagaccatacaatccacatggtacgtggtgctgcgccaccaccagcatccactgcacctgcagccaaccaagaacctaccactgctgctcctgccagttccccagcagcaggattgggtggcttgttgcaaaatctgggtgctacaggggctgctgctaacagtgggggtttgggtttgtttggatctggcctccctgaattagaccacatgcaacaacagctagctgaaaatcctaacttgatgagggaaataatgaatatgccactcatgcagaatttaatgaacagtcctgaactgatacgcagtataataatgaacaaccctcaaatgcgcgagctcattgatcgcaatccggatcttgctcatgtcctcaatgatccaagcatcatgcgccagacttttgaagcagttcggaatcctgaactcatgagggagatgatgcggaacacagacagagccatgagcaacattgaatcttctccagagggattcaacatgctccgtcgcatgtatgaaactgttcaagagccttttctgaatgcgacaacaatgggtagcgagggtgatcgaaattcgaatccatttgctgcacttctaggaaatcaggggtctaaccaagcaagagactcagctgcaaatggaacaactacagcttcagacaccacatcaggggctccagctccaaatactaatccacttccgaatccttggggtccaaatgcaagatcccctcctgctaccaacactaggagtactacagcaggtggcccaggagggttgggttcagcagattttggaagtactcttggtgccagtggtggtggctctgatgctaccttcttgactcaagttttgcaaaacccaactatgatgcagatgatgcagaacattatgtctaatcctcagtccatgaatcagctgcttaatatgaatccaaatgtacgtaacatgatggaatccaatactcaaatgagagaaatgattcagaatccagaatttattcgccagttgacgtctcctgaaacattgcagcaattaatttcattccagcagtctttgatgtcacaacttggccaacaacaaactggacaggagcggacacaatcagcctctggtgcagtgccaccagaagaactgtatgcaacacaattagctcagctccaagaaatgggtttttttgacacacaggagaacatccgagccttggccgccactgctggaaatgttcatgctgcagtggagcgacttcttggaaacatgggccaatagaatatgatgacgaacataactgtgttctgatccatgcgatctgtagttggcattgtgagattatgtctggttcattggttttagacctgagattgagaggcggcatctagattctgtgtttaaggatgaataaagagtgtaccggtggaaccttacatataaatgtgggctggtgtcatggttaaaattgttgttgttggtacattgggttgctgtacatatggatcttttgcaatcttatttgcattgtacatggacaatgttttatgtaagagctgattccgtgaccaggggtcacggagggattggaggggattgaaagagaaatgaactaatttcccctcaacccctccaatctctttgtgatccctggtcatcaaatcagccctaaaggggtgggggtatgtagtactaacgatgttgtggtttcactttggattgaagctggtacaaaataaagctaaatgaacaggctaacgtgaactcataaaaaa

SEQ ID NO: 6339 - DNA, 2301 bp, Zea Mays
ctgcgtgtggtgcgttgccttcttcctcctcgcacacgccaggcacgagaccaacacccacagcgcacgcactccaaatagcgagccaaaggcgggccgaggccacgagtcctccgcctctcctccgccgcgtcgctcgcgctccaggcacgccgaaagccgaatcggggccgcgaggcagcctccccgggcggatcgaccccagggccaggggcatgggcggaggggacgccgacgccggcggcgagcccgcggccgcgcaggccacgctgcacatccggtgcaccaacggctccaagttcgccgtgcgggccgacctgggcgccaccgtgggaacgttcaaggcgatcgtagccgatagctgcgacgtgccggcgccgcagcagcggctgatctacaagggccggatcttgaaggacgagcaaaccctagccagctacggtgtggagacagaccatacaatccacatggtacgtggtgctgcgccaccaccagcatccactgcacctgcagccaaccaagaacctaccactgctgctcctgccagttccccagcagcaggattgggtggcttgttgcaaaatctgggtgctacaggggctgctgctaacagtgggggtttgggtttgtttggatctggcctccctgaattagaccacatgcaacaacagctagctgaaaatcctaacttgatgagggaaataatgaatatgccactcatgcagaatttaatgaacagtcctgaactgatacgcagtataataatgaacaaccctcaaatgcgcgagctcattgatcgcaatccggatcttgctcatgtcctcaatgatccaagcatcatgcgccagacttttgaagcagttcggaatcctgaactcatgagggagatgatgcggaacacagacagagccatgagcaacattgaatcttctccagagggattcaacatgctccgtcgcatgtatgaaactgttcaagagccttttctgaatgcgacaacaatgggtagcgagggtgatcgaaattcgaatccatttgctgcacttctaggaaatcaggggtctaaccaagcaagagactcagctgcaaatggaacaactacagcttcagacaccacatcaggggctccagctccaaatactaatccacttccgaatccttggggtccaaatggagcagcaagatcccctcctgctaccaacactaggagtactacagcaggtggcccaggagggttgggttcagcagattttggaagtactcttggtgccagtggtggtggctctgatgctaccttcttgactcaagttttgcaaaacccaactatgatgcagatgatgcagaacattatgtctaatcctcagtccatgaatcagctgcttaatatgaatccaaatgtacgtaacatgatggaatccaatactcaaatgagagaaatgattcagaatccagaatttattcgccagttgacgtctcctgaaacattcaattaatttcattccagcagtctttgatgtcacaacttggccaacaacaaactggacaggagcggacacaatcagcctctggtgcaggcaatgtgaacctcaacaccttgatgaacatgttcagtgggcttggtgctggtggtggcctaggtgttccaaatgctcctaatgtgccaccagaagaactgtatgcaacacaattagctcagctccaagaaatgggtttttttgacacacaggagaacatccgagccttggccgccactgctggaaatgttcatgctgcagtggagcgacttcttggaaacatgggccaatagaatatgatgacgaacataactgtgttctgatccatgcgatctgtagttggcattgtgagattatgtctggttcattggttttagacctgagattgagaggcggcatctagattctgtgtttaaggatgaataaagagtgtaccggtggaaccttacatataaatgtgggctggtgtcatggttaaaattgttgttgttggtacattgggttgctgtacatatggatcttttgcaatcttatttgcattgtacatggacaatgttttatgtaagagctgattccgtgaccaggggtcacggagggattggaggggattgaaagagaaatgaactaatttcccctcaacccctccaatctctttgtgatccctggtcatcaaatcagccctaaaggggtgggggtatgtagtactaacgatgttgtggtttcactttggattgaagctggtacaaaataaagctaaatgaacaggctaacgtgaactcataaaaaa

SEQ ID NO: 6340 - DNA, 2252 bp, Zea Mays
ctgcgtgtggtgcgttgccttcttcctcctcgcacacgccaggcacgagaccaacacccacagcgcacgcactccaaatagcgagccaaaggcgggccgaggccacgagtcctccgcctctcctccgccgcgtcgctcgcgctccaggcacgccgaaagccgaatcggggccgcgaggcagcctccccgggcggatcgaccccagggccaggggcatgggcggaggggacgccgacgccggcggcgagcccgcggccgcgcaggccacgctgcacatccggtgcaccaacggctccaagttcgccgtgcgggccgacctgggcgccaccgtgggaacgttcaaggcgatcgtagccgatagctgcgacgtgccggcgccgcagcagcggctgatctacaagggccggatcttgaaggacgagcaaaccctagccagctacggtgtggagacagaccatacaatccacatggtacgtggtgctgcgccaccaccagcatccactgcacctgcagccaaccaagaacctaccactgctgctcctgccagttccccagcagcaggattgggtggcttgttgcaaaatctgggtgctacaggggctgctgctaacagtgggggtttgggtttgtttggatctggcctccctgaattagaccacatgcaacaacagctagctgaaaatcctaacttgatgagggaaataatgaatatgccactcatgcagaatttaatgaacagtcctgaactgatacgcagtataataatgaacaaccctcaaatgcgcgagctcattgatcgcaatccggatcttgctcatgtcctcaatgatccaagcatcatgcgccagacttttgaagcagttcggaatcctgaactcatgagggagatgatgcggaacacagacagagccatgagcaacattgaatcttctccagagggattcaacatgctccgtcgcatgtatgaaactgttcaagagccttttctgaatgcgacaacaatgggtagcgagggtgatcgaaattcgaatccatttgctgcacttctaggaaatcaggggtctaaccaagcaagagactcagctgcaaatggaacaactacagcttcagacaccacatcaggggctccagctccaaatactaatccacttccgaatccttggggtccaaatgctggatctgcccaaggagcagcaagatcccctcctgctaccaacactaggagtactacagcaggtggcccaggagggttgggttcagcagattttggaagtactcttggtgccagtggtggtggctctgatgctaccttcttgactcaagttttgcaaaacccaactatgatgcagatgatgcagaacattatgtctaatcctcagtccatgaatcagctgcttaatatgaatccaaatgtacgtaacatgatggaatccaatactcaaatgagagaaatgattcagaatccagaatttattcgccagttgacgtctcctgaaacattgcagcaattaatttcattccagcagtctttgatgtcacaacttggccaacaacaaactggacaggagcggacacaatcagcctctggtgcaggcaatgtgaacctcaacaccttgatgaacatgttcagtgggcttggtgctggtggtggcctaggtgttccaaatgctcctaatggagaacatccgagccttggccgccactgctggaaatgttcatgctgcagtggagcgacttcttggaaacatgggccaatagaatatgatgacgaacataactgtgttctgatccatgcgatctgtagttggcattgtgagattatgtctggttcattggttttagacctgagattgagaggcggcatctagattctgtgtttaaggatgaataaagagtgtaccggtggaaccttacatataaatgtgggctggtgtcatggttaaaattgttgttgttggtacattgggttgctgtacatatggatcttttgcaatcttatttgcattgtacatggacaatgttttatgtaagagctgattccgtgaccaggggtcacggagggattggaggggattgaaagagaaatgaactaatttcccctcaacccctccaatctctttgtgatccctggtcatcaaatcagccctaaaggggtgggggtatgtagtactaacgatgttgtggtttcactttggattgaagctggtacaaaataaagctaaatgaacaggctaacgtgaactcataaaaaa

SEQ ID NO: 6341 - DNA, 2231 bp, Zea Mays
ctgcgtgtggtgcgttgccttcttcctcctcgcacacgccaggcacgagaccaacacccacagcgcacgcactccaaatagcgagccaaaggcgggccgaggccacgagtcctccgcctctcctccgccgcgtcgctcgcgctccaggcacgccgaaagccgaatcggggccgcgaggcagcctccccgggcggatcgaccccagggccaggggcatgggcggaggggacgccgacgccggcggcgagcccgcggccgcgcaggccacgctgcacatccggtgcaccaacggctccaagttcgccgtgcgggccgacctgggcgccaccgtgggaacgttcaaggcgatcgtagccgatagctgcgacgtgccggcgccgcagcagcggctgatctacaagggccggatcttgaaggacgagcaaaccctagccagctacggtgtggagacagaccatacaatccacatggtacgtggtgctgcgccaccaccagcatccactgcacctgcagccaaccaagaacctaccactgctgctcctgccagttccccagcagcaggattgggtggcttgttgcaaaatctgggtgctacaggggctgctgctaacagtgggggtttgggtttgtttggatctggcctccctgaattagaccacatgcaacaacagctagctgaaaatcctaacttgatgagggaaataatgaatatgccactcatgcagaatttaatgaacagtcctgaactgatacgcagtataataatgaacaaccctcaaatgcgcgagctcattgatcgcaatccggatcttgctcatgtcctcaatgatccaagcatcatgcgccagacttttgaagcagttcggaatcctgaactcatgagggagatgatgcggaacacagacagagccatgagcaacattgaatcttctccagagggattcaacatgctccgtcgcatgaaatcaggggtctaaccaagcaagagactcagctgcaaatggaacaactacagcttcagacaccacatcaggggctccagctccaaatactaatccacttccgaatccttggggtccaaatgctggatctgcccaaggagcagcaagatcccctcctgctaccaacactaggagtactacagcaggtggcccaggagggttgggttcagcagattttggaagtactcttggtgccagtggtggtggctctgatgctaccttcttgactcaagttttgcaaaacccaactatgatgcagatgatgcagaacattatgtctaatcctcagtccatgaatcagctgcttaatatgaatccaaatgtacgtaacatgatggaatccaatactcaaatgagagaaatgattcagaatccagaatttattcgccagttgacgtctcctgaaacattgcagcaattaatttcattccagcagtctttgatgtcacaacttggccaacaacaaactggacaggagcggacacaatcagcctctggtgcaggcaatgtgaacctcaacaccttgatgaacatgttcagtgggcttggtgctggtggtggcctaggtgttccaaatgctcctaatgtgccaccagaagaactgtatgcaacacaattagctcagctccaagaaatgggtttttttgacacacaggagaacatccgagccttggccgccactgctggaaatgttcatgctgcagtggagcgacttcttggaaacatgggccaatagaatatgatgacgaacataactgtgttctgatccatgcgatctgtagttggcattgtgagattatgtctggttcattggttttagacctgagattgagaggcggcatctagattctgtgtttaaggatgaataaagagtgtaccggtggaaccttacatataaatgtgggctggtgtcatggttaaaattgttgttgttggtacattgggttgctgtacatatggatcttttgcaatcttatttgcattgtacatggacaatgttttatgtaagagctgattccgtgaccaggggtcacggagggattggaggggattgaaagagaaatgaactaatttcccctcaacccctccaatctctttgtgatccctggtcatcaaatcagccctaaaggggtgggggtatgtagtactaacgatgttgtggtttcactttggattgaagctggtacaaaataaagctaaatgaacaggctaacgtgaactcataaaaaa

SEQ ID NO: 6342 - DNA, 1480 bp, Zea Mays
actcaaagacaggcccatgtttttgcaacggcccaacgcgcatctacatgtacgtcttcctagggttttggatgcgtcgcagataaaaagttccctccctaattacaatcttcctcagcgccgccgctcccagacaccgagcccgactgcccaaccccgatccggcgatccgtctctttcctttccttcgttctgcaggccccgatcgcttgcattcccgtcaaccatggcggcggcagcaggcggaggcgcggtgcgcgctctgtcccagaaggagcaggacatacagatgatgctcgccgccgacgtccaccttggcaccaagaactgcgatttccagacggagcgctatgtctttaaacgccgcaccgacggcatctacatcatcaatcttggcaagacatgggataaactccagcttgcagcgagggttatcgttgccatcgagaacccgcaggacatcatcgtccagtctgcccgcccatatggccagcgtgctgtcctcaagttcgctcagtacactggcgcccatgccatcgctgggaggcacacccctggtacattcactaatcagctccagacctccttcagcgagcctcgactgctcatccttactgacccaaggactgaccatcagccaatcaaggagtctgctctggggaacatcccaaccattgccttctgtgacactgactctcccatgcggtacgtcgatatcggcatcccagcgaacaacaaggggaggaacagcattggatgtctgttctggcttctgtccaggatggttctgcaaatgaggggcactatccttcctgggcacaagtgggaagtcatggtcgatctgttcttctatagagacccagaggaagcaaaggagcaggaggaggaagttgccgcggcccctgagtttgccgcaatcactgattaccaaggagctgatcagtggggtggtgaccagtggacctctgatgtggctgcaccacctgttgctcctactggtgctgattggggtgctgctccggttcctaccggtgaaggctgggatcaagccggggcccctgtacctgcggacggcactgtacctccagtggttgctcctactggttgggaccaagcagccccgccgacagcccaaggctgggagtaggcatagtctactatgagacctgtcttatgcagcttaagttcagtattttttgtgaagtctagtcttctgcagcttaagttcagtattttttgtgaagtctagatgtccagaatcttttggcatctgctatagctatgctttgctttgctttgagcacttctgttttggggctttctagctgaccctgttgtccaacgttgctggcatggaaatttttggttaatcttaaaactggaaagagcgtgtgaaacgatccttgtgactctgttattccctgagtatgtgcaagtataaatcctgatccctgctgctgtatagatcattgctagggat

SEQ ID NO: 6343 - DNA, 2095 bp, Zea Mays
ccgggccgagggcccactcatctctgagatgagatgtgagattgtgtcattgtgagcaagcaagtgcttgtccttttcagcgctgtgaccgctagtctcctggaaaccgcgtgacataacccacccttctacaagtctatataagcgagcgagcccgcgaaacaccaccaggcagatcgtgttccagtgcagcaagcagagcagagcagagcagcgtcgtgcgtccgagaagaagacgactcacgagagcagaacgagcaccgatcgatggcagtgatggccggggcggcgtccatggaggtggagcaggacctcccgggcttccggttccatcccaccgaggaggagctcctcggcttctacctctcccgcgtggtccacggcaagcagctccacttcgacatcatcggcagcctcaacatctaccgctacgacccctgggaccttcctgcgatggcgaagattggcgagagggagtggtacttcttcgtgccgcgcgaccgcaaggccggcagcggcgggcggccgaaccgcacgacggagcgcgggttctggaaggccacggggtcggacagggccatccggagctccgccgacgccaagcgggtgatcgggctcaagaagacgctcgtcttctaccaggggcgcgccccgcgcggcaccaagacggactgggtcatgaacgagtaccgcctccccgaccactccgccgccggccgcgccgctccgccgctgcctcccaaggtaatccaacgatcgtccgctccgttgcatttctgcacatgatctgcccgccatcctagctagaactcaactggcagcaaaatcacatcagacactagctagtacgtatatatatattatatgttgctggtttgggatgtaattgccaaactagtgtgcggttttgagcttgttcggctgccattttcatccagctgcagctgcaaacaaacactgttcctacagcagcaagcggcaggcggctgcagcagctgccactgtagaaactagcagccgaacaagccgtttaacactaaccggggggaggcaaattgctgatcatcttcctgtccgtgatacctctctcgtctatatatggtggtcagttcgggtaacagtcagtgatgtagacccatggacgcacgacgagacatgaagaaataggcgtggttgacttaggagttgacttgtttttgattaatagattgcatggaaactccttccatgaagtcactagtcaccgagacgaaaatggctgacatacgcttgcgtgcttccgcaggaggacatggtgatctgcaagatctacaggaaggccacgccactgaaggagctcgagcagagggcctctgccatggaggagatgcagaggcgcatcggcggggccacagcaacatccctggtccaggccgccggctccaccggcgacgactacctgtcgtcggacgacacctacgacacaagtttcctgcagttcccgtcctcgtcatctcccgcgccgtcgggcgacagctacggcgcgcccgcggccgcgcccagggaggccaagacggaggccgcggacgccacgacggtcacggtggcgtcgacgtcgtcgtcgtcctccctgctgcatgccgcgagcgtggccggcccggcggtgaggcacggtgacctgcccaccctgcaggtgccaacgcacctcggagtcgccgactggacgcagatgcaggacccgtttcagctgcgcagcccgtggcaggaccagctcttcttctctcccttagcccacctgctatactgaagtctgaactctgaagtgaggaaggtgcacgcgcaacttggaagaagtggtgaactgtatcaccgaaatgcggttcagctctgcaacggcgagccgcgatgctagcttagatgtgaattcggttgtagatatactgcacgagcaagttggaagtagaagaagagttgagtactcgtatatgctctttttatttctgcgtgatgttggtacggggcctctgacatgaaagtcataataaactagtcaaggttcattttctaatctctaacctgtacgaatctctgatttaatctctactaactattaagg

SEQ ID NO: 6344 - DNA, 1115 bp, Zea Mays
gcgacctggtgactcagtgagatagctctcaccactgcaccgggcttgcccttctatgtttcattattgaagtccatattaaatgctgagtggtttgttgaaggtgttacacttggaggtacaggcaaggaacatggagataggcaccccaagattggtcagggagctctaattggagccagtgctactatcctcggcaatattaatgtaggcgaaggtgccatgattgctgctggctcccttgttttaaaggacgtacctccccacagtatggctgtaggtaatcctgcaaaggtagttggttatacagagaaagaagatccttctttaactatgaaacatgatgcaaggagagattattttgagcatgctgccatcagattgagatgattgatacacctaatgacgagtcttctttctattcgtctgtggaatactgtggagtaaaaaaagttccaaatcgccttattggcaagaagttttgtggagttaaaaaaaggtttcgtcgtcttactcgcaggaaaccttgtgaagttaaaaaaaaaatgtttgacgaaacgcatacggatgccattccggacatttcgtcacaggcacaaggctggatagtcgatgagctctgtgtttccctttctgcccagacaaccaaatgaagatggaaaagggtcacccagggctccaaaatctagagtgtagacaagcatgtccttaatgcgccttaaattggtctggatggcacttttttgtgataaactatctatctaaaccattgactaatgtctactctactctcaacaagatcaattaattgtatatttgatattaaagttggaatgtttagtatgacaaatttaatattttaaaatagatatgcatgaaatttgatcttgatctttttctattatcaagctcatgactacgaacaaaaataaaattttacatattttttgtgcactgtttgctccctacgacaaaacaaggtgaatttttttttgaatctagatatttgtatctgaattttatatctttcatttgagatgatatgaatggtaaatttgagatttacctttaaattgacatttgaataagtatatgttttcatccctacttgtttc

SEQ ID NO: 6345 - DNA, 1390 bp, Zea Mays
cgtccgcctgccctgtcggcccgtcaccctgtcctccaggccaccgctgtgccgccactccagcagtctagcatctgccgtgtctggtaactggtgctctggaggacggccagcagcgtctgcatctctgctgctctgcatctgttgagtgttgacagtggacatcatgccttgctcacttgctgctgccaaaattggcgagggaatattgttggatcatggaacaggtctagtcattggtgaaactgctgtagttggaaactgggtttcattaatgcagggtgttacacttggaggtacaggcaaggaacatggagataggcaccccaagattggtcagggagctctaattggagccagtgctactatcctcggcaatattaatgtaggcgaaggtgccatgattgctgctggctcccttgttttaaaggacgtacctccccacagtatggctgtaggtaatcctgcaaaggtagttggttatacagagaaagaagatccttctttaactatgaaacatgatgcaaggagagattattttgagcatgctgccatcagattgagatgattgatacacctaatgacgagtcttctttctattcgtctgtggtgagcttatcattttagtcctagaacagtccatgaatggttggtgcatgaatgtcgaaggttgctgctgccctgaatgaactttttttttttgcaggaatactgtggagtaaaaaaagttccaaatcgccttattggcaagaagttttgtggagttaaaaaaaggtttcgtcgtcttactcgcaggaaaccttgtgaagttaaaaaaaaaatgtttgacgaaacgcatacggatgccattccggacatttcgtcacaggcacaaggctggatagtcgatgagctctgtgtttccctttctgcccagacaaccaaatgaagatggaaaagggtcacccagggctccaaaatctagagtgtagacaagcatgtccttaatgcgccttaaattggtctggatggcacttttttgtgataaactatctatctaaaccattgactaatgtctactctactctcaacaagatcaattaattgtatatttgatattaaagttggaatgtttagtatgacaaatttaatattttaaaatagatatgcatgaaatttgatcttgatctttttctattatcaagctcatgactacgaacaaaaataaaattttacatattttttgtgcactgtttgctccctacgacaaaacaaggtgaatttttttttgaatctagatatttgtatctgaattttatatctttcatttgagatgatatgaatggtaaatttgagatttacctttaaattgacatttgaataagtatatgttttcatccctacttgtttc

SEQ ID NO: 6346 - DNA, 1317 bp, Zea Mays
gtgcagcccgcaaccttctcagcccctgcagagcagtgctccatccgccgctgcacactttgtgcacgcacgtgccgccgccacactctagaccaccggccgccgcgcactcccgttcgtcgtggcccgccccccgtcctcctgtggctcgtcctcacgtccgccacgccgccagaccaggacccaggccgccgtcactctaggtccagctgccaaaattggcgagggaatattgttggatcatggaacaggtctagtcattggtgaaactgctgtagttggaaactgggtttcattaatgcagggtgttacacttggaggtacaggcaaggaacatggagataggcaccccaagattggtcagggagctctaattggagccagtgctactatcctcggcaatattaatgtaggcgaaggtgccatgattgctgctggctcccttgttttaaaggacgtacctccccacagtatggctgtaggtaatcctgcaaaggtagttggttatacagagaaagaagatccttctttaactatgaaacatgatgcaaggagagattattttgagcatgctgccatcagattgagatgattgatacacctaatgacgagtcttctttctattcgtctgtggaatactgtggagtaaaaaaagttccaaatcgccttattggcaagaagttttgtggagttaaaaaaaggtttcgtcgtcttactcgcaggaaaccttgtgaagttaaaaaaaaaatgtttgacgaaacgcatacggatgccattccggacatttcgtcacaggcacaaggctggatagtcgatgagctctgtgtttccctttctgcccagacaaccaaatgaagatggaaaagggtcacccagggctccaaaatctagagtgtagacaagcatgtccttaatgcgccttaaattggtctggatggcacttttttgtgataaactatctatctaaaccattgactaatgtctactctactctcaacaagatcaattaattgtatatttgatattaaagttggaatgtttagtatgacaaatttaatattttaaaatagatatgcatgaaatttgatcttgatctttttctattatcaagctcatgactacgaacaaaaataaaattttacatattttttgtgcactgtttgctccctacgacaaaacaaggtgaatttttttttgaatctagatatttgtatctgaattttatatctttcatttgagatgatatgaatggtaaatttgagatttacctttaaattgacatttgaataagtatatgttttcatccctacttgtttc

SEQ ID NO: 6347 - DNA, 1611 bp, Zea Mays
catgtattatgtaggaagctttgctcagcagaaaaggaacctattttgagtagcttcttgtatgccagtgtgctgtctcatgattgcctagagcgtgcattgagcttcgtccttgcaaataggcttgaagatccaacattgcttgctactcagctaatcgatatttttaacgatgtcatgctgaataacaaagatatatgccgctccattcgccttgatgctcaggctttcaaagatagagatccagcttgtgcccaatatagttgggcactgttatacttaaagggctaccaatcgttgcaatcatacaggatagccaatatattatggaaccagggacgcaaagttttggcattggcactgcaaagccgtattagtgaggtctttgctgtggatatacatccagctgccaaaattggcgagggaatattgttggatcatggaacaggtctagtcattggtgaaactgctgtagttggaaactgggtttcattaatgcagggtgttacacttggaggtacaggcaaggaacatggagataggcaccccaagattggtcagggagctctaattggagccagtgctactatcctcggcaatattaatgtaggcgaaggtgccatgattgctgctggctcccttgttttaaaggacgtacctccccacagtatggctgtaggtaatcctgcaaaggtagttggttatacagagaaagaagatccttctttaactatgaaacatgatgcaaggagagattattttgagcatgctgccatcagattgagatgattgatacacctaatgacgagtcttctttctattcgtctgtggtgagcttatcattttagtcctagaacagtccatgaatggttggtgcatgaatgtcgaaggttgctgctgccctgaatgaactttttttttttgcaggaatactgtggagtaaaaaaagttccaaatcgccttattggcaagaagttttgtggagttaaaaaaaggtttcgtcgtcttactcgcaggaaaccttgtgaagttaaaaaaaaaatgtttgacgaaacgcatacggatgccattccggacatttcgtcacaggcacaaggctggatagtcgatgagctctgtgtttccctttctgcccagacaaccaaatgaagatggaaaagggtcacccagggctccaaaatctagagtgtagacaagcatgtccttaatgcgccttaaattggtctggatggcacttttttgtgataaactatctatctaaaccattgactaatgtctactctactctcaacaagatcaattaattgtatatttgatattaaagttggaatgtttagtatgacaaatttaatattttaaaatagatatgcatgaaatttgatcttgatctttttctattatcaagctcatgactacgaacaaaaataaaattttacatattttttgtgcactgtttgctccctacgacaaaacaaggtgaatttttttttgaatctagatatttgtatctgaattttatatctttcatttgagatgatatgaatggtaaatttgagatttacctttaaattgacatttgaataagtatatgttttcatccctacttgtttc

SEQ ID NO: 6348 - DNA, 2143 bp, Zea Mays
ctcaccataaccgcccagccggccgccccgaacacgcatccccgtacggcgtctccccgcactcagtggccgtctcgggctcccgtcgattcactttgctcccaaccgctcttttttctactccactgtgtgcgcctttgcctctttgcgctctcacctgcccgcccgtcccgcctgcctcgccgcaagcgccaagcgcacgcgctcggctcgccgcgtcgggtcgccgcagggcgaacgaaaccctaggatcagggaggctccgggcatcgctgctcgacccccatgacgtcctgcgggtgtctgatgctcgagaaggtggagggcgacgcgtcggcgaagacgagggtgaaggccgcgccgggcgccggtgccggcgcctggtgcggctcgtgcgctggggactggcggggccggtcagaggccatcttccccatctacgtgatggggagctcgcgggagagcaccgtggcggcggcgcgcggcatagtcgactcccccgaggaccccatatgggttgccgtcaaggcggaggccaagtctgaggcagaaaaggaacctattttgagtagcttcttgtatgccagtgtgctgtctcatgattgcctagagcgtgcattgagcttcgtccttgcaaataggcttgaagatccaacattgcttgctactcagctaatcgatatttttaacgatgtcatgctgaataacaaagatatatgccgctccattcgccttgatgctcaggctttcaaagatagagatccagcttgtgcccaatatagttgggcactgttatacttaaagggctaccaatcgttgcaatcatacaggatagccaatatattatggaaccagggacgcaaagttttggcattggcactgcaaagccgtattagtgaggtctttgctgtggatatacatccagctgccaaaattggcgagggaatattgttggatcatggaacaggtctagtcattggtgaaactgctgtagttggaaactgggtttcattaatgcagacctttgatgcagggtgttacacttggaggtacaggcaaggaacatggagataggcaccccaagattggtcagggagctctaattggagccagtgctactatcctcggcaatattaatgtaggcgaaggtgccatgattgctgctggctcccttgttttaaaggacgtacctccccacagtatggctgtaggtaatcctgcaaaggtagttggttatacagagaaagaagatccttctttaactatgaaacatgatgcaaggagagattattttgagcatgctgccatcagattgagatgattgatacacctaatgacgagtcttctttctattcgtctgtggtgagcttatcattttagtcctagaacagtccatgaatggttggtgcatgaatgtcgaaggttgctgctgccctgaatgaactttttttttttgcaggaatactgtggagtaaaaaaagttccaaatcgccttattggcaagaagttttgtggagttaaaaaaaggtttcgtcgtcttactcgcaggaaaccttgtgaagttaaaaaaaaaatgtttgacgaaacgcatacggatgccattccggacatttcgtcacaggcacaaggctggatagtcgatgagctctgtgtttccctttctgcccagacaaccaaatgaagatggaaaagggtcacccagggctccaaaatctagagtgtagacaagcatgtccttaatgcgccttaaattggtctggatggcacttttttgtgataaactatctatctaaaccattgactaatgtctactctactctcaacaagatcaattaattgtatatttgatattaaagttggaatgtttagtatgacaaatttaatattttaaaatagatatgcatgaaatttgatcttgatctttttctattatcaagctcatgactacgaacaaaaataaaattttacatattttttgtgcactgtttgctccctacgacaaaacaaggtgaatttttttttgaatctagatatttgtatctgaattttatatctttcatttgagatgatatgaatggtaaatttgagatttacctttaaattgacatttgaataagtatatgttttcatccctacttgtttc

SEQ ID NO: 6349 - DNA, 2059 bp, Zea Mays
gaatatccgggcatccggcccaggcatgaacggtcggttaaaccggccaatcctcctctcaagcctcgacgcagcacggcgcgccggcgcgggacgacggcatgacgccgccgtccatcttccaccaccatcgctgcctcgtctccctcccctccgcttccccgacctggacctcgtcccgtcgtctcatccatcaactcgcaaaacccacagtcctgtccctacatctgcgtccagtcttatcctcttccttcgcggttgccgccgtcggcgacgacgaggatgtcgtagtcggggattgcctcgtgttcgacgacgacgctttcgaggaaccggacctggacctcccctcgtccccgtggccgtcggctagcgcctcacgccacggccggaggtcggaggcaggcgagagcgacagcctggtgccggagaggtggaggcatgccgaggaggagatcaacctgacgaagaaggataagcgccgcatcgcgcacgggctgcggttcgggagccgcctcgagcggcgggcgcccccagctgttgctgctcctgatgaattccgcgcgtaccgcaaggggatgctgagcgctgagcgtgagcatgtttctcatgtataccgggggccgctggagaggactcctccgccggaagtgaaggaacatccaccgccggagccggagcctgggacgcgtgtggccccgaggaatccgaggatggggatgggcgttggcacccttgacgacattgatgagtttttcagaagtagggaatatgttcaggatgagatggaggacagcaagagtcctaagggccgtcagaagttgttctcaaatgaggagaagattcttctgaacaagcgagtgcctgatctggaaacagctacttctagtaaatggcttccacttcacacccttgctgcatctggtgatttctatctattgaatagccttttaaaacataacgtggacataaatgcgcttgataaggatggcttaccagcgatccacaaagcaattctttcaaagaaggctgctattatcaattatcttttaaggaactcagcaaatccattcatccaagataaagatggtgcgactctaatgcattatgcggtccaaacagcatgtagtcagaccataaagacacttttactgtacaatgttgacatcaaccgtccagatgattatggatggacacctttgcatcttgcggtacaaacacagaggactgacattgtgaagctgcttttaataaagggcgctgatagaactattagaacccaagatggattgaccccgttggagttgtgcctccggttgggtcatgatgtgcggacgtatgagcttatcaaactacttaaaagtttccgaggacaaaagcagcatgatttagtttagcaactggagggtgtgtgaccctctttgaaccagtgaggttaaccagtgtggtggccttctgggaggccagttttcaatgtaccattcatgattcatggaatcgctcctggtttgagataggaaatagtttacccctagaactggaagcaaacgagcaaaccaggttacagtcgagccatgagaacgggatgaataaacctttctgtaggttggcgctcttcaattattagagggctcgtcaaaaaccgacctttatatgctatgaattcttgttccactaacctatcagctgctgacaattcagctcagatatgttgggaaacgttgatcatgaactaacaagaacgaggattctatgcactcttgtatgcccgatgcaacttcttttgaaatcagtgtgtagcaggaagacatgattgagaacgaggcagagggggagagaagctggagcatttatacacaatttgtagagcttggaagctgcaccgcagtactggccgtaattaatacacgcagagatactcgtactcagtctctcttcagcaacatggaagatggactactggtgtgtgtgtgtatgtctcgtgaccacttgaatttattttattctttgtgtactttgtatacagaaaaaaaaataaagagtggctaaatgatcttat

SEQ ID NO: 6350 - DNA, 1895 bp, Zea Mays
gaatatccgggcatccggcccaggcatgaacggtcggttaaaccggccaatcctcctctcaagcctcgacgcagcacggcgcgccggcgcgggacgacggcatgacgccgccgtccatcttccaccaccatcgctgcctcgtctccctcccctccgcttccccgacctggacctcgtcccgtcgtctcatccatcaactcgcaaaacccacagtcctgtccctacatctgcgtccagtcttatcctcttccttcgcggttgccgccgtcggcgacgacgaggatgtcgtagtcggggattgcctcgtgttcgacgacgacgctttcgaggaaccggacctggacctcccctcgtccccgtggccgtcggctagcgcctcacgccacggccggaggtcggaggcaggcgagagcgacagcctggtgccggagaggtggaggcatgccgaggaggagatcaacctgacgaagaaggataagcgccgcatcgcgcacgggctgcggttcgggagccgcctcgagcggcgggcgcccccagctgttgctgctcctgatgaattccgcgcgtaccgcaaggggatgctgagcgctgagcgtgagcatgtttctcatgtataccgggggccgctggagaggactcctccgccggaagtgaaggaacatccaccgccggagccggagcctgggacgcgtgtggccccgaggaatccgaggatggggatgggcgttggcacccttgacgacattgatgagtttttcagaagtagggaatatgttcaggatgagatggaggacagcaagagtcctaagggccgtcagaagttgttctcaaatgaggagaagattcttctgaacaagcgagtgcctgatctggaaacagctacttctagtaaatggcttccacttcacacccttgctgcatctggtgatttctatctattgaatagccttttaaaacataacgtggacataaatgcgcttgataaggatggcttaccagcgatccacaaagcaattctttcaaagaaggctgctattatcaattatcttttaaggaactcagcaaatccattcatccaagataaagatggtgcgactctaatgcattatgcggtccaaacagcatgtagtcagaccataaagacacttttactgtacaatgttgacatcaaccgtccagatgattatggatggacacctttgcatcttgcggtacaaacacagaggactgacattgtgaagctgcttttaataaagggcgctgatagaactattagaacccaagatggattgaccccgttggagttgtgcctccggttgggtcatgatgtgcggacgtatgagcttatcaaactacttaaaagtttccgaggacaaaagcagcatgatttagtttagcaactggagggtgtgtgaccctctttgaaccagtgaggttaaccagtgtggtggccttctgggaggccagttttcaatgtaccattcatgattcatggaatcgctcctggtttgagataggaaatagtttacccctagaactggaagcaaacgagcaaaccaggttacagtcgagccatgagaacgggatgaataaacctttctgtaggttggcgctcttcaattattagagtgtgtagcaggaagacatgattgagaacgaggcagagggggagagaagctggagcatttatacacaatttgtagagcttggaagctgcaccgcagtactggccgtaattaatacacgcagagatactcgtactcagtctctcttcagcaacatggaagatggactactggtgtgtgtgtgtatgtctcgtgaccacttgaatttattttattctttgtgtactttgtatacagaaaaaaaaataaagagtggctaaatgatcttat

SEQ ID NO: 6351 - DNA, 1828 bp, Zea Mays
gaatatccgggcatccggcccaggcatgaacggtcggttaaaccggccaatcctcctctcaagcctcgacgcagcacggcgcgccggcgcgggacgacggcatgacgccgccgtccatcttccaccaccatcgctgcctcgtctccctcccctccgcttccccgacctggacctcgtcccgtcgtctcatccatcaactcgcaaaacccacagtcctgtccctacatctgcgtccagtcttatcctcttccttcgcggttgccgccgtcggcgacgacgaggatgtcgtagtcggggattgcctcgtgttcgacgacgacgctttcgaggaaccggacctggacctcccctcgtccccgtggccgtcggctagcgcctcacgccacggccggaggtcggaggcaggcgagagcgacagcctggtgccggagaggtggaggcatgccgaggaggagatcaacctgacgaagaaggataagcgccgcatcgcgcacgggctgcggttcgggagccgcctcgagcggcgggcgcccccagctgttgctgctcctgatgaattccgcgcgtaccgcaaggggatgctgagcgctgagcgtgagcatgtttctcatgtataccgggggccgctggagaggactcctccgccggaagtgaaggaacatccaccgccggagccggagcctgggacgcgtgtggccccgaggaatccgaggatggggatgggcgttggcacccttgacgacattgatgagtttttcagaagtagggaatatgttcaggatgagatggaggacagcaagagtcctaagggccgtcagaagttgttctcaaatgaggagaagattcttctgaacaagcgagtgcctgatctggaaacagctacttctagtaaatggcttccacttcacacccttgctgcatctggtgatttctatctattgaatagccttttaaaacataacgtggacataaatgcgcttgataaggatggcttaccagcgatccacaaagcaattctttcaaagaaggctgctattatcaattatcttttaaggaactcagcaaatccattcatccaagataaagatggtgcgactctaatgcattatgcggtccaaacagcatgtagtcagaccataaagacacttttactgtacaatgttgacatcaaccgtccagatgattatggatggacacctttgcatcttgcggtacaaacacagaggactgacattgtgaagctgcttttaataaagggcgctgatagaactattagaacccaagatggattgaccccgttggagttgtgcctccggttgggtcatgatgtgcggacgtatgagcttatcaaactacttaaaagtttccgaggacaaaagcagcatgatttagtttagcaactggagggtgtgtgaccctctttgaaccagtgaggttaaccagtgtggtggccttctgggaggccagttttcaatgtaccattcatgattcatggaatcgctcctggtttgagataggaaatagtttacccctagaactggaagcaaacgagcaaaccaggttacagtcgagccatgagaacgggatgaataaacctttctgtaggttggcgctcttcaattattagagggctcgtcaaaaaccgacctttatatgctatgaattcttgttccactaacctatcagctgctgacaattcagctcagatatgttgggaaacgttgatcatgaactaacaagaacgaggattctatgcactcttgtatgcccgatgcaacttcttttgaaatcagcccgtattcattcatgttctgagcataaagaagtt

SEQ ID NO: 6352 - DNA, 2070 bp, Zea Mays
gaatatccgggcatccggcccaggcatgaacggtcggttaaaccggccaatcctcctctcaagcctcgacgcagcacggcgcgccggcgcgggacgacggcatgacgccgccgtccatcttccaccaccatcgctgcctcgtctccctcccctccgcttccccgacctggacctcgtcccgtcgtctcatccatcaactcgcaaaacccacagtcctgtccctacatctgcgtccagtcttatcctcttccttcgcggttgccgccgtcggcgacgacgaggatgtcgtagtcggggattgcctcgtgttcgacgacgacgctttcgaggaaccggacctggacctcccctcgtccccgtggccgtcggctagcgcctcacgccacggccggaggtcggaggcaggcgagagcgacagcctggtgccggagaggtggaggcatgccgaggaggagatcaacctgacgaagaaggataagcgccgcatcgcgcacgggctgcggttcgggagccgcctcgagcggcgggcgcccccagctgttgctgctcctgatgaattccgcgcgtaccgcaaggggatgctgagcgctgagcgtgagcatgtttctcatgtataccgggggccgctggagaggactcctccgccggaagtgaaggaacatccaccgccggagccggagcctgggacgcgtgtggccccgaggaatccgaggatggggatgggcgttggcacccttgacgacattgatgagtttttcagaagtagggaatatgttcaggatgagatggaggacagcaagagtcctaagggccgtcagaagttgttctcaaatgaggagaagattcttctgaacaagcgagtgcctgatctggaaacagctacttctagtaaatggcttccacttcacacccttgctgcatctggtgatttctatctattgaatagccttttaaaacataacgtggacataaatgcgcttgataaggatggcttaccagcgatccacaaagcaattctttcaaagaaggctgctattatcaattatcttttaaggaactcagcaaatccattcatccaagataaagatggtgcgactctaatgcattatgcggtccaaacagcatgtagtcagaccataaagacacttttactgtacaatgttgacatcaaccgtccagatgattatggatggacacctttgcatcttgcggtacaaacacagaggactgacattgtgaagctgcttttaataaagggcgctgatagaactattagaacccaagatggattgaccccgttggagttgtgcctccggttgggtcatgatgtgcggacgtatgagcttatcaaactacttaaaagtttccgaggacaaaagcagcatgatttagtttagcaactggagggtgtgtgaccctctttgaaccagtgaggttaaccagtgtggtggccttctgggaggccagttttcaatgtaccattcatgattcatggaatcgctcctggtttgagataggaaatagtttacccctagaactggaagcaaacgagcaaaccaggttacagtcgagccatgagaacgggatgaataaacctttctgtaggttggcgctcttcaattattagagggctcgtcaaaaaccgacctttatatgctatgaattcttgttccactaacctatcagctgctgacaattcagctcagatatgttgggaaacgttgatcatgaactaacaagaacgaggattctatgcactcttgtatgcccgatgcaacttcttttgaaatcagggccaatctagggcgtcatccaacaaccctcatgaagtgcccagcccaacgtagcacccgtccaaccgcccacttcaatgagagttatgtttttagtgttcagactacaaaacttatgttgaatacttatgtcagagcttgaaacttatgtgttgatacttctgaactcgtgttgatactgtttgtgttgagaacttgcatattaatgtttgtgttggatatttatgtctgtgatgtatatatgtgatatctgtgatgtatatatgtgatatctgtg

SEQ ID NO: 6353 - DNA, 1906 bp, Zea Mays
gaatatccgggcatccggcccaggcatgaacggtcggttaaaccggccaatcctcctctcaagcctcgacgcagcacggcgcgccggcgcgggacgacggcatgacgccgccgtccatcttccaccaccatcgctgcctcgtctccctcccctccgcttccccgacctggacctcgtcccgtcgtctcatccatcaactcgcaaaacccacagtcctgtccctacatctgcgtccagtcttatcctcttccttcgcggttgccgccgtcggcgacgacgaggatgtcgtagtcggggattgcctcgtgttcgacgacgacgctttcgaggaaccggacctggacctcccctcgtccccgtggccgtcggctagcgcctcacgccacggccggaggtcggaggcaggcgagagcgacagcctggtgccggagaggtggaggcatgccgaggaggagatcaacctgacgaagaaggataagcgccgcatcgcgcacgggctgcggttcgggagccgcctcgagcggcgggcgcccccagctgttgctgctcctgatgaattccgcgcgtaccgcaaggggatgctgagcgctgagcgtgagcatgtttctcatgtataccgggggccgctggagaggactcctccgccggaagtgaaggaacatccaccgccggagccggagcctgggacgcgtgtggccccgaggaatccgaggatggggatgggcgttggcacccttgacgacattgatgagtttttcagaagtagggaatatgttcaggatgagatggaggacagcaagagtcctaagggccgtcagaagttgttctcaaatgaggagaagattcttctgaacaagcgagtgcctgatctggaaacagctacttctagtaaatggcttccacttcacacccttgctgcatctggtgatttctatctattgaatagccttttaaaacataacgtggacataaatgcgcttgataaggatggcttaccagcgatccacaaagcaattctttcaaagaaggctgctattatcaattatcttttaaggaactcagcaaatccattcatccaagataaagatggtgcgactctaatgcattatgcggtccaaacagcatgtagtcagaccataaagacacttttactgtacaatgttgacatcaaccgtccagatgattatggatggacacctttgcatcttgcggtacaaacacagaggactgacattgtgaagctgcttttaataaagggcgctgatagaactattagaacccaagatggattgaccccgttggagttgtgcctccggttgggtcatgatgtgcggacgtatgagcttatcaaactacttaaaagtttccgaggacaaaagcagcatgatttagtttagcaactggagggtgtgtgaccctctttgaaccagtgaggttaaccagtgtggtggccttctgggaggccagttttcaatgtaccattcatgattcatggaatcgctcctggtttgagataggaaatagtttacccctagaactggaagcaaacgagcaaaccaggttacagtcgagccatgagaacgggatgaataaacctttctgtaggttggcgctcttcaattattagagggccaatctagggcgtcatccaacaaccctcatgaagtgcccagcccaacgtagcacccgtccaaccgcccacttcaatgagagttatgtttttagtgttcagactacaaaacttatgttgaatacttatgtcagagcttgaaacttatgtgttgatacttctgaactcgtgttgatactgtttgtgttgagaacttgcatattaatgtttgtgttggatatttatgtctgtgatgtatatatgtgatatctgtgatgtatatatgtgatatctgtg

SEQ ID NO: 6354 - DNA, 1836 bp, Zea Mays
gaatatccgggcatccggcccaggcatgaacggtcggttaaaccggccaatcctcctctcaagcctcgacgcagcacggcgcgccggcgcgggacgacggcatgacgccgccgtccatcttccaccaccatcgctgcctcgtctccctcccctccgcttccccgacctggacctcgtcccgtcgtctcatccatcaactcgcaaaacccacagtcctgtccctacatctgcgtccagtcttatcctcttccttcgcggttgccgccgtcggcgacgacgaggatgtcgtagtcggggattgcctcgtgttcgacgacgacgctttcgaggaaccggacctggacctcccctcgtccccgtggccgtcggctagcgcctcacgccacggccggaggtcggaggcaggcgagagcgacagcctggtgccggagaggtggaggcatgccgaggaggagatcaacctgacgaagaaggataagcgccgcatcgcgcacgggctgcggttcgggagccgcctcgagcggcgggcgcccccagctgttgctgctcctgatgaattccgcgcgtaccgcaaggggatgctgagcgctgagcgtgagcatgtttctcatgtataccgggggccgctggagaggactcctccgccggaagtgaaggaacatccaccgccggagccggagcctgggacgcgtgtggccccgaggaatccgaggatggggatgggcgttggcacccttgacgacattgatgagtttttcagaagtagggaatatgttcaggatgagatggaggacagcaagagtcctaagggccgtcagaagttgttctcaaatgaggagaagattcttctgaacaagcgagtgcctgatctggaaacagctacttctagtaaatggcttccacttcacacccttgctgcatctggtgatttctatctattgaatagccttttaaaacataacgtggacataaatgcgcttgataaggatggcttaccagcgatccacaaagcaattctttcaaagaaggctgctattatcaattatcttttaaggaactcagcaaatccattcatccaagataaagatggtgcgactctaatgcattatgcggtccaaacagcatgtagtcagaccataaagacacttttactgtacaatgttgacatcaaccgtccagatgattatggatggacacctttgcatcttgcggtacaaacacagaggactgacattgtgaagctgcttttaataaagggcgctgatagaactattagaacccaagatggattgaccccgttggagttgtgcctccggttgggtcatgatgtgcggacgtatgagcttatcaaactacttaaaagtttccgaggacaaaagcagcatgatttagtttagcaactggagggtgtgtgaccctctttgaaccagtgaggttaaccagtgtggtggccttctgggaggccagttttcaatgtaccattcatgattcatggaatcgctcctggtttgagataggaaatagtttacccctagaactggaagcaaacgagcaaaccaggttacagtcgagccatgagaacgggatgaataaacctttctgtaggttggcgctcttcaattattagagggctcgtcaaaaaccgacctttatatgctatgaattcttgttccactaacctatcagctgctgacaattcagctcagatatgttgggaaacgttgatcatgaactaacaagaacgaggattctatgcactcttgtatgcccgatgcaacttcttttgaaatcagcgatgaacaagccaagattttgtgaaaacaaagtgctagaaac

SEQ ID NO: 6355 - DNA, 1804 bp, Zea Mays
gaatatccgggcatccggcccaggcatgaacggtcggttaaaccggccaatcctcctctcaagcctcgacgcagcacggcgcgccggcgcgggacgacggcatgacgccgccgtccatcttccaccaccatcgctgcctcgtctccctcccctccgcttccccgacctggacctcgtcccgtcgtctcatccatcaactcgcaaaacccacagtcctgtccctacatctgcgtccagtcttatcctcttccttcgcggttgccgccgtcggcgacgacgaggatgtcgtagtcggggattgcctcgtgttcgacgacgacgctttcgaggaaccggacctggacctcccctcgtccccgtggccgtcggctagcgcctcacgccacggccggaggtcggaggcaggcgagagcgacagcctggtgccggagaggtggaggcatgccgaggaggagatcaacctgacgaagaaggataagcgccgcatcgcgcacgggctgcggttcgggagccgcctcgagcggcgggcgcccccagctgttgctgctcctgatgaattccgcgcgtaccgcaaggggatgctgagcgctgagcgtgagcatgtttctcatgtataccgggggccgctggagaggactcctccgccggaagtgaaggaacatccaccgccggagccggagcctgggacgcgtgtggccccgaggaatccgaggatggggatgggcgttggcacccttgacgacattgatgagtttttcagaagtagggaatatgttcaggatgagatggaggacagcaagagtcctaagggccgtcagaagttgttctcaaatgaggagaagattcttctgaacaagcgagtgcctgatctggaaacagctacttctagtaaatggcttccacttcacacccttgctgcatctggtgatttctatctattgaatagccttttaaaacataacgtggacataaatgcgcttgataaggatggcttaccagcgatccacaaagcaattctttcaaagaaggctgctattatcaattatcttttaaggaactcagcaaatccattcatccaagataaagatggtgcgactctaatgcattatgcggtccaaacagcatgtagtcagaccataaagacacttttactgtacaatgttgacatcaaccgtccagatgattatggatggacacctttgcatcttgcggtacaaacacagaggactgacattgtgaagctgcttttaataaagggcgctgatagaactattagaacccaagatggattgaccccgttggagttgtgcctccggttgggtcatgatgtgcggacgtatgagcttatcaaactacttaaaagtttccgaggacaaaagcagcatgatttagtttagcaactggagggtgtgtgaccctctttgaaccagtgaggttaaccagtgtggtggccttctgggaggccagttttcaatgtaccattcatgattcatggaatcgctcctggtttgagataggtacatgccaacttcattgtatttgtatcatttatatatttcattggcctaaaccattaagtgatcgggtcaattggttgcaggaaatagtttacccctagaactggaagcaaacgagcaaaccaggttacagtcgagccatgagaacgggatgaataaacctttctgtaggttggcgctcttcaattattagagctcagatatgttgggaaacgttgatcatgaactaacaagaacgaggattctatgcactcttgtatgcccgatgcaacttcttttgaaatcag

SEQ ID NO: 6356 - DNA, 1043 bp, Zea Mays
agaagaaatttgacttgtttgggattcaaacctatccaatcccgctcaatccacatggattgagagctaaccgaaccagccctaagctgggcctcacacgctttttttttttcgtcttttgcctccggcccacgggcgtcgggccaatcgtgcgcccattgccaccgccctacgctttcgctctcgtcgcacacctcttcctgtcctcctggccttgctgcccgatggcccatctctgtaggcacgcaaacgcaacccaccgccgcgccggcgccgccgccggccctacttccttacccttccctggccgtctcccgaagttcgctgtctccgctttaaccatccgtggtcccgttcttctgcagtaagcgggtgtttctgtgcccacgcactggcgtcacgcggaccccactgtttgtagggttacaaggacgataccccaggccatcacagtcgcattattcaggaacaggaaagatgtctacacgttaccagcacacatgtaaagcatgttaactgcatttcagtttcagagaaagtctaccccagacaaccaccatgttacaaaggaacgaaatggagtgctgttcgaaaacgaagtgacacctcagtttcagaagaaaagagaataaagcgacaccagacaatctccaggttgaaacggccgccgggctgaagccgtctgttttaccatcccaagcacgataaaacagatattggggaggaacgctcacccacaaatatgcgggagtggaggacgtcgatgcaggatgtggaatttttaggaagaagataagggaactattggagcaagaaaaaacagttctttcctgatatttgttttgggatgtacagggctttctcaataattaggtggctcatccaattcttctgatgttcttgtgtcaaatcattacacaatgtacaaaggcacagagaattttcttgagcgtgaagcgcaagctgtttgagtaatgatcactgctgacgaatcatgtgcccactagtctgcttaatttagcttctttcatctggaaaataat

SEQ ID NO: 6357 - DNA, 921 bp, Zea Mays
agaagaaatttgacttgtttgggattcaaacctatccaatcccgctcaatccacatggattgagagctaaccgaaccagccctaagctgggcctcacacgctttttttttttcgtcttttgcctccggcccacgggcgtcgggccaatcgtgcgcccattgccaccgccctacgctttcgctctcgtcgcacacctcttcctgtcctcctggccttgctgcccgatggcccatctctgtaggcacgcaaacgcaacccaccgccgcgccggcgccgccgccggccctacttccttacccttccctggccgtctcccgaagttcgctgtctccgctttaaccatccgtggtcccgttcttctgcagtaagcgggtgtttctgtgcccacgcactggcgtcacgcggaccccactgtttgtagggttacaaggacgataccccaggccatcacagtcgcattattcaggaacaggaaagatgtctacacgttaccagcacacatgtaaagcatgttaactgcatttcagtttcagagaaagtctaccccagacaaccaccatgttacaaaggaacgaaatggagtgctgttcgaaaacgaagtgacacctcagtttcagaagaaaagagaataaagcgacaccagacaatctccaggttactcactatacttgtatctgtgcaggcaacattagtatcagtgcaatggctgcgttgtaaaaaaaaaactcaaccggccgtggtaagacagtccttaaacattacatcaagaacgtattgtaaccaggccatgtgctttgacgtgggacaaatgaaaaatgttttttaaccccagcctaaaattcactcccacgaggagtcgaactctctcgcgtggcctaaaatttgctcatacggaaagtcaaacttaacacctaaaaagtg

SEQ ID NO: 6358 - DNA, 3280 bp, Zea Mays
aaaaacccggcggccagcgcacagaaatatccccatctcgcttccctctcccctacgaccgcccccacccatggccacgcctctcctcctcccctcccgcgcagcccatgccgcctccgctaccacctgcgcctcccagcacctcaaagccaccacctccaaggagcctccgccccgcgctcgcccgaagcacggcgagggaggggctccccgccccgtccccgttcccagctccgccccccgtcccaagtccctcgtcctctcccacatcgcggcgggccgaatggacgaggccgcggacgccttcgcgggcgtcagcagccccggcgcgttcctccacaacgtcatgatccgcggcttcgcggacgcgggcctcccgctcgacgcgctcgcggcgtaccgcgccatgctcgccgccagcgctcgccccgaccgcttcaccttccccgtcgtcgtcaagtgctgcacgcgcgccggcgcgctgggcgagggccgcgccgcgcacgcggccgtgatcaagctgggcctaggcgccgacatgtacaccgccaactcgctcgtcgcgctctacgccaagctcggcctcgtcggggacgccgagcgggtgttcgacggaatgccggcgcgggacatcgtctcgtggaacacgatggtggacgggtacgtgtccaacgggatgggagcgctggcgctggcgtgcttccgggatatgaacgacgcgctgcgagtgcggcatgacggcgttggggtaatcgcggcactcgcggcctgctgcctggagtcggcgctggcgcaggggcgggagatacacggctatgccatcaggcacgggctcgagcaggatgtgaaggtggctatgcgctgaacgagcggcctgtggatgcgtttgattgcttcatgcaaatgagagcggaggggttccaggtggaagccgtcactgctatcaatttgcttgccgcctgtggtcaaactgaaagctcactgtacggaaggagtgttcatgcttatgtggttcggagacattttcttccccacgtagtgcttgagactgctctcctggagatgtatggcaatgttggcaaagtggaatcatctgaaaagatatttggtcagatgacagagaaaactgtggtaacatggaataatatgatcgctgcctacatctacatggaaatgtaccaggaagccatcgcattgttcctggagctactgaatcaacctctttatcctgattatttcaccatgacaacagtagtaccggcgttcgtcttgctaggctcactaagacagtgcaggcaaatgcacagctacattatcaagttaggctatggagacagcactctgattatgaacgcagttatgcatatgtatgcaaggtgtggtgatattgtggcctcaagggagatctttgacaaaatgccaggcaaggatgtgatctcctggaatacaatcattataggatatgcaattcacggacaaggaaagactgcattggaaatgtttgatgagatgaagtgtaacggtattgaaccaaatgagagcacctttgtctctgtgctgactgcatgcagtgtttctggcctggagactgagggctggaaggagttcaattcaatgcaacatgagtatggtatggttccacagattgagcactatggatgcatgactgatcttctgggccgtgcagatccttttgcctcagggaaaactgtacttcccaataagcatagtgtaaggctggctgttgcctttggtctgatttcatctgagcctgggaccccaattcttgtcaagaagaatgtgcgtgtatgcaaccactgccatcgtgcactgaagttgatatcaaaatattcaagacggaagattgtagttggtgacacaaagatatatcacatattttcagatggctcttgttgctgtggtgactactggtgaactgttaagattgatgacgaaatgcctgaatgagattctgcaagagcaggatacctggatctggatgtacacccgggttttcaaaatctgacacaaggtaaactgcaaggaattacatcacgtatccaagttgaggacacataccgccataccggagatatccattcccaggactcgtagtcatagtagatgctccgagaaggaaccaacaatttgggggagaattctaacctacaactgattacacacattggacaagaacgcaccaccacatttttgtagcaattggagcaggatgatgtacaaagttgttttttcccttcataagcaatgtaaaaaaggctgagctgattgtattcattgtatgacacatcatacatggatcaaatgcaagaaattgaagtgtttctctctcagattcttgtgaagtgaaaatcaaacatgcatagtagtactgcttgagctagcctaatccttgaaaccatttttataccagacattgagaattagagatcgtcgcttacaacaagattaagcaaatgctagcacatgacgcgtaagtttggaatacccgactccaaatctacgctccgccacggcgcttggcctcctcggtctcgatcgcgcggcgtgaggcgtcggcaaggcggtcgagcgcctgttgcacggcgtcgcggccgccgatgaggaggcgcgccaccacctccgggtcgcgctccccgcgggcatcctcgaactcgcgcctggcgttggcgcgcagcacctcccgccacggcaccccgcggtcgtcggtccacgcgaagagccgcgccgcccggaggatgtcccggtacagggccagcgcctcccgccgggagctcgtcagccgccgccgcgcctccgccgactcctcgtccgggcccgccgcgggcttcttcacgaggtgccggtccagcagctcctcgatggtgtccgggccctcgtggatgcaccgcgcccccgagccggcgggctgccaacgggcccgcaggaggagcgcggtgccgcggccgccatgtctggctacggccatagtcctccgctcctggcctctctgtttgggtcgcgattcgggattcgggaacacgggggaagggtctgtgcactgtgcagagtgcagaccaaaacgaacgatctagcactagagcttaacccaaggtcccagctcccagagacaaaataaactcctcagcagcgaaaagagaactgcatgaattccgtagactttcctatcccttggggcgcttcatgaaatcctccatgcggtgcgccactgttcttgcgacgctgttctccatcttgggctcaatcagaagcctaactcgac

SEQ ID NO: 6359 - DNA, 3749 bp, Zea Mays
cgacacgttccttccttcttctcctttccctgattggataaaccgcgaaagcaaaaacccggcggccagcgcacagaaatatccccatctcgcttccctctcccctacgaccgcccccacccatggccacgcctctcctcctcccctcccgcgcagcccatgccgcctccgctaccacctgcgcctcccagcacctcaaagccaccacctccaaggagcctccgccccgcgctcgcccgaagcacggcgagggaggggctccccgccccgtccccgttcccagctccgccccccgtcccaagtccctcgtcctctcccacatcgcggcgggccgaatggacgaggccgcggacgccttcgcgggcgtcagcagccccggcgcgttcctccacaacgtcatgatccgcggcttcgcggacgcgggcctcccgctcgacgcgctcgcggcgtaccgcgccatgctcgccgccagcgctcgccccgaccgcttcaccttccccgtcgtcgtcaagtgctgcacgcgcgccggcgcgctgggcgagggccgcgccgcgcacgcggccgtgatcaagctgggcctaggcgccgacatgtacaccgccaactcgctcgtcgcgctctacgccaagctcggcctcgtcggggacgccgagcgggtgttcgacggaatgccggcgcgggacatcgtctcgtggaacacgatggtggacgggtacgtgtccaacgggatgggagcgctggcgctggcgtgcttccgggatatgaacgacgcgctgcgagtgcggcatgacggcgttggggtaatcgcggcactcgcggcctgctgcctggagtcggcgctggcgcaggggcgggagatacacggctatgccatcaggcacgggctcgagcaggatgtgaaggtggctatgcgctgaacgagcggcctgtggatgcgtttgattgcttcatgcaaatgagagcggaggggttccaggtggaagccgtcactgctatcaatttgcttgccgcctgtggtcaaactgaaagctcactgtacggaaggagtgttcatgcttatgtggttcggagacattttcttccccacgtagtgcttgagactgctctcctggagatgtatggcaatgttggcaaagtggaatcatctgaaaagatatttggtcagatgacagagaaaactgtggtaacatggaataatatgatcgctgcctacatctacatggaaatgtaccaggaagccatcgcattgttcctggagctactgaatcaacctctttatcctgattatttcaccatgacaacagtagtaccggcgttcgtcttgctaggctcactaagacagtgcaggcaaatgcacagctacattatcaagttaggctatggagacagcactctgattatgaacgcagttatgcatatgtatgcaaggtgtggtgatattgtggcctcaagggagatctttgacaaaatgccaggcaaggatgtgatctcctggaatacaatcattataggatatgcaattcacggacaaggaaagactgcattggaaatgtttgatgagatgaagtgtaacggtattgaaccaaatgagagcacctttgtctctgtgctgactgcatgcagtgtttctggcctggagactgagggctggaaggagttcaattcaatgcaacatgagtatggtatggttccacagattgagcactatggatgcatgactgatcttctgggccgtgcaggtgacctcagggaggtgctgcggtttattgaaaacatgccgatagctccaacatccaggatttggggttccttgctgacagcgagcagaaataagaatgatatcgatatagcagaatatgcagcagagaggatattccaactggaacacaacaacacaggctgttatgtcgttctgtcttccatgtatgctgatgccgggagatgggaggatgtggagaggataagatctctgatgaaggagaagggactccgaaggacggaggcaagaagccttgtggagcttaatgctgaagagtgcagttttgtcaatggggacatgtcgcaccctcagagcgagaaaattcatgaattgtctgatatcctatcacgaaatattggagaagatttagatagcccaactaatctccgtgattcagatccttttgcctcagggaaaactgtacttcccaataagcatagtgtaaggctggctgttgcctttggtctgatttcatctgagcctgggaccccaattcttgtcaagaagaatgtgcgtgtatgcaaccactgccatcgtgcactgaagttgatatcaaaatattcaagacggaagattgtagttggtgacacaaagatatatcacatattttcagatggctcttgttgctgtggtgactactggtgaactgttaagattgatgacgaaatgcctgaatgagattctgcaagagcaggatacctggatctggatgtacacccgggttttcaaaatctgacacaaggtaaactgcaaggaattacatcacgtatccaagttgaggacacataccgccataccggagatatccattcccaggactcgtagtcatagtagatgctccgagaaggaaccaacaatttgggggagaattctaacctacaactgattacacacattggacaagaacgcaccaccacatttttgtagcaattggagcaggatgatgtacaaagttgttttttcccttcataagcaatgtaaaaaaggctgagctgattgtattcattgtatgacacatcatacatggatcaaatgcaagaaattgaagtgtttctctctcagattcttgtgaagtgaaaatcaaacatgcatagtagtactgcttgagctagcctaatccttgaaaccatttttataccagacattgagaattagagatcgtcgcttacaacaagattaagcaaatgctagcacatgacgcgtaagtttggaatacccgactccaaatctacgctccgccacggcgcttggcctcctcggtctcgatcgcgcggcgtgaggcgtcggcaaggcggtcgagcgcctgttgcacggcgtcgcggccgccgatgaggaggcgcgccaccacctccgggtcgcgctccccgcgggcatcctcgaactcgcgcctggcgttggcgcgcagcacctcccgccacggcaccccgcggtcgtcggtccacgcgaagagccgcgccgcccggaggatgtcccggtacagggccagcgcctcccgccgggagctcgtcagccgccgccgcgcctccgccgactcctcgtccgggcccgccgcgggcttcttcacgaggtgccggtccagcagctcctcgatggtgtccgggccctcgtggatgcaccgcgcccccgagccggcgggctgccaacgggcccgcaggaggagcgcggtgccgcggccgccatgtctggctacggccatagtcctccgctcctggcctctctgtttgggtcgcgattcgggattcgggaacacgggggaagggtctgtgcactgtgcagagtgcagaccaaaacgaacgatctagcactagagcttaacccaaggtcccagctcccagagacaaaataaactcctcagcagcgaaaagagaactgcatgaattccgtagactttcctatcccttggggcgcttcatgaaatcctccatgcggtgcgccactgttcttgcgacgctgttctccatcttgggctcaatcagaagcctaactcgac

SEQ ID NO: 6360 - DNA, 582 bp, Zea Mays
gggcaaactaaattcttgaaagttaccagttattagcaatacagaaccatttctctctgtttccgttaaatgttgctcctgttcaagaatctggtggattatcaacaagaccaacagaaacatatgaatcaaggacaaacaatactgatggaactggatttaacgatttggaagcgtcggtgttccgtaaacttcgagaggcccagaaaaggaaacattttggttaattgctttgttctgatgcatgatttggtactatgtatatgacgtcacacagctgaaaaatatctgaggatcgtgatggtagctgagttacagaaatatgaactacacatttgtttagttcgagtcttgtcgcagataaaattctctgaatcatagcaacgtcagatcaatttttctgtcactgtacaagctgtaccatgtatctatgaatagtttgtaaccacaaattcatgcatgacatggcgctacacatctttttgctggaaattgggaacacaacccctttcaaaattcttatgcaagcaatcaaactggaatatttggagttctcattctctcaaccttgcaattactcag

SEQ ID NO: 6361 - DNA, 808 bp, Zea Mays
gattgggctgcaaagggcccaatgctgcaggctgtgatagcaaagagcttcgagaggattcaccgcagcaatcttgctggcatgggaatcatccctctatgctacaaagcaggggaggatgcagacaccctgggcctaaccggccatgagcgctacacggtccaccttccaaccaatgtgagtgagatcaagcctggccaagatgttaccgtgacaactgataatggaaagtcgttcacttgcacactcagattcgacactgaggtggagcttgcttactacgatcatggtggcattctaccatatgtcgctagaaagatagcggaacaatagattgtaccgtcgagatggttgcgatgcttgcggtgaatcgtaattggtgtaaacggtttgtttagtagtacaacccatttttgcggactacttataataacctctgagtatctcagagtgagctgtctgaaatttgatgaactgctacaattctggtgcgccatgaggatgggatccttttgccttctatgttaataatatgctaacttctgcaataccagatatacatttggcagaagattttgcacgctgtaaatgacactagtattaacactgatgcggttcaaagctgtccttgttttgttatctgccaacaattgatgagcagattttgtttcagatttgtattacgaaccttttaccacgttgccatgtgcgactggtaatgactctgaagcaaccgatgggtgtaaaactgtcatgtaagccagaatctgaagctgctctttgcaaaaaaaataataaaagggaaata

SEQ ID NO: 6362 - DNA, 3592 bp, Zea Mays
ccaccgcggcggcagcggggcgaggggcttcgaagacccgcacgagccaaggacgaaacgaaaccccatctccgcaaagggcagcaagcaacccctaccgggagctctcgctcgccctgcgcagcgccgcgccttcccaccacgcgtctcccaaaatccgcggccgtgtatataagacccgccaccaccacttttgccatcccccctctcccgtcgtccccacctcctccctttttggctcagtggccatgcctcccctcacaagctccctcctctcccgctccaccaccggcggctcctctacccgcgccgcggcagcggtcgcagcgatctccaggcccgccgcaccttcctcctcgtccccgcccgcccgctcgaccccgaggccgcgctccagcccggcgtcgcccttcgcatccggcctcgcgagccgcctctttcggcggccaccgcgccgtcgcccgctccgcgtcgtctgcagccgccgtcttcgagcgccggtttgcctcagcggcgaccaggaactcgtacgatgaaatcctgacgggcctcgctaagccaggaggcggagaggagttcggcaagtactacagcctgcctgcgctctccgatccgcggattgatcggctcccatattctataaggattcttctcgaatcggcaatcaggaactgcgatgacttccaggtcaccggaaaggatgttgagaagatcctggattgggagaaaagtgcaccgaagcaagttgaaatcccgttcaagcccgctcgtgtcctcctccaggtacctgtagaccttgttattgatcattcagtacaagttgatgtggcaagatcagcaaatgctgctcaggcaaatatggagcttgagttccatcgtaacaaggaaaggtttgggttcttgaaatgggggtcctctgcattccgtaacatgcttgttgtccctcctggatctggcattgtccaccaggtgaatcttgaatatctggccagggttgtgtttaacaatggtgggatcctttaccctgacagcgttgtaggcaccgactctcacacaactatggtagatggtcttggagttgctgggtggggagttggtggtatagaggcggaagctgcaatgcttggccagccaatgagcatggtcttaccaggtgttgttggctttaagttatcaggcaagctgaggaacggagttacagccacagacttggttctaacagtaactcaaatgcttcggaaacatggtgttgttgggaaatttgttgagttttatgggcaaggcatgagtgagttgtcacttgctgatcgggcgaccatcgcaaatatgtctccggaatatggtgcaactatgggattcttcccagttgatggaaagacgctggactatttgaagcttactggccgaagtgatgatacagtggccatggttgagtcctacctgcgtgcgaataagatgttcgttgatcacagccaggttgacgctgaaagggtatactcttcctatctagaacttaacttggaagaggtagaaccatgtctatcaggaccaaaacggcctcatgatcgagtgacattgaagaatatgaagtctgattggctttcttgcttggacagcgatgtaggattcaagggttttgctgtccccaaagaatcacagggcaaagttgcagaattttcgttccatgggactcctgcaaagataaagcatggtgatgttgtaattgcagcaattaccagttgcacaaacacatcaaatcctaatgtaatgctgggagctgctttggttgccaagaaggcttgtgagttgggcctggaggtaaagccatggattaagacgagccttgcacctggttccggtgttgtgaagaagtacttggataagagtggtttgcagaaatatctcgaccagcttggctttcatattgttggctatggttgcacaacctgcattggaaattctggagagcttgatgaatctgtgtctgctgcaattactgagaatgatattgttgctgctgctgtgttgtctggaaacagaaattttgaaggacgtgtgcatcctttaaccagagcaaattaccttgcttcccctcctttagttgtggcttatgcattggctggcacagttaatattgattttgagaaagaacctattggcatctcgaaagatggaaaagaggtttacttccgggatgtttggccatccacagaagagatagccgaggttgtcaagtcaagtgtgctccctgacatgttcaagagcacatatgagtcaatcaccaaaggaaatcctatgtggaatgagctgccagtctcaacaagcactctctacccctgggatccatcatctacatacatccatgagccaccttacttcaaggatatgaaaatgagtcctcctggcccgcggcctgtgaaggatgcatattgccttttgaattttggtgacagcatcacaaccgatcacatctcacctgccggaaacattcacccagacagcccagctgcaaaatatctgaaggagcgtggcgttgaaaggaaggacttcaactcatatggtagccgaagaggaaatgatgagatcatggctaggggaacctttgccaacattcgtcttgtgaataagttcttgaagggtgaggttggacccaagacaatccatgttccatctggggagaagcttgcagtttttgatgctgctatgaaatacaagaatgaagggcatgacactattatcctggctggtgccgagtacgggagtggaagctctcgggattgggctgcaaagggcccaatgctgcagggagtgaaggctgtgatagcaaagagcttcgagaggattcaccgcagcaatcttgctggcatgggaatcatccctctatgctacaaagcaggggaggatgcagacaccctgggcctaaccggccatgagcgctacacggtccaccttccaaccaatgtgagtgagatcaagcctggccaagatgttaccgtgacaactgataatggaaagtcgttcacttgcacactcagattcgacactgaggtggagcttgcttactacgatcatggtggcattctaccatatgtcgctagaaagatagcggaacaatagattgtaccgtcgagatggttgcgatgcttgcggtgaatcgtaattggtgtaaacggtttgtttagtagtacaacccatttttgcggactacttataataacctctgagtatctcagagtgagctgtctgaaatttgatgaactgctacaattctggtgcgccatgaggatgggatccttttgccttctatgttaataatatgctaacttctgcaataccagatatacatttggcagaagattttgcacgctgtaaatgacactagtattaacactgatgcggttcaaagctgtccttgttttgttatctgccaacaattgatgagcagattttgtttcagatttgtattacgaaccttttaccacgttgccatgtgcgactggtaatgactctgaagcaaccgatgggtgtaaaactgtcatgtaagccagaatctgaagctgctctttgcaaaaaaaataataaaagggaaata

SEQ ID NO: 6363 - DNA, 3704 bp, Zea Mays
gaagcttcagctctgctgtccaccgcggcggcagcggggcgaggggcttcgaagacccgcacgagccaaggacgaaacgaaaccccatctccgcaaagggcagcaagcaacccctaccgggagctctcgctcgccctgcgcagcgccgcgccttcccaccacgcgtctcccaaaatccgcggccgtgtatataagacccgccaccaccacttttgccatcccccctctcccgtcgtccccacctcctccctttttggctcagtggccatgcctcccctcacaagctccctcctctcccgctccaccaccggcggctcctctacccgcgccgcggcagcggtcgcagcgatctccaggcccgccgcaccttcctcctcgtccccgcccgcccgctcgaccccgaggccgcgctccagcccggcgtcgcccttcgcatccggcctcgcgagccgcctctttcggcggccaccgcgccgtcgcccgctccgcgtcgtctgcagccgccgtcttcgagcgccggtttgcctcagcggcgaccaggaactcgtacgatgaaatcctgacgggcctcgctaagccaggaggcggagaggagttcggcaagtactacagcctgcctgcgctctccgatccgcggattgatcggctcccatattctataaggattcttctcgaatcggcaatcaggaactgcgatgacttccaggtcaccggaaaggatgttgagaagatcctggattgggagaaaagtgcaccgaagcaagttgaaatcccgttcaagcccgctcgtgtcctcctccaggattttactggtgtcccagctgttgttgatcttgcttgcatgagggatgctatgagtaaacttggcagtgacccgaacaaaattaatcctctggtacctgtagaccttgttattgatcattcagtacaagttgatgtggcaagatcagcaaatgctgctcaggcaaatatggagcttgagttccatcgtaacaaggaaaggtttgggttcttgaaatgggggtcctctgcattccgtaacatgcttgttgtccctcctggatctggcattgtccaccaggtgaatcttgaatatctggccagggttgtgtttaacaatggtgggatcctttaccctgacagcgttgtaggcaccgactctcacacaactatggtagatggtcttggagttgctgggtggggagttggtggtatagaggcggaagctgcaatgcttggccagccaatgagcatggtcttaccaggtgttgttggctttaagttatcaggcaagctgaggaacggagttacagccacagacttggttctaacagtaactcaaatgcttcggaaacatggtgttgttgggaaatttgttgagttttatgggcaaggcatgagtgagttgtcacttgctgatcgggcgaccatcgcaaatatgtctccggaatatggtgcaactatgggattcttcccagttgatggaaagacgctggactatttgaagcttactggccgaagtgatgatacagtggccatggttgagtcctacctgcgtgcgaataagatgttcgttgatcacagccaggttgacgctgaaagggtatactcttcctatctagaacttaacttggaagaggtagaaccatgtctatcaggaccaaaacggcctcatgatcgagtgacattgaagaatatgaagtctgattggctttcttgcttggacagcgatgtaggattcaagggttttgctgtccccaaagaatcacagggcaaagttgcagaattttcgttccatgggactcctgcaaagataaagcatggtgatgttgtaattgcagcaattaccagttgcacaaacacatcaaatcctaatgtaatgctgggagctgctttggttgccaagaaggcttgtgagttgggcctggaggtaaagccatggattaagacgagccttgcacctggttccggtgttgtgaagaagtacttggataagagtggtttgcagaaatatctcgaccagcttggctttcatattgttggctatggttgcacaacctgcattggaaattctggagagcttgatgaatctgtgtctgctgcaattactgagaatgatattgttgctgctgctgtgttgtctggaaacagaaattttgaaggacgtgtgcatcctttaaccagagcaaattaccttgcttcccctcctttagttgtggcttatgcattggctggcacagttaatattgattttgagaaagaacctattggcatctcgaaagatggaaaagaggtttacttccgggatgtttggccatccacagaagagatagccgaggttgtcaagtcaagtgtgctccctgacatgttcaagagcacatatgagtcaatcaccaaaggaaatcctatgtggaatgagctgccagtctcaacaagcactctctacccctgggatccatcatctacatacatccatgagccaccttacttcaaggatatgaaaatgagtcctcctggcccgcggcctgtgaaggatgcatattgccttttgaattttggtgacagcatcacaaccgatcacatctcacctgccggaaacattcacccagacagcccagctgcaaaatatctgaaggagcgtggcgttgaaaggaaggacttcaactcatatggtagccgaagaggaaatgatgagatcatggctaggggaacctttgccaacattcgtcttgtgaataagttcttgaagggtgaggttggacccaagacaatccatgttccatctggggagaagcttgcagtttttgatgctgctatgaaatacaagaatgaagggcatgacactattatcctggctggtgccgagtacgggagtggaagctctcgggattgggctgcaaagggcccaatgctgcagggagtgaaggctgtgatagcaaagagcttcgagaggattcaccgcagcaatcttgctggcatgggaatcatccctctatgctacaaagcaggggaggatgcagacaccctgggcctaaccggccatgagcgctacacggtccaccttccaaccaatgtgagtgagatcaagcctggccaagatgttaccgtgacaactgataatggaaagtcgttcacttgcacactcagattcgacactgaggtggagcttgcttactacgatcatggtggcattctaccatatgtcgctagaaagatagcggaacaatagattgtaccgtcgagatggttgcgatgcttgcggtgaatcgtaattggtgtaaacggtttgtttagtagtacaacccatttttgcggactacttataataacctctgagtatctcagagtgagctgtctgaaatttgatgaactgctacaattctggtgcgccatgaggatgggatccttttgccttctatgttaataatatgctaacttctgcaataccagatatacatttggcagaagattttgcacgctgtaaatgacactagtattaacactgatgcggttcaaagctgtccttgttttgttatctgccaacaattgatgagcagattttgtttcagatttgtattacgaaccttttaccacgttgccatgtgcgactggtaatgactctgaagcaaccgatgggtgtaaaactgtcatgtaagccagaatctgaagctgctctttgcaaaaaaaataataaaagggaaata

SEQ ID NO: 6364 - DNA, 2272 bp, Zea Mays
gtcacacacaaatcaggattggtagagcccatctctgcgccctgccttgctggctctgacctctccctcccttccccttcctcgattgttcctcccccttcttttattagggttttttttgtctccttagatttgcgcctgttctcacctgtgcgcatactagtctctgcatcagagagtagagacctcggagccgatcttcaacacgcagattgggcagagctgcctgccggagggagagtggagagagagagagagagagagagagagagagctcaaggggggcaaaaggagtttttttttatccagcttgttagcttgattctctttgatccgggagagcagccgccagtccaactaatcctagctattggtgtgccggggctttgattgttctccagatccgagccacctgctgggtggactccaggaatccgagcacgaagttgacaggggagttctcagggaaaagttgcgcaggggaggaaggaagagcctgaaagggcggtgcggagagaaagactataagagcgacctgggtcccttgaggatgccgtcaagaaaccgcgtggagaggagggcgatgagatgagggatgctggccgcggtgatggactatttcagctcctgctggggcccgcgatcgggtgacgggcacagggggaagggccccgacgccgccggccggcaggacggtctcctctggtacaaggacgccggtcagctcgtcactggggagttctccatggccgtggtgcaggccaaccagctgcttgaggaccagagccaagtggagtccggatcgctctccctggctgacccgggcccgcagggcaccttcgtcggcgtctatgatggccatggcggtcctgagacgtcccggttcatcaatgaccacctcttcaaccatctcagaaggtttgcaactgagcacaagtttatgtcagcggacgtgatccggaaagctttccaagcaactgaggagggctttctttctctagtcagcaaggaatggtctttgaagcctcagattgcttcagtgggctcctgctgccttgttggtgtaatctgtgctgggactctctatgttgcaaacctgggtgactcacgtgcagttcttggaaggcttgttaaggcaactggagaggtcgtggccatgcagttgtcatcggagcacaatgcgtgctatgaggaagttagacaagaactgcagtcatcacatcctgacgatccacatattgtggttctcaaacacaatgtttggcgagtgaagggtctcatccagatctcaagatctattggagatgtatatctaaagaaaccagagtacaacagagaaccacttcacagcaagtttcggcttcgagaaaccttccagaggccgatccttagttctgaacctcaaattactgaacatcgaatacagccaaatgatcaatttgttatatttgcttctgatggtctatgggagcacctcagcaataaggaagcagttgaccttgtccaaagtagtccacacaatggaattgctcggagactagtgaaagcggcgatgcaagaagctgccaagaagagggagatgagatactcagacctcaagaagatcgaccgtggtgtgagaaggcatttccacgacgatataacggtcgtcgtggtattccttgatttgaatgccatgagcaaagctagctggagcaaaagcccctcggtttctctccgagggggcggtgtcaccgtccctgcgaagtccctcgcacctttctcagctccggcacggctgaacagcacctactgaagttgctaccactcttgaaaggaagaacacggtgcagatctgcagtggtgagagaaaaaaaaacagcaatcaagtgtagcgttacagttacacctgctgtgttgttgctctttgcaaaactactgtctagactccgcctggtaattagtgtactgatagcgaggtaaaaaaaagttagattatttgttagcagcggcagtgatttgacatctaaggaacaacaacacggtgtccaccgattctgctatcctgatggctcgcggcagcctggctggtcggcacacgacacgaagtgaagctgttttactggcggcatctggctttgttatctcatgggacagtgatccacaagagtaagggatcagctcaatccaaagtcaatagatgttccttataaaacatagaggatgacagcttgatttcagatcctacctaacaaacagtgatatcaacaattggaagacagaataaattcac

SEQ ID NO: 6365 - DNA, 2291 bp, Zea Mays
cacaaatcaggattggtagagcccatctctgcgccctgccttgctggctctgacctctccctcccttccccttcctcgattgttcctcccccttcttttattagggttttttttgtctccttagatttgcgcctgttctcacctgtgcgcatactagtctctgcatcagagagtagagacctcggagccgatcttcaacacgcagattgggcagagctgcctgccggagggagagtggagagagagagagagagagagagagagagagctcaaggggggcaaaaggagtttttttttatccagcttgttagcttgattctctttgatccgggagagcagccgccagtccaactaatcctagctattggtgtgccggggctttgattgttctccagatccgagccacctgctgggtggactccaggaatccgagcacgaagttgacaggggagttctcagggaaaagttgcgcaggggaggaaggaagagcctgaaagggcggtgcggagagaaagactataagagcgacctgggtcccttgaggatgccgtcaagaaaccgcgtggagaggagggcgatgagatgagggatgctggccgcggtgatggactatttcagctcctgctggggcccgcgatcgggtgacgggcacagggggaagggccccgacgccgccggccggcaggacggtctcctctggtacaaggacgccggtcagctcgtcactggggagttctccatggccgtggtgcaggccaaccagctgcttgaggaccagagccaagtggagtccggatcgctctccctggctgacccgggcccgcagggcaccttcgtcggcgtctatgatggccatggcggtcctgagacgtcccggttcatcaatgaccacctcttcaaccatctcagaaggtttgcaactgagcacaagtttatgtcagcggacgtgatccggaaagctttccaagcaactgaggagggctttctttctctagtcagcaaggaatggtctttgaagcctcagattgcttcagtgggctcctgctgccttgttggtgtaatctgtgctgggactctctatgttgcaaacctgggtgactcacgtgcagttcttggaaggcttgttaaggcaactggagaggtcgtggccatgcagttgtcatcggagcacaatgcgtgctatgaggaagttagacaagaactgcagtcatcacatcctgacgatccacatattgtggttctcaaacacaatgtttggcgagtgaagggtctcatccaggtagacaaaaatatgtactctggatcagatctcaagatctattggagatgtatatctaaagaaaccagagtacaacagagaaccacttcacagcaagtttcggcttcgagaaaccttccagaggccgatccttagttctgaacctcaaattactgaacatcgaatacagccaaatgatcaatttgttatatttgcttctgatggtctatgggagcacctcagcaataaggaagcagttgaccttgtccaaagtagtccacacaatggaattgctcggagactagtgaaagcggcgatgcaagaagctgccaagaagagggagatgagatactcagacctcaagaagatcgaccgtggtgtgagaaggcatttccacgacgatataacggtcgtcgtggtattccttgatttgaatgccatgagcaaagctagctggagcaaaagcccctcggtttctctccgagggggcggtgtcaccgtccctgcgaagtccctcgcacctttctcagctccggcacggctgaacagcacctactgaagttgctaccactcttgaaaggaagaacacggtgcagatctgcagtggtgagagaaaaaaaaacagcaatcaagtgtagcgttacagttacacctgctgtgttgttgctctttgcaaaactactgtctagactccgcctggtaattagtgtactgatagcgaggtaaaaaaaagttagattatttgttagcagcggcagtgatttgacatctaaggaacaacaacacggtgtccaccgattctgctatcctgatggctcgcggcagcctggctggtcggcacacgacacgaagtgaagctgttttactggcggcatctggctttgttatctcatgggacagtgatccacaagagtaagggatcagctcaatccaaagtcaatagatgttccttataaaacatagaggtacagatgttctcatcggctatgtgtatttggggaaaaaatcaatataaggggtgtttggtttttag

SEQ ID NO: 6366 - DNA, 2255 bp, Zea Mays
cacaaatcaggattggtagagcccatctctgcgccctgccttgctggctctgacctctccctcccttccccttcctcgattgttcctcccccttcttttattagggttttttttgtctccttagatttgcgcctgttctcacctgtgcgcatactagtctctgcatcagagagtagagacctcggagccgatcttcaacacgcagattgggcagagctgcctgccggagggagagtggagagagagagagagagagagagagagagagctcaaggggggcaaaaggagtttttttttatccagcttgttagcttgattctctttgatccgggagagcagccgccagtccaactaatcctagctattggtgtgccggggctttgattgttctccagatccgagccacctgctgggtggactccaggaatccgagcacgaagttgacaggggagttctcagggaaaaggggaggaaggaagagcctgaaagggcggtgcggagagaaagactataagagcgacctgggtcccttgaggatgccgtcaagaaaccgcgtggagaggagggcgatgagatgagggatgctggccgcggtgatggactatttcagctcctgctggggcccgcgatcgggtgacgggcacagggggaagggccccgacgccgccggccggcaggacggtctcctctggtacaaggacgccggtcagctcgtcactggggagttctccatggccgtggtgcaggccaaccagctgcttgaggaccagagccaagtggagtccggatcgctctccctggctgacccgggcccgcagggcaccttcgtcggcgtctatgatggccatggcggtcctgagacgtcccggttcatcaatgaccacctcttcaaccatctcagaaggtttgcaactgagcacaagtttatgtcagcggacgtgatccggaaagctttccaagcaactgaggagggctttctttctctagtcagcaaggaatggtctttgaagcctcagattgcttcagtgggctcctgctgccttgttggtgtaatctgtgctgggactctctatgttgcaaacctgggtgactcacgtgcagttcttggaaggcttgttaaggcaactggagaggtcgtggccatgcagttgtcatcggagcacaatgcgtgctatgaggaagttagacaagaactgcagtcatcacatcctgacgatccacatattgtggttctcaaacacaatgtttggcgagtgaagggtctcatccagatctcaagatctattggagatgtatatctaaagaaaccagagtacaacagagaaccacttcacagcaagtttcggcttcgagaaaccttccagaggccgatccttagttctgaacctcaaattactgaacatcgaatacagccaaatgatcaatttgttatatttgcttctgatggtctatgggagcacctcagcaataaggaagcagttgaccttgtccaaagtagtccacacaatggaattgctcggagactagtgaaagcggcgatgcaagaagctgccaagaagagggagatgagatactcagacctcaagaagatcgaccgtggtgtgagaaggcatttccacgacgatataacggtcgtcgtggtattccttgatttgaatgccatgagcaaagctagctggagcaaaagcccctcggtttctctccgagggggcggtgtcaccgtccctgcgaagtccctcgcacctttctcagctccggcacggctgaacagcacctactgaagttgctaccactcttgaaaggaagaacacggtgcagatctgcagtggtgagagaaaaaaaaacagcaatcaagtgtagcgttacagttacacctgctgtgttgttgctctttgcaaaactactgtctagactccgcctggtaattagtgtactgatagcgaggtaaaaaaaagttagattatttgttagcagcggcagtgatttgacatctaaggaacaacaacacggtgtccaccgattctgctatcctgatggctcgcggcagcctggctggtcggcacacgacacgaagtgaagctgttttactggcggcatctggctttgttatctcatgggacagtgatccacaagagtaagggatcagctcaatccaaagtcaatagatgttccttataaaacatagaggtacagatgttctcatcggctatgtgtatttggggaaaaaatcaatataaggggtgtttggtttttag

SEQ ID NO: 6367 - DNA, 1876 bp, Zea Mays
aagcgcccgcccgacctagtgggctccgccggccgccaaacctctcgctctccactgactccgccgctccgcccggtccaaaaccccaccgctgcctctccgccggctcctcactgtgttcctcgccgatcgccgtgccgccgggcgatggggaggttatcgggaagcgggtccaggaagccgcctcccttcctctcgccctcctcatcattctcctcctcgtcgtactccaagcgctcccgcactgttcggcgcctcccgtcgctgcccaggccgcctctcgcgccgccggcgccgcaccccgccgggaggacgaggaggaggaaggcacccgcccggctgtggatgaggatggatcggtggggcaggtgcgaggtgttcatgactaacggggccttcgtcgcggaacgctccggggtgcacgcgcgcgacctgcgcatcgttgggccccttctctctcgctgccccggcatcctcggtgagctgtgaattgctagctagtgaaatcctcactctagcatatcgtcgagtgaatcatatctgctattggtgagattaggctttgctcgtttcgcagctcgagagaaggccatggtaatcgatctagagttcataagagctattgtaactgcggacgaagtcctgctgctggaacctcttgctcaggaggttatccctttcatcgataaattgaggcggcattttccattgaagagcctggaggttgatgttggggccacacaagtgggtaatgtgaatggcaagcatgctaaaactgctgcagagtgtgagctccccctcccctttgagtttcaggtgttggagctcgccctagaagctgtatgcttgtcatttcattcaagcctatctgatctgaataggcacaccatctttgtgatggatgagttgactaagaatgtgagcaccaggaaccttgaacgtgttcgaagtctgaaaagaaatctaacctccctgctcgctggtgtgcaaaaggtcagagatgaagtagagcatcttttggatcataatgagaatatggcacaactgcacctatccaggaagcaaataaaatgtccgcaggatgaaattctactggcttctgctgctttaaatagcaatcttccttcaaaaacaaagctgggtacaccaaattctgttgttaaccaagccatgggcattgctatgactgcgccactggccgacaatgtaggagacctagagatattacttgaatcttatttcatgcagctggatggaattcgcaacagaattatgatggtccgaggatatattgttgacacagaagactacatcaacatacaacttgacaaccaacgcaatgaactcattcagttccatcttgtactgatcattgtatcatttggcatagctatgaacacattgatagctggagcgtttgccatgaacatgcctcacaatggggagatgaagaagtttgtaggcccgttttggccatttgttggggccacatcatctttctgcttgttggtcagcgttgttttactgggatatgcaagggggaacaggctacttggcagttgaaggcggcgttagataaatctatgcaagatcatcttcacattgcctcctgacttggcggaaactaacgtggcataatatgggtgaaggttacctcgaacagttttggcaggacagactgaatggtcaggagcgcaaggccgatgactccagtcacggcatgagggctgcaaatccattgccagaaatttgtaaggcgaccttagcttcttacagtgcacatagaagaagtacagtacgtattctgaggacaggacctttcaaagatgggtttgtctgaggtgagaagagctgtgatcccaccggtcgcgcccag

SEQ ID NO: 6368 - DNA, 1466 bp, Zea Mays
ggcaggtgcgaggtgttcatgactaacggggccttcgtcgcggaacgctccggggtgcacgcgcgcgacctgcgcatcgttgggccccttctctctcgctgccccggcatcctcggctttgctcgtttcgcagctcgagagaaggccatggtaatcgatctagagttcataagagctattgtaactgcggacgaagtcctgctgctggaacctcttgctcaggaggttatccctttcatcgataaattgaggcggcattttccattgaagagcctggaggttgatgttggggccacacaagtgggtaatgtgaatggcaagcatgctaaaactgctgcagagtgtgagctccccctcccctttgagtttcaggtgttggagctcgccctagaagctgtatgcttgtcatttcattcaagcctatctgatctgaataggcacaccatctttgtgatggatgagttgactaagaatgtgagcaccaggaaccttgaacgtgttcgaagtctgaaaagaaatctaacctccctgctcgctggtgtgcaaaaggtcagagatgaagtagagcatcttttggatcataatgagaatatggcacaactgcacctatccaggaagcaaataaaatgtccgcaggatgaaattctactggcttctgctgctttaaatagcaatcttccttcaaaaacaaagctgggtacaccaaattctgttgttaaccaagccatgggcattgctatgactgcgccactggccgacaatgtaggagacctagagatattacttgaatcttatttcatgcagctggatggaattcgcaacagaattatgatggtccgaggatatattgttgacacagaagactacatcaacatacaacttgacaaccaacgcaatgaactcattcagttccatcttgtactgatcattgtatcatttggcatagctatgaacacattgatagctggagcgtttgccatgaacatgcctcacaatggggagatgaagaagtttgtaggcccgttttggccatttgttggggccacatcatctttctgcttgttggtcagcgttgttttactgggatatgcaagggggaacaggctacttggcagttgaaggcggcgttagataaatctatgcaagatcatcttcacattgcctcctgacttggcggaaactaacgtggcataatatgggtgaaggcaagtgcctggtccatctgtatattgatgctttccaatcatacccttttggagtttgcatcgggcattgcatgccatatatgtataccgacactgtctactactattataacaatgagagacgcgacaaaaaattcctgtcattagcacaccagaactcaattgtctgattcttcagaatggtgacatagaaacaagtgattgataacagcatgttactttctgcgtttaagatcacaacattttcttgctctttcctct

SEQ ID NO: 6369 - DNA, 1717 bp, Zea Mays
aagcgcccgcccgacctagtgggctccgccggccgccaaacctctcgctctccactgactccgccgctccgcccggtccaaaaccccaccgctgcctctccgccggctcctcactgtgttcctcgccgatcgccgtgccgccgggcgatggggaggttatcgggaagcgggtccaggaagccgcctcccttcctctcgccctcctcatcattctcctcctcgtcgtactccaagcgctcccgcactgttcggcgcctcccgtcgctgcccaggccgcctctcgcgccgccggcgccgcaccccgccgggaggacgaggaggaggaaggcacccgcccggctgtggatgaggatggatcggtggggcaggtgcgaggtgttcatgactaacggggccttcgtcgcggaacgctccggggtgcacgcgcgcgacctgcgcatcgttgggccccttctctctcgctgccccggcatcctcgctcgagagaaggccatggtaatcgatctagagttcataagagctattgtaactgcggacgaagtcctgctgctggaacctcttgctcaggaggttatccctttcatcgataaattgaggcggcattttccattgaagagcctggaggttgatgttggggccacacaagtgggtaatgtgaatggcaagcatgctaaaactgctgcagagtgcacaccatctttgtgatggatgagttgactaagaatgtgagcaccaggaaccttgaacgtgttcgaagtctgaaaagaaatctaacctccctgctcgctggtgtgcaaaaggtcagagatgaagtagagcatcttttggatcataatgagaatatggcacaactgcacctatccaggaagcaaataaaatgtccgcaggatgaaattctactggcttctgctgctttaaatagcaatcttccttcaaaaacaaagctgggtacaccaaattctgttgttaaccaagccatgggcattgctatgactgcgccactggccgacaatgtaggagacctagagatattacttgaatcttatttcatgcagctggatggaattcgcaacagaattatgatggtccgaggatatattgttgacacagaagactacatcaacatacaacttgacaaccaacgcaatgaactcattcagttccatcttgtactgatcattgtatcatttggcatagctatgaacacattgatagctggagcgtttgccatgaacatgcctcacaatggggagatgaagaagtttgtaggcccgttttggccatttgttggggccacatcatctttctgcttgttggtcagcgttgttttactgggatatgcaagggggaacaggctacttggcagttgaaggcggcgttagataaatctatgcaagatcatcttcacattgcctcctgacttggcggaaactaacgtggcataatatgggtgaaggcaagtgcctggtccatctgtatattgatgctttccaatcatacccttttggagtttgcatcgggcattgcatgccatatatgtataccgacactgtctactactattataacaatgagagacgcgacaaaaaattcctgtcattagcacaccagaactcaattgtctgattcttcagaatggtgacatagaaacaagtgattgataacagcatgttactttctgcgtttaagatcacaacattttcttgctctttcctct

SEQ ID NO: 6370 - DNA, 1150 bp, Zea Mays
ctactcccataactccaaccattacctcctacgggtgtcccttacgtgaaaagacgaccaaagaacatattcaccgttcgtttatttgtattgatggtggtcggcgacttcacgtaggtatgtgtcatttgctgttgcgaatagtaatgttgggcttcagttctggcgcttcccgggcacgcaaaaacctacatggtgatatgaacacaggcacgcaactgcactgaacttcattcgttgcgagagcgtgaatgcaccgggaacttcactgcgaatgcgacgctcactttccctacgagccgagcctgagacgaggccaactgatcaggagcaccactatatgttacaatccataactcctacaagcatacgatcgagtatacgtagcacgtacggtagcagtacatgagtaccttgctgttgctgcgacctgcgacacagacacagggtgaagcgacgagacgggatgaaggcgactcgatccgtgcaatgcacagacgcaacagcagatgcagacatgcagtggtcgtcctcgtctcgctttccctctctcgcacggcagaaatcaacctcgatcgaggtgtttaatgacacgtcccggatgcgttggaccagcctcgttggagccaggctccggagaaacgagaattgcaccatctcagtttccaaactcgttgaagtatgtcacgccggccttctatctcccaaaccagaaagcagaaagaatggtgagaggatgttggcgatatatatgcatctaactcattagggatacaggtgggtatatcagtgtccacaaacattttttgctttattgaaggttctacaataatcgagaaaatttcggcttgtttgaaggctcacttgcgtccctaccactcatggccatgaccagttggcccatcctacttacttgctgaccattcgtaaggcaaaggatgtgcgagcggtcttacttgctagggaacagataatggaagccgcactgctgaccgtcgaaatagggagagtggcaggtgcaagcgctagtggagcatggagatgacaggggcatgactacgtgcgatgaagggtttaccggagttgcttgatctcaagctagtctctatgcgagacgctgaaagcaccatgtacgtatttggtaagtgag

SEQ ID NO: 6371 - DNA, 1195 bp, Zea Mays
ggcgaggctagctaatgaaggttacggtgactactcccataactccaaccattacctcctacgggtgtcccttacgtgaaaagacgaccaaagaacatattcaccgttcgtttatttgtattgatggtggtcggcgacttcacgtaggtagtatcaactcgtgtatgtgtcatttgctgttgcgaatagtaatgttgggcttcagttctggcgcttcccgggcacgcaaaaacctacatggtgatatgaacacaggcacgcaactgcactgaacttcattcgttgcgagagcgtgaatgcaccgggaacttcactgcgaatgcgacgctcactttccctacgagccgagcctgagacgaggccaactgatcaggagcaccactatatgttacaatccataactcctacaagcatacgatcgagtatacgtagcacgtacggtagcagtacatgagtaccttgctgttgctgcgacctgcgacacagacacagggtgaagcgacgagacgggatgaaggcgactcgatccgtgcaatgcacagacgcaacagcagatgcagacatgcagtggtcgtcctcgtctcgctttccctctctcgcacggcagaaatcaacctcgatcgaggtgtttaatgacacgtcccggatgcgttggaccagcctcgttggagccaggctccggagaaacgagaattgcaccatctcagtttccaaactcgttgaagtatgtcacgccggccttctatctcccaaaccagaaagcagaaagaatggtgagaggatgttggcgatatatatgcatctaactcattagggatacaggtgggtatatcagtgtccacaaacattttttgctttattgaaggttctacaataatcgagaaaatttcggcttgtttgaaggctcacttgcgtccctaccactcatggccatgaccagttggcccatcctacttacttgctgaccattcgtaaggcaaaggatgtgcgagcggtcttacttgctagggaacagataatggaagccgcactgctgaccgtcgaaatagggagagtggcaggtgcaagcgctagtggagcatggagatgacaggggcatgactacgtgcgatgaagggtttaccggagttgcttgatctcaagctagtctctatgcgagacgctgaaagcaccatgtacgtatttggtaagtgag

SEQ ID NO: 6372 - DNA, 2122 bp, Zea Mays
ctaatgttaaaaaaacatagctaacaacttagctagttccctagaatgtgatctcgtgaaaacagaacataactgcaatagttttgtcagtcagaacaggacctgaggaaatgatactcacctcattattgcccaagaaagctacaaagctacagctgcatatagattataaaactaaaagaaaatgttctgttcatacaaccaaagctccaatatcgagccaacaaacaaaccctcaagtagcacgagattggcgcaaataaactgatagcttcatggttaggtggctggttgcagcctacccacctgcgttgaagcgcaactagacgcagatgtcgtctggggcatggaggtcaatcacaccagagaccaagactgtggaggtgtgtgtaagcaggtgtgcatgtgcgaaatataggtttgtgtatgcacatatgtgttcagataccacagcagtacccacataagaaataaaacaaagtagcatgaaattccatgttattttcatatcttaccaaagtatactcacttcacctttggagataagactaaagcccattgcagagtagttgaaatttgatgggttcctatgtggattaaatagaacatcagaatacagggctatattgactcactatcaggtgaagtgcagtttcatctcaacttcgctcttgaggagttactagtctggtccaaacaatgagaataatacaactaactggagatggagatattgatgaagattttagccatagaatcaaagcagggtagatgaagtggcgtcaaacatttgacgtctatatgacaagagggtaccattgaagctaaaagacaagttttataggacgacaattagacctgctatgttgtacggtgcaaaatgtttgcctataaaaagatgatatgttcaacagatcaatgttatagaaatgtgtatgttgtgttggatttgtgaccatacaagaagtgagcgagtccaggacaatgatatatgtgaacgtgataggctaagggtagcactaattgaagaaaattctgtccaacatcggttgagatggttcatgtccaacaaaggcctctagagacaccagtgcgtagtgagttctaaggcacaatagcaatggaaagagaggggagggaaggccaaaattgacatggaaagagacaataaaaggaaataaaggatataatataactataaatttaaccttgaatttgagtgcataggaaatacctattcatatgtctgaaccttgacttgtggattttgttgtgttttaattctagtctatcccgacttgcttgggagtaaaaggcattattgttgttgttgttagagactggtgatagaataccatgtgtcctccacagaaattcttccaagcaagtggaaaatgaacttttggttatagtgtggtcaaacccacagaagatttttttcccatgtagtcagattcctttgctccaccgggtcaactaaacaaaatgggaatcaggatgggtggccatgtgatcgtatctagttccagctgtctgttggcatactaagatagattatgcccaccatttcattagtgcaaactaaaacttcagatcccatgaaaagtgcttgacatgggcataaaagacataaacatctccactacaataaatgtatagaaacaaagtttttaggtgcagcaaggttgtgtaatgtacatgcatgtgtccagatttaactttgtcaacttggccagttgactgcataagtataaaatgatgaaaataagatactgagtgttagctgtcttaaatctcttttcctttggggaactaattaccttaacccctaagtactggaagttatttattacttgataaagagtacgaatccaacaatctactgctaattaacatgtgcagctcctcaaaaaaatgcctaataaatgtaaagaaaatcataaacttcaattaatctagattgcctaattaaatagtgattgaccccatagaatttgactgctcatcatccgattagaaagccagaaatagcacagtattcagatcataacacttgaatcatttactcactaaattgcattttgcaaacaaaaatgtttacagatgaacactaacagagaag

SEQ ID NO: 6373 - DNA, 2381 bp, Zea Mays
aggtcagcacactccttgccgataggtccagtgattgcagaacctgcaagagagacattgtaagttcgtttcatgccttgccaaacagcacttggctgatgatgatggaggaatctcaggttgtatcatacctttcatctcacccttgggattcacaatcactccagcattatctgcaaatgaaatgcagcagttatttaacaattaataacaagaacaaagccagatagtatagagttgaaatgacgagaacacataaagaaacacacattccacagaaccaaaacctttaacaaggaaacatcatcataacaaattaaaaaatatatatgtctcatggccagtcccaaagtttcattgcagcgatgccactacccaaggcaatggaatatgagaccattttcaaatggaggaaggctctcaaagatgaaaatccttgcaagcaaacctctacagataaaaacttaatatttgacgtttgctttggaatatgcaaacatgtaatgtttgctccaaaaaagctgaagaacctcggagcccttccgtcagtaagcaataagcagggtgttgctatccccagttaacacaccatagaacatcaaccaaacatttgtaactagggatagcctggttcaattaacaattaacaagcaacaaaaaacaaaaagacaaatgtaaatgcaatgaatgaaaagtaaatgtaatattgtggtattgtctgcctcatggccagtcccaaagtttcattgcagcaacgccgctaccaagggcaatggaatatgaggtcgccttcagatggagaaattcctatggaaaatctcaacacccaaaggcttaatatatgacgtttgcctgggaatatacaaacatgcattgtttgctccacaataaggctgaaggacatggacgtccaaccatcaaataaataatctgtgttcagtgtctatgaaatgttccctaatccacaaatcaaaatgtgtaacatcttttgtaacatttacaagtaaaaactagtaaaattcaacaataatgtgaaccagtaaaaacaacaggataacaaaacaactcgcgaccaagtggataccataatactgaacatatacgaaagtaaacacaacattgcatcatgaagctgaaatgtatgaaatatgatcctcatggccagtccaaaattttcatggcagcgacgctgctacacaaggcaatggaatatgaggctgccctctaacggataatatccatgaaagagcaaactttcaatggaaattctcaacatcagaaggcttaatctatgacgtttgctttggaatatgcagacactatcgacttctactccagcaaaagctagagaccctcatggccctcccgtcaaatgaatttcaaccctaaagcactgagcatatgtaccaaggaccagcaaaagtaaatcgaaagccaatctaagcacatcaacatcgcttgatctaagtgaaacatgtagcaaagtaaacacacaacattgcatcatgaaactgagatgtatgaaatatgagcctcatggccagtcccaaattttcatggcggcgacgctgctacacaaggcgatggaatatgaggctgccctctaatggataatatccacgaaagagcaaactttcaatggaaatcctcaacatcagaaggcttaatctatgacgtttgctttggaatatgcagacactatcgacttctgctccagcaaaagctagagagcctcgcggccctcccgtcaaataaatttcaaccctatagcacggagcatatgtaccaaataccagcaaaagtaaatcgaaagccaatctaagcacatcaacatcgcttgatctaagtgaaacatgtaccaaagtaaacacacaacattgcatcatgaaactgagatgtacgtaatatgagcctcatggccagtcccaaattttaatggcggcgacgctgctacacaaggcgatggaatatgaggctgccctctaatggataatatccacgaaagagcaaactttcaatggaaatcctcaacatcagaaggcttaatctatgacgtttgctttggaatatgcagacattatcgacttctgctccagaaaaagctagagagcctcgcggccctcccgtcaaataaatttcaaccctaaagtagatactatgcctgtgtcacaagaaacaccgaaactccaaaagtaaatcgaaagcccatctaagcacatcgacaacgcttgatctaaacagttatcggtgggtggaatagggtcgctaccttcgaagtacatgtagacaccgtccttgcgacgccacggcttgcgctggcggacgggaggcggttgaggcggcccttgattcccttgacggagatgatgtagaggttcttc

SEQ ID NO: 6374 - DNA, 2116 bp, Zea Mays
tttaatttgaaacatcacatgggtactctagagattagtttggccgcatcctccgtatcttctacttcttgaccagggatggagcttgtatacatggaaaggagaaacggatcgtacgacgatggcgcggttccagagttcagtggaaggggggctggaggggatcaggatcaggacccgcccgctgctgcatccgaggtccagtctgactcgcgtcagacaccggacgagaagaagagcaagggctgccaatcatgccgtgacccattctgttcatgcagcggcggcacgccccactcggaactgttccccccacatcccgccaagatgatgatcctggagttcctcatcgcgagcctcaggcacccgacaagaacccacaacgtcagtgatctcgacgacctgatcgccgacggggtcagccaagggagcgtggtaaacctcggcccttctgagaagaaggtgctggaatctctgcacgccatggtaaacgccaagacgaggccgaagagcccgtcgccgttcatggcgggatctaagctgaggaaaatccggtccaagtcccacgtcataacgcagtcggaaatactgaagctcatctctcctgagacgtgggaagcctcctccttccctggggcgtctccgatgatcggcggaggcacggctgaggacggcgtccatgggaacaagccgccgccgccgtgctgctcgtctgtgagctcaaaccagcatgttctgtcacggtgcccgtcgtccctcagcgcatgccttctacagtgcatatggaaggatggcctgcctcattttgagctgtcactggacgatcatcccattgcggtgtacgctgcaagtccagtcagggtgctggagaaggacagggccttcgactacgtctacatgatccattcgggagagcaaggaagaaaagactggatgggccactcgagcaacgtgtccagacttgtgggcaaggtgaaggtgtcaagttctcttgttcttaacccagacaagtcaggtcttttggaaaccgagtttgttctgtatggttctccggacgactatcttaggcagatgcgcagtccctacagcgtgccgaaagggaagggccttgtcaggagggtgacagagatcatgagagcaggcaatgtttccgctagcccgagacatccctggaagctgggcaaatcttcctctcatcagttcgacgacttggctggagtacttgaaggtgaaatgatcagtgctggaggatcagacctggtgagtctcaaggccgacgatctgccgtccaaccaagaattagcagcgattgtggtgagggaacagcggcgcagacgacggaaagagcctgtttcgggtggctggggcctcaagttccttgagaaagcaggactgaatcgcccacaaggcactgaagaaactgatgttcagaacagtgatggtgccacacattgtgtaactgttgttgtccccagaggctaccacggcggcgtggtatcaaagagtagtcgcccgtcaggcctcgtcgagagatggagatctggaggacgctgtgactgcggcggatgggatcttggctgccccatcagagtgctcaacggtgatggatgtggctccttgcctgaaggagagtcacgggacagaaggtcggtagagatatcgatcaagggtgcaaagaatgagacaatgttgaagctcgtgaatatcacggaggacttgtacatcctctacttcgactcgagtatttcaccattgcagtgcttctcaacagggatagcgattgtgcacagccgagcgccagagctttgccccaaactgtgaattgcgcacagccaggcacgcacccgagctttgccccccaaactgtgaattgcaaagcttggtgtagctgaattacaaagattcgtgaagcactatgtacatgtagatagtagaatgggaataattcttgttatttttaacttatataattttgagagagaaaagcaggcagctgttttcagactgcttttaaatcatcaatctgttggtttggccgattgagcgaaagctaagaaacatgaattacaaatcatgtttcgttaacaattacgattttttgaatcccttgataaat

SEQ ID NO: 6375 - DNA, 2229 bp, Zea Mays
gcccctggtacttgagaggaattaatgtgctgggggggggggtgctgaggacggaggttagctgtgcctgctcccatttggagggacgaagttttatcctgtggttactgcttgtcgatgtcaagcaatttttatgtactctagagattagtttggccgcatcctccgtatcttctacttcttgaccagggatggagcttgtatacatggaaaggagaaacggatcgtacgacgatggcgcggttccagagttcagtggaaggggggctggaggggatcaggatcaggacccgcccgctgctgcatccgaggtccagtctgactcgcgtcagacaccggacgagaagaagagcaagggctgccaatcatgccgtgacccattctgttcatgcagcggcggcacgccccactcggaactgttccccccacatcccgccaagatgatgatcctggagttcctcatcgcgagcctcaggcacccgacaagaacccacaacgtcagtgatctcgacgacctgatcgccgacggggtcagccaagggagcgtggtaaacctcggcccttctgagaagaaggtgctggaatctctgcacgccatggtaaacgccaagacgaggccgaagagcccgtcgccgttcatggcgggatctaagctgaggaaaatccggtccaagtcccacgtcataacgcagtcggaaatactgaagctcatctctcctgagacgtgggaagcctcctccttccctggggcgtctccgatgatcggcggaggcacggctgaggacggcgtccatgggaacaagccgccgccgccgtgctgctcgtctgtgagctcaaaccagcatgttctgtcacggtgcccgtcgtccctcagcgcatgccttctacagtgcatatggaaggatggcctgcctcattttgagctgtcactggacgatcatcccattgcggtgtacgctgcaagtccagtcagggtgctggagaaggacagggccttcgactacgtctacatgatccattcgggagagcaaggaagaaaagactggatgggccactcgagcaacgtgtccagacttgtgggcaaggtgaaggtgtcaagttctcttgttcttaacccagacaagtcaggtcttttggaaaccgagtttgttctgtatggttctccggacgactatcttaggcagatgcgcagtccctacagcgtgccgaaagggaagggccttgtcaggagggtgacagagatcatgagagcaggcaatgtttccgctagcccgagacatccctggaagctgggcaaatcttcctctcatcagttcgacgacttggctggagtacttgaaggtgaaatgatcagtgctggaggatcagacctggtgagtctcaaggccgacgatctgccgtccaaccaagaattagcagcgattgtggtgagggaacagcggcgcagacgacggaaagagcctgtttcgggtggctggggcctcaagttccttgagaaagcaggactgaatcgcccacaaggcactgaagaaactgatgttcagaacagtgatggtgccacacattgtgtaactgttgttgtccccagaggctaccacggcggcgtggtatcaaagagtagtcgcccgtcaggcctcgtcgagagatggagatctggaggacgctgtgactgcggcggatgggatcttggctgccccatcagagtgctcaacggtgatggatgtggctccttgcctgaaggagagtcacgggacagaaggtcggtagagatatcgatcaagggtgcaaagaatgagacaatgttgaagctcgtgaatatcacggaggacttgtacatcctctacttcgactcgagtatttcaccattgcagtgcttctcaacagggatagcgattgtgcacagccgagcgccagagctttgccccaaactgtgaattgcgcacagccaggcacgcacccgagctttgccccccaaactgtgaattgcaaagcttggtgtagctgaattacaaagattcgtgaagcactatgtacatgtagatagtagaatgggaataattcttgttatttttaacttatataattttgagagagaaaagcaggcagctgttttcagactgcttttaaatcatcaatctgttggtttggccgattgagcgaaagctaagaaacatgaattacaaatcatgtttcgttaacaattacgattttttgaatcccttgataaat

SEQ ID NO: 6376 - DNA, 2214 bp, Zea Mays
ctttcctttgctgccgtgttaaaggcagcatagcaacaaagcgatttcccgttgcacccggccgttctttcccgttgcacccggccgttctttacgccggtgatgaagaacgcatttaaggtactctagagattagtttggccgcatcctccgtatcttctacttcttgaccagggatggagcttgtatacatggaaaggagaaacggatcgtacgacgatggcgcggttccagagttcagtggaaggggggctggaggggatcaggatcaggacccgcccgctgctgcatccgaggtccagtctgactcgcgtcagacaccggacgagaagaagagcaagggctgccaatcatgccgtgacccattctgttcatgcagcggcggcacgccccactcggaactgttccccccacatcccgccaagatgatgatcctggagttcctcatcgcgagcctcaggcacccgacaagaacccacaacgtcagtgatctcgacgacctgatcgccgacggggtcagccaagggagcgtggtaaacctcggcccttctgagaagaaggtgctggaatctctgcacgccatggtaaacgccaagacgaggccgaagagcccgtcgccgttcatggcgggatctaagctgaggaaaatccggtccaagtcccacgtcataacgcagtcggaaatactgaagctcatctctcctgagacgtgggaagcctcctccttccctggggcgtctccgatgatcggcggaggcacggctgaggacggcgtccatgggaacaagccgccgccgccgtgctgctcgtctgtgagctcaaaccagcatgttctgtcacggtgcccgtcgtccctcagcgcatgccttctacagtgcatatggaaggatggcctgcctcattttgagctgtcactggacgatcatcccattgcggtgtacgctgcaagtccagtcagggtgctggagaaggacagggccttcgactacgtctacatgatccattcgggagagcaaggaagaaaagactggatgggccactcgagcaacgtgtccagacttgtgggcaaggtgaaggtgtcaagttctcttgttcttaacccagacaagtcaggtcttttggaaaccgagtttgttctgtatggttctccggacgactatcttaggcagatgcgcagtccctacagcgtgccgaaagggaagggccttgtcaggagggtgacagagatcatgagagcaggcaatgtttccgctagcccgagacatccctggaagctgggcaaatcttcctctcatcagttcgacgacttggctggagtacttgaaggtgaaatgatcagtgctggaggatcagacctggtgagtctcaaggccgacgatctgccgtccaaccaagaattagcagcgattgtggtgagggaacagcggcgcagacgacggaaagagcctgtttcgggtggctggggcctcaagttccttgagaaagcaggactgaatcgcccacaaggcactgaagaaactgatgttcagaacagtgatggtgccacacattgtgtaactgttgttgtccccagaggctaccacggcggcgtggtatcaaagagtagtcgcccgtcaggcctcgtcgagagatggagatctggaggacgctgtgactgcggcggatgggatcttggctgccccatcagagtgctcaacggtgatggatgtggctccttgcctgaaggagagtcacgggacagaaggtcggtagagatatcgatcaagggtgcaaagaatgagacaatgttgaagctcgtgaatatcacggaggacttgtacatcctctacttcgactcgagtatttcaccattgcagtgcttctcaacagggatagcgattgtgcacagccgagcgccagagctttgccccaaactgtgaattgcgcacagccaggcacgcacccgagctttgccccccaaactgtgaattgcaaagcttggtgtagctgaattacaaagattcgtgaagcactatgtacatgtagatagtagaatgggaataattcttgttatttttaacttatataattttgagagagaaaagcaggcagctgttttcagactgcttttaaatcatcaatctgttggtttggccgattgagcgaaagctaagaaacatgaattacaaatcatgtttcgttaacaattacgattttttgaatcccttgataaat

SEQ ID NO: 6377 - DNA, 3255 bp, Zea Mays
ctttcacatggcctgccgtgccgcgtctctcccacgccactctcgccggtcaccagatcgtcgctcgcttccgttattaacccgttttgtagctgattccggggctcctgctgcccgcggtccacccttcggtcagctaataacgcctccgcctcttcccttccctcccttcccccttgggcttgggccctgcccattaaactcgagcagggcactgtttctacaacgtttgccgttctcgaccgaccattgatggccacgaagagttaagccctgctctgggaagggcactgtttctttagcttccatgcgtagtaggcacgcggcgcacgcaggcaggcaggcgggcatggaaaagggaactgtagcgcccacgcgttaccgaccgagagagagagagtcgagcgagtcctccacgtccgcctccgccccccaaaccaaaggcatacaagccgtcgtgtgttaatggaaacggacaagtgtgaggaggaggagcaaagccagcagccttttttcccttgacgcctcgcctcgcctcgccttgctgccccctcctcccgttctcgaacaggtcaagccgcgcctcctctcgcctgcctgcgtccttgctcttcctcctcctccctttgcccgtcgtccgctccgcttcgttgtctcatccgctgccgttctagcaagcggggcagcgtcgcgcctcggcctgatgctccaccacgctccagtccacagcctccccggtccttctcgttcccgttgagagcggcggcttgcccggcccccgggtcctcttcacctcacctaaccttgtttctagtttcggtccgtcggttggtgcctcgtcggctgcctctcgctgcttggcccgtttcttcctggggtcgcgggcctggagtacacaagtatataatcttcccggccgtcgtcttctctttctcgacctgcctctcttcgcattggcccgttcccgttcctcgctccctgctgctccttccgagacagactgcctgggatcgaagcacacgataggagagacctcctctgtcgtctgtgcctgggtgagaggtcgggtggtggtggcagtgcttggatgcttcacgcgaggccttggatggtggatgctgcgtgctgctggtctctgcgctgcgcctgaggtactctagagattagtttggccgcatcctccgtatcttctacttcttgaccagggatggagcttgtatacatggaaaggagaaacggatcgtacgacgatggcgcggttccagagttcagtggaaggggggctggaggggatcaggatcaggacccgcccgctgctgcatccgaggtccagtctgactcgcgtcagacaccggacgagaagaagagcaagggctgccaatcatgccgtgacccattctgttcatgcagcggcggcacgccccactcggaactgttccccccacatcccgccaagatgatgatcctggagttcctcatcgcgagcctcaggcacccgacaagaacccacaacgtcagtgatctcgacgacctgatcgccgacggggtcagccaagggagcgtggtaaacctcggcccttctgagaagaaggtgctggaatctctgcacgccatggtaaacgccaagacgaggccgaagagcccgtcgccgttcatggcgggatctaagctgaggaaaatccggtccaagtcccacgtcataacgcagtcggaaatactgaagctcatctctcctgagacgtgggaagcctcctccttccctggggcgtctccgatgatcggcggaggcacggctgaggacggcgtccatgggaacaagccgccgccgccgtgctgctcgtctgtgagctcaaaccagcatgttctgtcacggtgcccgtcgtccctcagcgcatgccttctacagtgcatatggaaggatggcctgcctcattttgagctgtcactggacgatcatcccattgcggtgtacgctgcaagtccagtcagggtgctggagaaggacagggccttcgactacgtctacatgatccattcgggagagcaaggaagaaaagactggatgggccactcgagcaacgtgtccagacttgtgggcaaggtgaaggtgtcaagttctcttgttcttaacccagacaagtcaggtcttttggaaaccgagtttgttctgtatggttctccggacgactatcttaggcagatgcgcagtccctacagcgtgccgaaagggaagggccttgtcaggagggtgacagagatcatgagagcaggcaatgtttccgctagcccgagacatccctggaagctgggcaaatcttcctctcatcagttcgacgacttggctggagtacttgaaggtgaaatgatcagtgctggaggatcagacctggtgagtctcaaggccgacgatctgccgtccaaccaagaattagcagcgattgtggtgagggaacagcggcgcagacgacggaaagagcctgtttcgggtggctggggcctcaagttccttgagaaagcaggactgaatcgcccacaaggcactgaagaaactgatgttcagaacagtgatggtgccacacattgtgtaactgttgttgtccccagaggctaccacggcggcgtggtatcaaagagtagtcgcccgtcaggcctcgtcgagagatggagatctggaggacgctgtgactgcggcggatgggatcttggctgccccatcagagtgctcaacggtgatggatgtggctccttgcctgaaggagagtcacgggacagaaggtcggtagagatatcgatcaagtactttgcagggtgcaaagaatgagacaatgttgaagctcgtgaatatcacggaggacttgtacatcctctacttcgactcgagtatttcaccattgcagtgcttctcaacagggatagcgattgtgcacagccgagcgccagagctttgccccaaactgtgaattgcgcacagccaggcacgcacccgagctttgccccccaaactgtgaattgcaaagcttggtgtagctgaattacaaagattcgtgaagcactatgtacatgtagatagtagaatgggaataattcttgttatttttaacttatataattttgagagagaaaagcaggcagctgttttcagactgcttttaaatcatcaatctgttggtttggccgattgagcgaaagctaagaaacatgaattacaaatcatgtttcgttaacaattacgattttttgaatcccttgataaat

SEQ ID NO: 6378 - DNA, 3278 bp, Zea Mays
ctttcacatggcctgccgtgccgcgtctctcccacgccactctcgccggtcaccagatcgtcgctcgcttccgttattaacccgttttgtagctgattccggggctcctgctgcccgcggtccacccttcggtcagctaataacgcctccgcctcttcccttccctcccttcccccttgggcttgggccctgcccattaaactcgagcagggcactgtttctacaacgtttgccgttctcgaccgaccattgatggccacgaagagttaagccctgctctgggaagggcactgtttctttagcttccatgcgtagtaggcacgcggcgcacgcaggcaggcaggcgggcatggaaaagggaactgtagcgcccacgcgttaccgaccgagagagagagagtcgagcgagtcctccacgtccgcctccgccccccaaaccaaaggcatacaagccgtcgtgtgttaatggaaacggacaagtgtgaggaggaggagcaaagccagcagccttttttcccttgacgcctcgcctcgcctcgccttgctgccccctcctcccgttctcgaacaggtcaagccgcgcctcctctcgcctgcctgcgtccttgctcttcctcctcctccctttgcccgtcgtccgctccgcttcgttgtctcatccgctgccgttctagcaagcggggcagcgtcgcgcctcggcctgatgctccaccacgctccagtccacagcctccccggtccttctcgttcccgttgagagcggcggcttgcccggcccccgggtcctcttcacctcacctaaccttgtttctagtttcggtccgtcggttggtgcctcgtcggctgcctctcgctgcttggcccgtttcttcctggggtcgcgggcctggagtacacaagtatataatcttcccggccgtcgtcttctctttctcgacctgcctctcttcgcattggcccgttcccgttcctcgctccctgctgctccttccgagacagactgcctgggatcgaagcacacgataggagagacctcctctgtcgtctgtgcctgggtgagaggtcgggtggtggtggcagtgcttggatgcttcacgcgaggccttggatggtggatgctgcgtgctgctggtctctgcgctgcgcctgaggtactctagagattagtttggccgcatcctccgtatcttctacttcttgaccagggatggagcttgtatacatggaaaggagaaacggatcgtacgacgatggcgcggttccagagttcagtggaaggggggctggaggggatcaggatcaggacccgcccgctgctgcatccgaggtccagtctgactcgcgtcagacaccggacgagaagaagagcaagggctgccaatcatgccgtgacccattctgttcatgcagcggcggcacgccccactcggaactgttccccccacatcccgccaagatgatgatcctggagttcctcatcgcgagcctcaggcacccgacaagaacccacaacgtcagtgatctcgacgacctgatcgccgacggggtcagccaagggagcgtggtaaacctcggcccttctgagaagaaggtgctggaatctctgcacgccatggtaaacgccaagacgaggccgaagagcccgtcgccgttcatggcgggatctaagctgaggaaaatccggtccaagtcccacgtcataacgcagtcggaaatactgaagctcatctctcctgagacgtgggaagcctcctccttccctggggcgtctccgatgatcggcggaggcacggctgaggacggcgtccatgggaacaagccgccgccgccgtgctgctcgtctgtgagctcaaaccagcatgttctgtcacggtgcccgtcgtccctcagcgcatgccttctacagtgcatatggaaggatggcctgcctcattttgagctgtcactggacgatcatcccattgcggtgtacgctgcaagtccagtcagggtgctggagaaggacagggccttcgactacgtctacatgatccattcgggagagcaaggaagaaaagactggatgggccactcgagcaacgtgtccagacttgtgggcaaggtgaaggtgtcaagttctcttgttcttaacccagacaagtcaggtcttttggaaaccgagtttgttctgtatggttctccggacgactatcttaggcagatgcgcagtccctacagcgtgccgaaagggaagggccttgtcaggagggtgacagagatcatgagagcaggcaatgtttccgctagcccgagacatccctggaagctgggcaaatcttcctctcatcagttcgacgacttggctggagtacttgaaggtgaaatgatcagtgctggaggatcagacctggtgagtctcaaggccgacgatctgccgtccaaccaagaattagcagcgattgtggtgagggaacagcggcgcagacgacggaaagagcctgtttcgggtggctggggcctcaagttccttgagaaagcaggactgaatcgcccacaaggcactgaagaaactgatgttcagaacagtgatggtgccacacattgtgtaactgttgttgtccccagaggctaccacggcggcgtggtatcaaagagtagtcgcccgtcaggcctcgtcgagagatggagatctggaggacgctgtgactgcggcggatgggatcttggctgccccatcagagtgctcaacggtgatggatgtggctccttgcctgaaggagagtcacgggacagaaggtcggtagagatatcgatcaagggctggtctgatctttacaccagtactttgcagggtgcaaagaatgagacaatgttgaagctcgtgaatatcacggaggacttgtacatcctctacttcgactcgagtatttcaccattgcagtgcttctcaacagggatagcgattgtgcacagccgagcgccagagctttgccccaaactgtgaattgcgcacagccaggcacgcacccgagctttgccccccaaactgtgaattgcaaagcttggtgtagctgaattacaaagattcgtgaagcactatgtacatgtagatagtagaatgggaataattcttgttatttttaacttatataattttgagagagaaaagcaggcagctgttttcagactgcttttaaatcatcaatctgttggtttggccgattgagcgaaagctaagaaacatgaattacaaatcatgtttcgttaacaattacgattttttgaatcccttgataaat

SEQ ID NO: 6379 - DNA, 3223 bp, Zea Mays
ctttcacatggcctgccgtgccgcgtctctcccacgccactctcgccggtcaccagatcgtcgctcgcttccgttattaacccgttttgtagctgattccggggctcctgctgcccgcggtccacccttcggtcagctaataacgcctccgcctcttcccttccctcccttcccccttgggcttgggccctgcccattaaactcgagcagggcactgtttctacaacgtttgccgttctcgaccgaccattgatggccacgaagagttaagccctgctctgggaagggcactgtttctttagcttccatgcgtagtaggcacgcggcgcacgcaggcaggcaggcgggcatggaaaagggaactgtagcgcccacgcgttaccgaccgagagagagagagtcgagcgagtcctccacgtccgcctccgccccccaaaccaaaggcatacaagccgtcgtgtgttaatggaaacggacaagtgtgaggaggaggagcaaagccagcagccttttttcccttgacgcctcgcctcgcctcgccttgctgccccctcctcccgttctcgaacaggtcaagccgcgcctcctctcgcctgcctgcgtccttgctcttcctcctcctccctttgcccgtcgtccgctccgcttcgttgtctcatccgctgccgttctagcaagcggggcagcgtcgcgcctcggcctgatgctccaccacgctccagtccacagcctccccggtccttctcgttcccgttgagagcggcggcttgcccggcccccgggtcctcttcacctcacctaaccttgtttctagtttcggtccgtcggttggtgcctcgtcggctgcctctcgctgcttggcccgtttcttcctggggtcgcgggcctggagtacacaagtatataatcttcccggccgtcgtcttctctttctcgacctgcctctcttcgcattggcccgttcccgttcctcgctccctgctgctccttccgagacagactgcctgggatcgaagcacacgataggagagacctcctctgtcgtctgtgcctgggtgagaggtcgggtggtggtggcagtgcttggatgcttcacgcgaggccttggatggtggatgctgcgtgctgctggtctctgcgctgcgcctgaggtactctagagattagtttggccgcatcctccgtatcttctacttcttgaccagggatggagcttgtatacatggaaaggagaaacggatcgtacgacgatggcgcggttccagagttcagtggaaggggggctggaggggatcaggatcaggacccgcccgctgctgcatccgaggtccagtctgactcgcgtcagacaccggacgagaagaagagcaagggctgccaatcatgccgtgacccattctgttcatgcagcggcggcacgccccactcggaactgttccccccacatcccgccaagatgatgatcctggagttcctcatcgcgagcctcaggcacccgacaagaacccacaacgtcagtgatctcgacgacctgatcgccgacggggtcagccaagggagcgtggtaaacctcggcccttctgagaagaaggtgctggaatctctgcacgccatggtaaacgccaagacgaggccgaagagcccgtcgccgttcatggcgggatctaagctgaggaaaatccggtccaagtcccacgtcataacgcagtcggaaatactgaagctcatctctcctgagacgtgggaagcctcctccttccctggggcgtctccgatgatcggcggaggcacggctgaggacggcgtccatgggaacaagccgccgccgccgtgctgctcgtctgtgagctcaaaccagcatgttctgtcacggtgcccgtcgtccctcagcgcatgccttctacagtgcatatggaaggatggcctgcctcattttgagctgtcactggacgatcatcccattgcggtgtacgctgcaagtccagtcagggtgctggagaaggacagggccttcgactacgtctacatgatccattcgggagagcaaggaagaaaagactggatgggccactcgagcaacgtgtccagacttgtgggcaaggtgaaggtgtcaagttctcttgttcttaacccagacaagtcaggtcttttggaaaccgagtttgttctgtatggttctccggacgactatcttaggcagatgcgcagtccctacagcgtgccgaaagggaagggccttgtcaggagggtgacagagatcatgagagcaggcaatgtttccgctagcccgagacatccctggaagctgggcaaatcttcctctcatcagttcgacgacttggctggagtacttgaaggtgaaatgatcagtgctggaggatcagacctggtgagtctcaaggccgacgatctgccgtccaaccaagaattagcagcgattgtggtgagggaacagcggcgcagacgacggaaagagcctgtttcgggtggctggggcctcaagttccttgagaaagcaggactgaatcgcccacaaggcactgaagaaactgatgttcagaacagtgatggtgccacacattgtgtaactgttgttgtccccagaggctaccacggcggcgtggtatcaaagagtagtcgcccgtcaggcctcgtcgagagatggagatctggaggacgctgtgactgcggcggatgggatcttggctgccccatcagagtgctcaacggtgatggatgtggctccttgcctgaaggagagtcacgggacagaagggtgcaaagaatgagacaatgttgaagctcgtgaatatcacggaggacttgtacatcctctacttcgactcgagtatttcaccattgcagtgcttctcaacagggatagcgattgtgcacagccgagcgccagagctttgccccaaactgtgaattgcgcacagccaggcacgcacccgagctttgccccccaaactgtgaattgcaaagcttggtgtagctgaattacaaagattcgtgaagcactatgtacatgtagatagtagaatgggaataattcttgttatttttaacttatataattttgagagagaaaagcaggcagctgttttcagactgcttttaaatcatcaatctgttggtttggccgattgagcgaaagctaagaaacatgaattacaaatcatgtttcgttaacaattacgattttttgaatcccttgataaat

SEQ ID NO: 6380 - DNA, 2124 bp, Zea Mays
atgccgccccctcccttctcccattacacccgcaagtggatcgagagccatttctctcttctcaaggaggaaatttcaagccccatagctgctcatattctcaacttctacgatggcggccttggtgacgacctcttcgaagcggcgactaccgcctccggtccatttcatgccaccgatgacgatgtttcttcgtctaccactaccacccctcctatctgcggctacagcgacgacgctccggctgctgctggtgccacggcctactccccattgccatccttggacgccactctcacggccctccttgagcaagagcaacaccacggccttgacaccggggaccttccgcagatcaatggcctttcagaagtagcatactacccaaccgccaccgatgaggccagcatagggcaattcaaccagatggggcttccggataccttagctgaacagatgcttccgatgcagatgaacagcagtgcatccgccttgatgccactcacttcggactacgatgagtgcttcacagcggcgttagctgaagggttcatgggtctggatggagccatgtatcatccgcaaactggagcaattcttccaggctgcgatgcagaagcatcacagcaggggttcttcaacagtgccagcagcaatggtctggtgatgattggcgagtaccagaagatgatggagggtgaaggactgacaacaacatatgacgacacagattccatgaaaggggcatttaatactaatgcagagatgcaggtaggaggaaatgatcagcacctggtaaacggatgcaatgggaacccagaactatcaggattggaagactccacattcaaggttgtccgcttgtcacccgaagagaagaaggaaaagatccataggtatagaaagaaacggaacgagagaaatttcaacaaaaaaataaagtacgcatgcagaaaaaccttggcagatagcaggccccgtgtccggggaaggttcgcgaagaatgatgagctctgtgaagcagcagcgcaatcaggctccctgaattatggacattatgaacaaactgaccatatgaaagaagaagccatgctggacacatctgacattcttgcgcatctaagtgaattaaattcctacaactacaagtataaatgcaccatcgaatcatggatgtgattctcaagtctcaaccacacaaactaagacccagtgtcttaattcaagttgtgcaacattgagcacagttttttttcatttcctttaaaataaacttacagcattagaagctcaatttcaggtcgagaacttagttcagctaatgtagatttaatgtatgtgtgaatctgctcacttgtttaccattgtcacaagtgaatgtggtagttagtctccagaagagtggtttgtgtatataactatgccatttatagaaataaaagttctgaggatctcttcaatatttctttgtcacagagtctagatttggcctgctcagcaaattccaaggatagcaacgatacatcaacataatcataataacatggttacagagcacagtaataagtaaagttaatatattggaatgtcacctaggtgccttgtagcctgtgcccctatgtgcagaaagatcaagagtcagaaccaacaatgaacaatgaataaccgtagcaaaaatgtttaaaactatactcaagagctcagtaaggttcatggtcttgctgataattcataggcccatgcaattgtagaaatccaattatgttcattttctgttttagtggagttgtccaagaacaagctacaggctcatagagtagtgtatccacagttgagctagggcaaagattaaaatattaatcaactaaaatgttttcctcaagtataagcactgcctgtgccatttaataagtagccaaggtgaaagacacactactgtcttaggcaatgtaaagctctagcagtactaccacattacaaatctccattacggctaagctgcaatcagtggtcaaacttacaaacagcggttactcaaaccaacattgtagggaagtggaaattccatgccagaatttgctctgccagacaagattttatcgtttaagtcaatgcatttggatc

SEQ ID NO: 6381 - DNA, 1795 bp, Zea Mays
cattaacgtcgtcagccgtaacaaacacagcggggggaacgggcaaggcacctggcggtggtggcctcttgctgtggtgggcgagacgagcgcggcgcggggcggagcggaggcaaggcaagaggggaaggaaaccccaccaaggaccaagcagaagcaggcgagcgtggcagttcaggtccagtctccactctccactccagtacactccacaccatcaccgccgccgccgccgccgtgacgagggggcagagggcagtgatagagcagagcagagagggctagggcggggagacgaggccgagagatccccaggaccccggtggcgagatgggcattcgcagagctcgccggttcctcttcctggccacctccgtcttcggcctcttccagtgccgcggggacctctcggcctccgactgcgccgcctgcgtctcccgcgccatgtcctcctggcccggcgtctgcggcgcctccgtcgccgcgcgggtccagctcgccggctgcctcgcgctctacgaggtgtccggcttcccccaggtctccggcgtccagatgctcttcaagacctgcggcaccggcagcggcggcggcggcggcgacttcgagatgcgcagggacaccgccttctccgcgctcgagggcggcgtcgccaccagctccggcggcttcgtcgccaccagctaccaggccgtctacgccatggcgcagtgcgagggcgacctctccacgggggactgcagccagtgcgtcacccaggccgtgcagcacgtcgaggtcgagtgcggcggcgcgccctccggccaggtctacctcgacaagtgctacatcagctacagctactacccccacggcgtgccccacggcggcggcaccggagcagacagcaaagactgtagccattgtgctcgggggagccgtaggcctgggtttcgtggtcatctgcttgcttttcgccaggagcctggtcaagaagaaggatggtgattactgatgggagggagagcacggaaggagaatgtggacaaagacattgtgggggcatggtatggcattttgatggtagggttgtgtattttgtttcttcaaggtggtgagtggaatacagagggggtgttttttggctcttcttcctctggattggtctaaacgaacaagccctgagggtgccatcccccccatgatggcagagagaggaaaagaggtggcaagctgctgttcaggaaagaagctgtccacttctggggctattttgattctcagctgaaattggtagacgagctcggggctgtcgtcttagcctctcctgcttagggttctaggagtacattgattctcttgtatttttttgacccccgccaaatgaaaaatacctgttaggtctaggctaaacgtacttagtctcctgtttaaggttgcaggagcgggttgggtgtctatttggttggtctgttatggaagacgaacttccagatgctctgggaccagattttaactctagggtttggaagtagtcggtgctaccgccattggttaactggtcgctagcctttctgtatggacattgctgacctggtaaccacacagctgtgctgtgcagctgttctcttcgtttgacctgttgcggctgttcgtcgtacgtttctgaatgcttgcctgaatgtctgctctagcgaccagcaggaacgtgtcaaacttttgtgatggctacggcatgctgcattgttgtcgctagaaaaagttgtcatgacgtcagatgagaattgggtatacctgttgacatatagcatagaag

SEQ ID NO: 6382 - DNA, 1743 bp, Zea Mays
cctcattaaccgcggcattaacgtcgtcagccgtaacaaacacagcggggggaacgggcaaggcacctggcggtggtggcctcttgctgtggtgggcgagacgagcgcggcgcggggcggagcggaggcaaggcaagaggggaaggaaaccccaccaaggaccaagcagaagcaggcgagcgtggcagttcaggtccagtctccactctccactccagtacactccacaccatcaccgccgccgccgccgccgtgacgagggggcagagggcagtgatagagcagagcagagagggctagggcggggagacgaggccgagagatccccaggaccccggtggcgagatgggcattcgcagagctcgccggttcctcttcctggccacctccgtcttcggcctcttccagtgccgcggggacctctcggcctccgactgcgccgcctgcgtctcccgcgccatgtcctcctggcccggcgtctgcggcgcctccgtcgccgcgcgggtccagctcgccggctgcctcgcgctctacgaggtgtccggcttcccccaggtctccggcgtccagatgctcttcaagacctgcggcaccggcagcggcggcggcggcggcgacttcgagatgcgcagggacaccgccttctccgcgctcgagggcggcgtcgccaccagctccggcggcttcgtcgccaccagctaccaggccgtctacgccatggcgcagtgcgagggcgacctctccacgggggactgcagccagtgcgtcacccaggccgtgcagcacgtcgaggtcgagtgcggcggcgcgccctccggccaggtctacctcgacaagtgctacatcagctacagctactacccccacggcgtgccccacggcggcggcaccggagggcagcagacagcaaagactgtagccattgtgctcgggggagccgtaggcctgggtttcgtggtcatctgcttgcttttcgccaggagcctggtcaagaagaaggatggtgattactgatgggagggagagcacggaaggagaatgtggacaaagacattgtgggggcatggtatggcattttgatggtaggattggtctaaacgaacaagccctgagggtgccatcccccccatgatggcagagagaggaaaagaggtggcaagctgctgttcaggaaagaagctgtccacttctggggctattttgattctcagctgaaattggtagacgagctcggggctgtcgtcttagcctctcctgcttagggttctaggagtacattgattctcttgtatttttttgacccccgccaaatgaaaaatacctgttaggtctaggctaaacgtacttagtctcctgtttaaggttgcaggagcgggttgggtgtctatttggttggtctgttatggaagacgaacttccagatgctctgggaccagattttaactctagggtttggaagtagtcggtgctaccgccattggttaactggtcgctagcctttctgtatggacattgctgacctggtaaccacacagctgtgctgtgcagctgttctcttcgtttgacctgttgcggctgttcgtcgtacgtttctgaatgcttgcctgaatgtctgctctagcgaccagcaggaacgtgtcaaacttttgtgatggctacggcatgctgcattgttgtcgctagaaaaagttgtcatgacgtcagatgagaattgggtatacctgttgacatatagcatagaag

SEQ ID NO: 6383 - DNA, 2776 bp, Zea Mays
cggaggtggcggagaaggtgcggcagcgtcggcgggcagggaggcggaggcatgagcatcagtgagaccgtcagctagtagataaccaacgaatacgccttcaaatccagccttcccgggttgccgctgctctaaaacaggtcatgctcataccccgaagggccaattcgctgtatgccattggaaaatatacttgttccttgtgtgccactggcctcacatatcataaacaccaaaacatatacctatatgccactcagtggcacacaaggaatgaatataaaatctgcataccaggaatttttcctaccccgaaaccgccgccacgccgtcgctgatcaccagcgcccatcacacaccgccttagacgcccatgctcgccgtggccgcgtccctcagggcctcggcctccgcggtggccgaagctggcggcgacccggccgttcttcacgcggtcctcatcaagaccgcctcgtcctctcgcgccgcctacaacctcctcttctcccgctaccatccgtcgctctcgctgcacctcctctcccacctcccgttctgcttccgccccaccgccggctcgctcacctcctcgctctcctccctctccgcttcctccccggcctccgcgctcccgctcctccgccgcgtcctcggcatgtcccctgctctcctctgcgacggcccgctatcctcactcctccgctccatgccgccgtccatcgcaccgcacgtgcacgccctcgccttcaagctcgccctctcgtcgtccccctactccgcctcttgccttattactctctactccagagcccgctccccggcatgcgcccgccacctgttcgatgaaatccccgttgcaaatcgggactccgtttgctactcctccacgattgttgggctcgcacagaatgggtggtacgaagaatccctctctgtgttcgctggcatgcgcgcaaacggtgttgattctaccatgcatgcgctctccggttctctccgggcagctgcagggcttgctgtgctggagcagacttgtgggattcacgcccatgcggtggtagttgggcttgatggaaatgtggctgttgggaccgccctggtggatgcttatggtaaggctggagatgtggatgatgcagccaaggtttttgaggggttgggtggtgaccgaaacctgattacatggaacgcggtgctttctgctcatgctcagcagggagatgtgcaggaggtcactggactgtttaaccagatgatgaagctgggttttgcccctgatgggctaacattccttgctgttctcacgtcatgtagtaatgccggagcagccactgaagccaagttttggttggaagcaatgcagtcgaagtacggcgtgaagcctgaccttgagcattatacttgcgtggtgggtgcaatggcacgggtggggcatctagaggatgcagagagttttgcttgtacaatgccatgcaaaccagatgcagcagtgtggcggacacttctaatgggctgtgtggttcaccgcagggttgacatggcagaatccatgggacagaggcttctggagattaatcccaaggatgactcagcttatgtcatgcttgccaacgtctactcaacagctgggaaaacaaatgaggaggctgaggcatggactgcaatgagggaccatggggtcaggaaggaaggtgggcgaagttggattgaggtcagagggctggtacatgtttttgttgcaaacgaaagaaggcatgaacagctgctagaaatatatgacaaactgcatgaattgattcaagaggtagagaagttagggtacaaggaggcagatgagagactttggcatcatagtgaaagattggctcttgcatatgggttgatcagtggtgctgcaccatcaggaaaggtgttgagaatagttaagaacttgagaatatgtgctcattgtcatgaattcttcaagtatgctagcatggtgatcgacagagtaattgtagtacgggatgtcaataggtaccacacaattaagaaaggtgattgcagttgcagaggctgctggtgaaacacatatatcttgaggataaactatgaggcaagaagcatctgtatgatttgccgataatccacgagataattgactccaggaaaaaaactcactgcaggattgattggaatttgggaacttgcttggagttgttgccatagggccaacttccctacatgtttgaaatcttgaagagaactgtggtcttatggtgttgcagacaccataatatcttgtttggatagacaccgaagcatcttgttactcgtggagcataaattaacatggcaagtgatgctctttaagtgtcaattattctggggaacatttcgtgcctgctgattaacagtttgagttctcagagatgccccagctcaatagttgcttcttggtcttgtcttagggccgttatgctcatcttgttcggtgacataaactgctgagaggaaagtaccattcctcagttgatccatagtcggtagcatccgattgattcttctctccctttgtttatgattgtttgggttttcatagttttttcctttttattatgacttagttatttttttcctttctattatgacttaattgaaattaagtggatacagtgaaaaaagttcagctggactagtacttcaatctgctaatttactatatatagattcaagataatataacagaaagaatctaaagtatgttagaataaactataggcagttttttctacca

SEQ ID NO: 6384 - DNA, 2412 bp, Zea Mays
atgtgcatccacaaggtaacatgtagctttgcccctgctcagagaatcactccatggtgtcaacccaatcatcctctacattgctagaggtgcatcaattgcctccttatctggaaagaatgatattgagtttgggcatgttgttgaatggcttgaatatgcccccaccttcctttcaggctctgaatttgaaaatgcatgcttatttgttgatggattcttggcctcccggacctttctggttggtcatggcctgacaattgctgacattgcagtttggtcaaatcttgctggaattggtcagcggtgggagagtctaaggaaatcaaagaaataccaaaatcttgttcgctggttcaacagcatagattcagaatacaaagaggcactgaacgaagttgtggctgcatttgttgggaaacgaggtattggaaaatctcctgcacctagccttaaggagaaggtacatgactcaaaggacccatcagctccagaagttgatctccctggtgcaaaagttgggaaagtctgcgttcgttttgccccagagcctagtggttacctccatattgggcatgcaaaggctgcactattgaacaaatactttgctgaaagatatcaagggcgcttaatagttcgatttgatgacacaaacccttcaaaagaaagcaatgagtttgttgagaatcttttgaaagatattgagacgttggggatcaaatatgatgctgtcacatacacatctgattatttcccaaagctaatggaaatggctgagagtttgataaagcagggtaaagcatatattgatgacacaccaaaggagcaaatgaggaaagagaggatggacggtattgagtcaaggtgcagaaataataccgtggaggaaaatctctcattatggaaagagatggttaatggaactgaaaggggcatgcagtgctgtgtacggggtaaacttgacatgcaggatcctaacaagtcactcagggatcctgtttactaccgctgtaatactgatccacaccatcgtgttggttcgaagtacaaggtctatccaacatatgactttgcgtgcccatttgtcgatgcattggagggggtaacccatgctcttcgttccagtgaatatcatgacagaaatgcacaatattatcgaattcttcaagacatggggttgaggagagtggaaatttatgaattcagccgattgaatatggtttacactcttctaagcaagcgaaagcttctttggtttgtacaaaacaagaaggtcgaagattggacagacccacgttttcccactgtccaaggcatagtacgtcggggcttgaaggttgatgcattgatacagtttatactccaacagggtgcttcaaaaaatctgaatctcatggaatgggataaactctggacaatcaacaagaagataattgatccagtgtgcgcaaggcatactgctgtgctaaaagaccagcgtgtcatctttactcttacaaatggtccagaggagccatttgttcgaattttaccaagacataagaaatttgagggtgctggaaagaaggctacaacctttgccaacagaatttggctcgattatgctgatgcggcagctattagcaagggtgaggaagtaacccttatggattgggggaatgctattgttaaagagatcaaggtggagagtggagtaattactgaactagttggagaactgcatcttgaggggtctgtgaaaacaacaaaattgaagatcacatggctagcagatatagaggagctagttcccctttcattggttgaatttgattacctcatcagcaagaaaaagctagaggaagacgaggacttcctcgacaatctcaacccttgcactcgacgggaaatcccagcccttggagatgcgaacatgaggaacatcaagcgtggagaggtcatacagctcgagaggaaaggctactataggtgtgatgccccttttatcagatcgtccaaaccggtggtcctgtttgcgatcccagatggcaggcagcaggcctcgcttagctaggcatggtgaccaccttttgggcacatggaattcctgagttggcgatgagtattgttgcattgtacactttaatattgtactgtgattaggctttactcgcggtggatgtctttcaccgctagatggccagaggcatatcctgccaaccaagcagagcagccattttgattttggtctatgatacttttacctgcgcttgaatattcctatacttctctagcagggccttcgttattttgccgttagattatttttactgcgtcggctgctattttcttttgcccaggtattaatcaatcatggacgggcatggtatgtagctgtgatgagtaaatgcatgtggggaccctaaggttggg

SEQ ID NO: 6385 - DNA, 2782 bp, Zea Mays
acaactcactagtcaccagtaactttaccaatccgcgccggtggtaaccctgccttcggcggcggctagccggtatccagtgtgcgcactccctctatctccctcttggcgacgactgggcggccgtcgctgctgccctacgccgtcttcgggctcttcgttgtcgacgagcgccacaagccatgaaaggccgctttgtcaaattgtgaagataattttgtgaaacacttgaagtttctactgcttgttcctaccatttttaagaaaaaagatcaatggaggcagctttgtcattctccaaggacagcccaccaatttcgataatttgtgctgcaaagattgtgggtctacccctaaccatcaatcatagcctcgctgctggctcggcacccaccctacagtttgcttctggagaatcactccatggtgtcaacccaatcatcctctacattgctagaggtgcatcaattgcctccttatctggaaagaatgatattgagtttgggcatgttgttgaatggcttgaatatgcccccaccttcctttcaggctctgaatttgaaaatgcatgcttatttgttgatggattcttggcctcccggacctttctggttggtcatggcctgacaattgctgacattgcagtttggtcaaatcttgctggaattggtcagcggtgggagagtctaaggaaatcaaagaaataccaaaatcttgttcgctggttcaacagcatagattcagaatacaaagaggcactgaacgaagttgtggctgcatttgttgggaaacgaggtattggaaaatctcctgcacctagccttaaggagaaggtacatgactcaaaggacccatcagctccagaagttgatctccctggtgcaaaagttgggaaagtctgcgttcgttttgccccagagcctagtggttacctccatattgggcatgcaaaggctgcactattgaacaaatactttgctgaaagatatcaagggcgcttaatagttcgatttgatgacacaaacccttcaaaagaaagcaatgagtttgttgagaatcttttgaaagatattgagacgttggggatcaaatatgatgctgtcacatacacatctgattatttcccaaagctaatggaaatggctgagagtttgataaagcagggtaaagcatatattgatgacacaccaaaggagcaaatgaggaaagagaggatggacggtattgagtcaaggtgcagaaataataccgtggaggaaaatctctcattatggaaagagatggttaatggaactgaaaggggcatgcagtgctgtgtacggggtaaacttgacatgcaggatcctaacaagtcactcagggatcctgtttactaccgctgtaatactgatccacaccatcgtgttggttcgaagtacaaggtctatccaacatatgactttgcgtgcccatttgtcgatgcattggagggggtaacccatgctcttcgttccagtgaatatcatgacagaaatgcacaatattatcgaattcttcaagacatggggttgaggagagtggaaatttatgaattcagccgattgaatatggtttacactcttctaagcaagcgaaagcttctttggtttgtacaaaacaagaaggtcgaagattggacagacccacgttttcccactgtccaaggcatagtacgtcggggcttgaaggttgatgcattgatacagtttatactccaacagggtgcttcaaaaaatctgaatctcatggaatgggataaactctggacaatcaacaagaagataattgatccagtgtgcgcaaggcatactgctgtgctaaaagaccagcgtgtcatctttactcttacaaatggtccagaggagccatttgttcgaattttaccaagacataagaaatttgagggtgctggaaagaaggctacaacctttgccaacagaatttggctcgattatgctgatgcggcagctattagcaagggtgaggaagtaacccttatggattgggggaatgctattgttaaagagatcaaggtggagagtggagtaattactgaactagttggagaactgcatcttgaggggtctgtgaaaacaacaaaattgaagatcacatggctagcagatatagaggagctagttcccctttcattggttgaatttgattacctcatcagcaagaaaaagctagaggaagacgaggacttcctcgacaatctcaacccttgcactcgacgggaaatcccagcccttggagatgcgaacatgaggaacatcaagcgtggagaggtcatacagctcgagaggaaaggctactataggtgtgatgccccttttatcagatcgtccaaaccggtggtcctgtttgcgatcccagatggcaggcagcaggcctcgcttagctaggcatggtgaccaccttttgggcacatggaattcctgagttggcgatgagtattgttgcattgtacactttaatattgtactgtgattaggctttactcgcggtggatgtctttcaccgctagatggccagaggcatatcctgccaaccaagcagagcagccattttgattttggtctatgatacttttacctgcgcttgaatattcctatacttctctagcagggccttcgttattttgccgttagattatttttactgcgtcggctgctattttcttttgcccaggtattaatcaatcatggacgggcatggtatgtagctgtgatgagtaaatgcatgtggggaccctaaggttggg

SEQ ID NO: 6386 - DNA, 2718 bp, Zea Mays
gtcacaactcactagtcaccagtaactttaccaatccgcgccggtggtaaccctgccttcggcggcggctagccggtatccagtgtgcgcactccctctatctccctcttggcgacgactgggcggccgtcgctgctgccctacgccgtcttcgggctcttcgttgtcgacgagcgccacaaggttcctaccatttttaagaaaaaagatcaatggaggcagctttgtcattctccaaggacagcccaccaatttcgataatttgtgctgcaaagattgtgggtctacccctaaccatcaatcatagcctcgctgctggctcggcacccaccctacagtttgcttctgagaatcactccatggtgtcaacccaatcatcctctacattgctagaggtgcatcaattgcctccttatctggaaagaatgatattgagtttgggcatgttgttgaatggcttgaatatgcccccaccttcctttcaggctctgaatttgaaaatgcatgcttatttgttgatggattcttggcctcccggacctttctggttggtcatggcctgacaattgctgacattgcagtttggtcaaatcttgctggaattggtcagcggtgggagagtctaaggaaatcaaagaaataccaaaatcttgttcgctggttcaacagcatagattcagaatacaaagaggcactgaacgaagttgtggctgcatttgttgggaaacgaggtattggaaaatctcctgcacctagccttaaggagaaggtacatgactcaaaggacccatcagctccagaagttgatctccctggtgcaaaagttgggaaagtctgcgttcgttttgccccagagcctagtggttacctccatattgggcatgcaaaggctgcactattgaacaaatactttgctgaaagatatcaagggcgcttaatagttcgatttgatgacacaaacccttcaaaagaaagcaatgagtttgttgagaatcttttgaaagatattgagacgttggggatcaaatatgatgctgtcacatacacatctgattatttcccaaagctaatggaaatggctgagagtttgataaagcagggtaaagcatatattgatgacacaccaaaggagcaaatgaggaaagagaggatggacggtattgagtcaaggtgcagaaataataccgtggaggaaaatctctcattatggaaagagatggttaatggaactgaaaggggcatgcagtgctgtgtacggggtaaacttgacatgcaggatcctaacaagtcactcagggatcctgtttactaccgctgtaatactgatccacaccatcgtgttggttcgaagtacaaggtctatccaacatatgactttgcgtgcccatttgtcgatgcattggagggggtaacccatgctcttcgttccagtgaatatcatgacagaaatgcacaatattatcgaattcttcaagacatggggttgaggagagtggaaatttatgaattcagccgattgaatatggtttacactcttctaagcaagcgaaagcttctttggtttgtacaaaacaagaaggtcgaagattggacagacccacgttttcccactgtccaaggcatagtacgtcggggcttgaaggttgatgcattgatacagtttatactccaacagggtgcttcaaaaaatctgaatctcatggaatgggataaactctggacaatcaacaagaagataattgatccagtgtgcgcaaggcatactgctgtgctaaaagaccagcgtgtcatctttactcttacaaatggtccagaggagccatttgttcgaattttaccaagacataagaaatttgagggtgctggaaagaaggctacaacctttgccaacagaatttggctcgattatgctgatgcggcagctattagcaagggtgaggaagtaacccttatggattgggggaatgctattgttaaagagatcaaggtggagagtggagtaattactgaactagttggagaactgcatcttgaggggtctgtgaaaacaacaaaattgaagatcacatggctagcagatatagaggagctagttcccctttcattggttgaatttgattacctcatcagcaagaaaaagctagaggaagacgaggacttcctcgacaatctcaacccttgcactcgacgggaaatcccagcccttggagatgcgaacatgaggaacatcaagcgtggagaggtcatacagctcgagaggaaaggctactataggtgtgatgccccttttatcagatcgtccaaaccggtggtcctgtttgcgatcccagatggcaggcagcaggcctcgcttagctaggcatggtgaccaccttttgggcacatggaattcctgagttggcgatgagtattgttgcattgtacactttaatattgtactgtgattaggctttactcgcggtggatgtctttcaccgctagatggccagaggcatatcctgccaaccaagcagagcagccattttgattttggtctatgatacttttacctgcgcttgaatattcctatacttctctagcagggccttcgttattttgccgttagattatttttactgcgtcggctgctattttcttttgcccaggtattaatcaatcatggacgggcatggtatgtagctgtgatgagtaaatgcatgtggggaccctaaggttggg

SEQ ID NO: 6387 - DNA, 2903 bp, Zea Mays
cggccatccgggcaagtcacaactcactagtcaccagtaactttaccaatccgcgccggtggtaaccctgccttcggcggcggctagccggtatccagtgtgcgcactccctctatctccctcttggcgacgactgggcggccgtcgctgctgccctacgccgtcttcgggctcttcgttgtcgacgagcgccacaaggtaaaggtgtatgggcatgtattaagcctacaaaattcggttgtttcaatctgggtagatgtgtacacccatgtcatttactgggtcgcccttggttccacagccatgaaaggccgctttgtcaaattgtgaagataattttgtgaaacacttgaagtttctactgcttgttcctaccatttttaagaaaaaagatcaatggaggcagctttgtcattctccaaggacagcccaccaatttcgataatttgtgctgcaaagattgtgggtctacccctaaccatcaatcatagcctcgctgctggctcggcacccaccctacagtttgcttctggagaatcactccatggtgtcaacccaatcatcctctacattgctagaggtgcatcaattgcctccttatctggaaagaatgatattgagtttgggcatgttgttgaatggcttgaatatgcccccaccttcctttcaggctctgaatttgaaaatgcatgcttatttgttgatggattcttggcctcccggacctttctggttggtcatggcctgacaattgctgacattgcagtttggtcaaatcttgctggaattggtcagcggtgggagagtctaaggaaatcaaagaaataccaaaatcttgttcgctggttcaacagcatagattcagaatacaaagaggcactgaacgaagttgtggctgcatttgttgggaaacgaggtattggaaaatctcctgcacctagccttaaggagaaggtacatgactcaaaggacccatcagctccagaagttgatctccctggtgcaaaagttgggaaagtctgcgttcgttttgccccagagcctagtggttacctccatattgggcatgcaaaggctgcactattgaacaaatactttgctgaaagatatcaagggcgcttaatagttcgatttgatgacacaaacccttcaaaagaaagcaatgagtttgttgagaatcttttgaaagatattgagacgttggggatcaaatatgatgctgtcacatacacatctgattatttcccaaagctaatggaaatggctgagagtttgataaagcagggtaaagcatatattgatgacacaccaaaggagcaaatgaggaaagagaggatggacggtattgagtcaaggtgcagaaataataccgtggaggaaaatctctcattatggaaagagatggttaatggaactgaaaggggcatgcagtgctgtgtacggggtaaacttgacatgcaggatcctaacaagtcactcagggatcctgtttactaccgctgtaatactgatccacaccatcgtgttggttcgaagtacaaggtctatccaacatatgactttgcgtgcccatttgtcgatgcattggagggggtaacccatgctcttcgttccagtgaatatcatgacagaaatgcacaatattatcgaattcttcaagacatggggttgaggagagtggaaatttatgaattcagccgattgaatatggtttacactcttctaagcaagcgaaagcttctttggtttgtacaaaacaagaaggtcgaagattggacagacccacgttttcccactgtccaaggcatagtacgtcggggcttgaaggttgatgcattgatacagtttatactccaacagggtgcttcaaaaaatctgaatctcatggaatgggataaactctggacaatcaacaagaagataattgatccagtgtgcgcaaggcatactgctgtgctaaaagaccagcgtgtcatctttactcttacaaatggtccagaggagccatttgttcgaattttaccaagacataagaaatttgagggtgctggaaagaaggctacaacctttgccaacagaatttggctcgattatgctgatgcggcagctattagcaagggtgaggaagtaacccttatggattgggggaatgctattgttaaagagatcaaggtggagagtggagtaattactgaactagttggagaactgcatcttgaggggtctgtgaaaacaacaaaattgaagatcacatggctagcagatatagaggagctagttcccctttcattggttgaatttgattacctcatcagcaagaaaaagctagaggaagacgaggacttcctcgacaatctcaacccttgcactcgacgggaaatcccagcccttggagatgcgaacatgaggaacatcaagcgtggagaggtcatacagctcgagaggaaaggctactataggtgtgatgccccttttatcagatcgtccaaaccggtggtcctgtttgcgatcccagatggcaggcagcaggcctcgcttagctaggcatggtgaccaccttttgggcacatggaattcctgagttggcgatgagtattgttgcattgtacactttaatattgtactgtgattaggctttactcgcggtggatgtctttcaccgctagatggccagaggcatatcctgccaaccaagcagagcagccattttgattttggtctatgatacttttacctgcgcttgaatattcctatacttctctagcagggccttcgttattttgccgttagattatttttactgcgtcggctgctattttcttttgcccaggtattaatcaatcatggacgggcatggtatgtagctgtgatgagtaaatgcatgtggggaccctaaggttggg

SEQ ID NO: 6388 - DNA, 2691 bp, Zea Mays
gttcgtccggccatccgggcaagtcacaactcactagtcaccagtaactttaccaatccgcgccggtggtaaccctgccttcggcggcggctagccggtatccagtgtgcgcactccctctatctccctcttggcgacgactgggcggccgtcgctgctgccctacgccgtcttcgggctcttcgttgtcgacgagcgccacaaggttcctaccatttttaagaaaaaagatcaatggaggcagctttgtcattctccaaggacagcccaccaatttcgataatttgtgctgcaaagattgtgggtctacccctaaccatcaatcatagcctcgctgctggctcggcacccaccctacagtttgcttctggagaatcactccatggtgtcaacccaatcatcctctacattgctagaggttgttgaatggcttgaatatgcccccaccttcctttcaggctctgaatttgaaaatgcatgcttatttgttgatggattcttggcctcccggacctttctggttggtcatggcctgacaattgctgacattgcagtttggtcaaatcttgctggaattggtcagcggtgggagagtctaaggaaatcaaagaaataccaaaatcttgttcgctggttcaacagcatagattcagaatacaaagaggcactgaacgaagttgtggctgcatttgttgggaaacgaggtattggaaaatctcctgcacctagccttaaggagaaggtacatgactcaaaggacccatcagctccagaagttgatctccctggtgcaaaagttgggaaagtctgcgttcgttttgccccagagcctagtggttacctccatattgggcatgcaaaggctgcactattgaacaaatactttgctgaaagatatcaagggcgcttaatagttcgatttgatgacacaaacccttcaaaagaaagcaatgagtttgttgagaatcttttgaaagatattgagacgttggggatcaaatatgatgctgtcacatacacatctgattatttcccaaagctaatggaaatggctgagagtttgataaagcagggtaaagcatatattgatgacacaccaaaggagcaaatgaggaaagagaggatggacggtattgagtcaaggtgcagaaataataccgtggaggaaaatctctcattatggaaagagatggttaatggaactgaaaggggcatgcagtgctgtgtacggggtaaacttgacatgcaggatcctaacaagtcactcagggatcctgtttactaccgctgtaatactgatccacaccatcgtgttggttcgaagtacaaggtctatccaacatatgactttgcgtgcccatttgtcgatgcattggagggggtaacccatgctcttcgttccagtgaatatcatgacagaaatgcacaatattatcgaattcttcaagacatggggttgaggagagtggaaatttatgaattcagccgattgaatatggtttacactcttctaagcaagcgaaagcttctttggtttgtacaaaacaagaaggtcgaagattggacagacccacgttttcccactgtccaaggcatagtacgtcggggcttgaaggttgatgcattgatacagtttatactccaacagggtgcttcaaaaaatctgaatctcatggaatgggataaactctggacaatcaacaagaagataattgatccagtgtgcgcaaggcatactgctgtgctaaaagaccagcgtgtcatctttactcttacaaatggtccagaggagccatttgttcgaattttaccaagacataagaaatttgagggtgctggaaagaaggctacaacctttgccaacagaatttggctcgattatgctgatgcggcagctattagcaagggtgaggaagtaacccttatggattgggggaatgctattgttaaagagatcaaggtggagagtggagtaattactgaactagttggagaactgcatcttgaggggtctgtgaaaacaacaaaattgaagatcacatggctagcagatatagaggagctagttcccctttcattggttgaatttgattacctcatcagcaagaaaaagctagaggaagacgaggacttcctcgacaatctcaacccttgcactcgacgggaaatcccagcccttggagatgcgaacatgaggaacatcaagcgtggagaggtcatacagctcgagaggaaaggctactataggtgtgatgccccttttatcagatcgtccaaaccggtggtcctgtttgcgatcccagatggcaggcagcaggcctcgcttagctaggcatggtgaccaccttttgggcacatggaattcctgagttggcgatgagtattgttgcattgtacactttaatattgtactgtgattaggctttactcgcggtggatgtctttcaccgctagatggccagaggcatatcctgccaaccaagcagagcagccattttgattttggtctatgatacttttacctgcgcttgaatattcctatacttctctagcagggccttcgttattttgccgttagattatttttactgcgtcggctgctattttcttttgcccaggtattaatcaatcatggacgggcatggtatgtagctgtgatgagtaaatgcatgtggggaccctaaggttggg

SEQ ID NO: 6389 - DNA, 2178 bp, Zea Mays
acaactcactagtcaccagtaactttaccaatccgcgccggtggtaaccctgccttcggcggcggctagccggtatccagtgtgcgcactccctctatctccctcttggcgacgactgggcggccgtcgctgctgccctacgccgtcttcgggctcttcgttgtcgacgagcgccacaaggttcctaccatttttaagaaaaaagatcaatggaggcagctttgtcattctccaaggacagcccaccaatttcgataatttgtgctgcaaagattgtgggtctacccctaaccatcaatcatagcctcgctgctggctcggcacccaccctacagtttgcttctggagaatcactccatggtgtcaacccaatcatcctctacattgctagaggtgcatcaattgcctccttatctggaaagaatgatattgagtttgggcatgttgttgaatggcttgaatatgcccccaccttcctttcaggctctgaatttgaaaatgcatgcttatttgttgatggattcttggcctcccggacctttctggttggtcatggcctgacaattgctgacattgcagtttggtcaaatcttgctggaattggtcagcggtgggagagtctaaggaaatcaaagaaataccaaaatcttgttcgctggttcaacagcatagattcagaatacaaagaggcactgaacgaagttgtggctgcatttgttgggaaacgaggtattggaaaatctcctgcacctagccttaaggagaaggtacatgactcaaaggacccatcagctccagaagttgatctccctggtgcaaaagttgggaaagtctgcgttcgttttgccccagagcctagtggttacctccatattgggcatgcaaaggctgcactattgaacaaatactttgctgaaagatatcaagggcgcttaatagttcgatttgatgacacaaacccttcaaaagaaagcaatgagtttgttgagaatcttttgaaagatattgagacgttggggatcaaatatgatgctgtcacatacacatctgattatttcccaaagctaatggaaatggctgagagtttgataaagcagggtaaagcatatattgatgacacaccaaaggagcaaatgaggaaagagaggatggacggtattgagtcaaggtgcagaaataataccgtggaggaaaatctctcattatggaaagagatggttaatggaactgaaaggggcatgcagtgctgtgtacggggtaaacttgacatgcaggatcctaacaagtcactcagggatcctgtttactaccgctgtaatactgatccacaccatcgtgttggttcgaagtacaaggtctatccaacatatgactttgcgtgcccatttgtcgatgcattggagggggtaacccatgctcttcgttccagtgaatatcatgacagaaatgcacaatattatcgaattcttcaagacatggggttgaggagagtggaaatttatgaattcagccgattgaatatggtttacactcttctaagcaagcgaaagcttctttggtttgtacaaaacaagaaggtcgaagattggacagacccacgttttcccactgtccaaggcatagtacgtcggggcttgaaggttgatgcattgatacagtttatactccaacagggtgcttcaaaaaatctgaatctcatggaatgggataaactctggacaatcaacaagaagataattgatccagtgtgcgcaaggcatactgctgtgctaaaagaccagcgtgtcatctttactcttacaaatggtccagaggagccatttgttcgaattttaccaagacataagaaatttgagggtgctggaaagaaggctacaacctttgccaacagaatttggctcgattatgctgatgcggcagctattagcaagggtgaggaagtaacccttatggattgggggaatgctattgttaaagagatcaaggtggagagtggagtaattactgaactagttggagaactgcatcttgaggggtctgtgaaaacaacaaaattgaagatcacatggctagcagatatagaggagctagttcccctttcattggttgaatttgattacctcatcagcaagaaaaagactatgctgcactgaatcaaattgcatgctgatttctacg

SEQ ID NO: 6390 - DNA, 699 bp, Zea Mays
aaactttttacatactgtaataaccaagtccagatgaactttcagaaagaaaatcgagaacctcagacaccttctgaccgctgaagcacgaacgacaatggccatactgcacgatgttgcacgttttgtagaagtttgtatcttcgttaaaaattatagcagtacaaatcatagcacattctgtaggtgtaggatacagtaacacagcagcagaacatcaaacccatctcctgccaggctctgagcaaacgccaaagcctccaacgtggcacctacgtaccgtaccccagtcacccaccccacaccctacctcgctcgcagtcgcagcttccgctgtacgcacactactgcgcggtgcacgcaccgacgacacggcggcgcagcttatgtatgagtaagtatagggactcgccatacaggtagtcatcgcagcgtgccaccccgtctagcgatcgaacacagtcgacggggaacgccggccggtccggtcagttggtgagcgcgacggcggcctcgtgcacgaggggctgggtggcgtgcgcgacgccctcggcctcccgctccacctgctcccggcacgcctcccgcgcgcccggctccgtcatgcgcttgacgaacgcggcgaagcggcgccagttgtcgggctggaacaggtcgggccccatgcgcaggtacgtgaaggccaccatgcggtcctcg

SEQ ID NO: 6391 - DNA, 167 bp, Zea Mays
ggtgcaggttcccctagattattcagatcagacagaaacgaaattccaacaccgtaacacggtgacatgcacgcacataatctacttactgctcaggcggcacttccttcgatccagagctcccggctccttctgcacccttgggtcgctgctgctcaacgcccgat

SEQ ID NO: 6392 - DNA, 494 bp, Zea Mays
caagactgctcacggacggagtcttagagtctcggcatccacctccaccaggcgctggcccagttttcgccatccaccaggcgtccttagaatatggtgcagggctaccgagcagcgagcaacaagctgccgagcacagggcgccgaccgtcgagcagcgagcaccgaggaccgccgagtagtcgagcaccgagcagctagcaccgagcagccgagcagcaagcagagggctgcgaccaccgagcagccgagccgcctcgtcttctctcgtcttctctagtaaattaaacaggcttggatgaattagttttttgatttagagttttggagagattatttgtacggatttgaaaagattacttgtatggaacgttgaaattattgtttggtgctaaaaaatattattggaatgttgttggaatgttaatttgtgataaatttctgctagaatgatgctgtaattttagtgggcgggcgggtaatggatatccgtt

SEQ ID NO: 6393 - DNA, 1526 bp, Zea Mays
ctaattcccagtaagagctaaaatgtaacaactaaccgagaatgtggaaccttcttctgctgacattgtaacgatgttgcaccagataaaatgcctatagttctggagaatgttagaagtgtcttaaaacatggtggccgtgttctttttcgggactatgccttcggtgaccttgcacaggaaagactgatgtcaaagggccaacaaataagtgagaacttctatgtcagaggtgatggtacgcgtgcatattacttttcaaatgaatatctggtagatttattttcaaaatgtggacttactcttgaggagatatgtgtgcacaacaagcaagttgaaaaccgttcactggagctggtgatgaacaggaattggatccaagctaccttcaccctaaattcagctagtcctcaaggtccaaatggtcaacacgatctccttgcttacgaaggagaggatgataaggtagttactgacacatctaagaagaaaagcagcggtgaagaaatcgatctttctgaagatttttgcaacatgtttgggacatcacacagccttgatgaggtacaaatcattggggtgaaagcaaaaggccacgacttcaaaataagaatgctcaggaaggaataccagcacacctgcagatcaactggcttaatgctctgggaatctgctcaattcatgtgctgtcttttagcagagaacccttcgatcgttgcaagcaaaagggtcctggagttgggctgtggctcagctggcatctgctcgatggttgctgcaagtttcactccctttgttttagctacagatggggatgaagaatcactggacctccttagacaaaatatctcctcgaacatggagcctaatttgctgagcagaatcatggttaggaagttattctggggcaacgaagatgatatgaaggcagtccgagagcttcatggtaacggcgtgggttttgattgcataataggcaccgacgtgacatacaatcctgatgctatactccctctcttcaagactgctaggggagtgatttctgagaaagctaacgaggactcggtacctgctctcattctttgctacatccagcgacgagttgatgaggactccatcctttctaatgcaacgtcccagggtttcaggcttgtggacaaatggataaatggagttcacgagagtaacggtaccatcagttcttggttctctggtaatgatgtctgcagtgctttccggcatacagtactttcagtactgtacttcgagctgtgaatgctgctatgcatgtgcaaggttactgtataacctgaaggatttttgtagcagctgtatcaagcaacggcaaaccaactttgaatctttaggccttgtttaatgatttcaattttacgtgaatcggactgtactggaatggattgagatagattttgacttctatggatttaaattgacttagtgccatccaatccatatggattaacggtgaaacgaataagcccttactgtgtttttttatatttgtg

SEQ ID NO: 6394 - DNA, 1691 bp, Zea Mays
aacatgtcccttagcgcaagttttagaggttggttgtggagctgggaacacaatctatccattgctttctacatacccagatatttttgtccacgcctgcgatttttctccacgagctgtcaatttggtcaagaaacacaaggacttcaaagctgaccggataaatgcatttgtttgtgatattgcatcagaacaactaaccgagaatgtggaaccttcttctgctgacattgtaacgatgttgcaccagataaaatgcctatagttctggagaatgttagaagtgtcttaaaacatggtggccgtgttctttttcgggactatgccttcggtgaccttgcacaggaaagactgatgtcaaagggccaacaaataagtgagaacttctatgtcagaggtgatggtacgcgtgcatattacttttcaaatgaatatctggtagatttattttcaaaatgtggacttactcttgaggagatatgtgtgcacaacaagcaagttgaaaaccgttcactggagctggtgatgaacaggaattggatccaagctaccttcaccctaaattcagctagtcctcaaggtccaaatggtcaacacgatctccttgcttacgaaggagaggatgataaggtagttactgacacatctaagaagaaaagcagcggtgaagaaatcgatctttctgaagatttttgcaacatgtttgggacatcacacagccttgatgaggtacaaatcattggggtgaaagcaaaaggccacgacttcaaaataagaatgctcaggaaggaataccagcacacctgcagatcaactggcttaatgctctgggaatctgctcaattcatgtgctgtcttttagcagagaacccttcgatcgttgcaagcaaaagggtcctggagttgggctgtggctcagctggcatctgctcgatggttgctgcaagtttcactccctttgttttagctacagatggggatgaagaatcactggacctccttagacaaaatatctcctcgaacatggagcctaatttgctgagcagaatcatggttaggaagttattctggggcaacgaagatgatatgaaggcagtccgagagcttcatggtaacggcgtgggttttgattgcataataggcaccgacgtgacatacaatcctgatgctatactccctctcttcaagactgctaggggagtgatttctgagaaagctaacgaggactcggtacctgctctcattctttgctacatccagcgacgagttgatgaggactccatcctttctaatgcaacgtcccagggtttcaggcttgtggacaaatggataaatggagttcacgagagtaacggtaccatcagttcttggttctctggtaatgatgtctgcagtgctttccggcatacagtactttcagtactgtacttcgagctgtgaatgctgctatgcatgtgcaaggttactgtataacctgaaggatttttgtagcagctgtatcaagcaacggcaaaccaactttgaatctttaggccttgtttaatgatttcaattttacgtgaatcggactgtactggaatggattgagatagattttgacttctatggatttaaattgacttagtgccatccaatccatatggattaacggtgaaacgaataagcccttactgtgtttttttatatttgtg

SEQ ID NO: 6395 - DNA, 1912 bp, Zea Mays
cgcggagggctcgcgtcggggtccatctgaacatccgccagaccgccgccaccatgccgcaacctaccgccgattcgagcaccatggtcgccggcgagcatcagcaacaacagcaacctgccaccgcgcggatctcctcctcctcaaccagctccggaaggctcgtcactccgttctggaaagagaagtatgagagggacgcgaggaggtactgggacatcttctacaggcgccacgaggacaagttcttcaaggatcgacactacctggataaagaatgggggaaatactttaagggacgagatggagaaaagaaggtggttctagaggttggttgtggagctgggaacacaatctatccattgctttctacatacccagatatttttgtccacgcctgcgatttttctccacgagctgtcaatttggtcaagaaacacaaggacttcaaagctgaccggataaatgcatttgtttgtgatattgcatcagaacaactaaccgagaatgtggaaccttcttctgctgacattgtaacgatgatctttatgctctctgcagttgcaccagataaaatgcctatagttctggagaatgttagaagtgtcttaaaacatggtggccgtgttctttttcgggactatgccttcggtgaccttgcacaggaaagactgatgtcaaagggccaacaaataagtgagaacttctatgtcagaggtgatggtacgcgtgcatattacttttcaaatgaatatctggtagatttattttcaaaatgtggacttactcttgaggagatatgtgtgcacaacaagcaagttgaaaaccgttcactggagctggtgatgaacaggaattggatccaagctaccttcaccctaaattcagctagtcctcaaggtccaaatggtcaacacgatctccttgcttacgaaggagaggatgataaggtacaaatcattggggtgaaagcaaaaggccacgacttcaaaataagaatgctcaggaaggaataccagcacacctgcagatcaactggcttaatgctctgggaatctgctcaattcatgtgctgtcttttagcagagaacccttcgatcgttgcaagcaaaagggtcctggagttgggctgtggctcagctggcatctgctcgatggttgctgcaagtttcactccctttgttttagctacagatggggatgaagaatcactggacctccttagacaaaatatctcctcgaacatggagcctaatttgctgagcagaatcatggttaggaagttattctggggcaacgaagatgatatgaaggcagtccgagagcttcatggtaacggcgtgggttttgattgcataataggcaccgacgtgacatacaatcctgatgctatactccctctcttcaagactgctaggggagtgatttctgagaaagctaacgaggactcggtacctgctctcattctttgctacatccagcgacgagttgatgaggactccatcctttctaatgcaacgtcccagggtttcaggcttgtggacaaatggataaatggagttcacgagagtaacggtaccatcagttcttggttctctggtaatgatgtctgcagtgctttccggcatacagtactttcagtactgtacttcgagctgtgaatgctgctatgcatgtgcaaggttactgtataacctgaaggatttttgtagcagctgtatcaagcaacggcaaaccaactttgaatctttaggccttgtttaatgatttcaattttacgtgaatcggactgtactggaatggattgagatagattttgacttctatggatttaaattgacttagtgccatccaatccatatggattaacggtgaaacgaataagcccttactgtgtttttttatatttgtg

SEQ ID NO: 6396 - DNA, 2006 bp, Zea Mays
cgcggagggctcgcgtcggggtccatctgaacatccgccagaccgccgccaccatgccgcaacctaccgccgattcgagcaccatggtcgccggcgagcatcagcaacaacagcaacctgccaccgcgcggatctcctcctcctcaaccagctccggaaggctcgtcactccgttctggaaagtatgagagggacgcgaggaggtactgggacatcttctacaggcgccacgaggacaagttcttcaaggatcgacactacctggataaagaatgggggaaatactttaagggacgagatggagaaaagaaggtggttctagaggttggttgtggagctgggaacacaatctatccattgctttctacatacccagatatttttgtccacgcctgcgatttttctccacgagctgtcaatttggtcaagaaacacaaggacttcaaagctgaccggataaatgcatttgtttgtgatattgcatcagaacaactaaccgagaatgtggaaccttcttctgctgacattgtaacgatgatctttatgctctctgcagttgcaccagataaaatgcctatagttctggagaatgttagaagtgtcttaaaacatggtggccgtgttctttttcgggactatgccttcggtgaccttgcacaggaaagactgatgtcaaagggccaacaaataagtgagaacttctatgtcagaggtgatggtacgcgtgcatattacttttcaaatgaatatctggtagatttattttcaaaatgtggacttactcttgaggagatatgtgtgcacaacaagcaagttgaaaaccgttcactggagctggtgatgaacaggaattggatccaagctaccttcaccctaaattcagctagtcctcaaggtccaaatggtcaacacgatctccttgcttacgaaggagaggatgataaggtagttactgacacatctaagaagaaaagcagcggtgaagaaatcgatctttctgaagatttttgcaacatgtttgggacatcacacagccttgatgaggtacaaatcattggggtgaaagcaaaaggccacgacttcaaaataagaatgctcaggaaggaataccagcacacctgcagatcaactggcttaatgctctgggaatctgctcaattcatgtgctgtcttttagcagagaacccttcgatcgttgcaagcaaaagggtcctggagttgggctgtggctcagctggcatctgctcgatggttgctgcaagtttcactccctttgttttagctacagatggggatgaagaatcactggacctccttagacaaaatatctcctcgaacatggagcctaatttgctgagcagaatcatggttaggaagttattctggggcaacgaagatgatatgaaggcagtccgagagcttcatggtaacggcgtgggttttgattgcataataggcaccgacgtgacatacaatcctgatgctatactccctctcttcaagactgctaggggagtgatttctgagaaagctaacgaggactcggtacctgctctcattctttgctacatccagcgacgagttgatgaggactccatcctttctaatgcaacgtcccagggtttcaggcttgtggacaaatggataaatggagttcacgagagtaacggtaccatcagttcttggttctctggtaatgatgtctgcagtgctttccggcatacagtactttcagtactgtacttcgagctgtgaatgctgctatgcatgtgcaaggttactgtataacctgaaggatttttgtagcagctgtatcaagcaacggcaaaccaactttgaatctttaggccttgtttaatgatttcaattttacgtgaatcggactgtactggaatggattgagatagattttgacttctatggatttaaattgacttagtgccatccaatccatatggattaacggtgaaacgaataagcccttactgtgtttttttatatttgtg

SEQ ID NO: 6397 - DNA, 1934 bp, Zea Mays
cgcggagggctcgcgtcggggtccatctgaacatccgccagaccgccgccaccatgccgcaacctaccgccgattcgagcaccatggtcgccggcgagcatcagcaacaacagcaacctgccaccgcgcggatctcctcctcctcaaccagctccggaaggctcgtcactccgttctggaaagagaagtatgagagggacgcgaggaggtactgggacatcttctacaggcgccacgaggacaagttcttcaaggatcgacactacctggataaagaatgggggaaatactttaagggacgagatggagaaaagaaggtggttctagaggttggttgtggagctgggaacacaatctatccattgctttctacatacccagatatttttgtccacgcctgcgatttttctccacgagctgtcaatttggtcaagaacaactaaccgagaatgtggaaccttcttctgctgacattgtaacgatgttgcaccagataaaatgcctatagttctggagaatgttagaagtgtcttaaaacatggtggccgtgttctttttcgggactatgccttcggtgaccttgcacaggaaagactgatgtcaaagggccaacaaataagtgagaacttctatgtcagaggtgatggtacgcgtgcatattacttttcaaatgaatatctggtagatttattttcaaaatgtggacttactcttgaggagatatgtgtgcacaacaagcaagttgaaaaccgttcactggagctggtgatgaacaggaattggatccaagctaccttcaccctaaattcagctagtcctcaaggtccaaatggtcaacacgatctccttgcttacgaaggagaggatgataaggtagttactgacacatctaagaagaaaagcagcggtgaagaaatcgatctttctgaagatttttgcaacatgtttgggacatcacacagccttgatgaggtacaaatcattggggtgaaagcaaaaggccacgacttcaaaataagaatgctcaggaaggaataccagcacacctgcagatcaactggcttaatgctctgggaatctgctcaattcatgtgctgtcttttagcagagaacccttcgatcgttgcaagcaaaagggtcctggagttgggctgtggctcagctggcatctgctcgatggttgctgcaagtttcactccctttgttttagctacagatggggatgaagaatcactggacctccttagacaaaatatctcctcgaacatggagcctaatttgctgagcagaatcatggttaggaagttattctggggcaacgaagatgatatgaaggcagtccgagagcttcatggtaacggcgtgggttttgattgcataataggcaccgacgtgacatacaatcctgatgctatactccctctcttcaagactgctaggggagtgatttctgagaaagctaacgaggactcggtacctgctctcattctttgctacatccagcgacgagttgatgaggactccatcctttctaatgcaacgtcccagggtttcaggcttgtggacaaatggataaatggagttcacgagagtaacggtaccatcagttcttggttctctggtaatgatgtctgcagtgctttccggcatacagtactttcagtactgtacttcgagctgtgaatgctgctatgcatgtgcaaggttactgtataacctgaaggatttttgtagcagctgtatcaagcaacggcaaaccaactttgaatctttaggccttgtttaatgatttcaattttacgtgaatcggactgtactggaatggattgagatagattttgacttctatggatttaaattgacttagtgccatccaatccatatggattaacggtgaaacgaataagcccttactgtgtttttttatatttgtg

SEQ ID NO: 6398 - DNA, 2006 bp, Zea Mays
cgcggagggctcgcgtcggggtccatctgaacatccgccagaccgccgccaccatgccgcaacctaccgccgattcgagcaccatggtcgccggcgagcatcagcaacaacagcaacctgccaccgcgcggatctcctcctcctcaaccagctccggaaggctcgtcactccgttctggaaagagaagtatgagagggacgcgaggaggtactgggacatcttctacaggcgccacgaggacaagttcttcaaggatcgacactacctggataaagaatgggggaaatactttaagggacgagatggagaaaagaaggtggttctagaggttggttgtggagctgggaacacaatctatccattgctttctacatacccagatatttttgtccacgcctgcgatttttctccacgagctgtcaatttggtcaagaaacacaaggacttcaaagctgaccggataaatgcatttgtttgtgatattgcatcagaacaactaaccgagaatgtggaaccttcttctgctgacattgtaacgatgatctttatgctctctgcagttgcaccagataaaatgcctatagttctggagaatgttagaagtgtcttaaaacatggtggccgtgttctttttcgggactatgccttcggtgaccttgcacaggaaagactgatgtcaaagggccaacaaataagtgagaacttctatgtcagaggtgatgcgtgcatattacttttcaaatgaatatctggtagatttattttcaaaatgtggacttactcttgaggagatatgtgtgcacaacaagcaagttgaaaaccgttcactggagctggtgatgaacaggaattggatccaagctaccttcaccctaaattcagctagtcctcaaggtccaaatggtcaacacgatctccttgcttacgaaggagaggatgataaggtagttactgacacatctaagaagaaaagcagcggtgaagaaatcgatctttctgaagatttttgcaacatgtttgggacatcacacagccttgatgaggtacaaatcattggggtgaaagcaaaaggccacgacttcaaaataagaatgctcaggaaggaataccagcacacctgcagatcaactggcttaatgctctgggaatctgctcaattcatgtgctgtcttttagcagagaacccttcgatcgttgcaagcaaaagggtcctggagttgggctgtggctcagctggcatctgctcgatggttgctgcaagtttcactccctttgttttagctacagatggggatgaagaatcactggacctccttagacaaaatatctcctcgaacatggagcctaatttgctgagcagaatcatggttaggaagttattctggggcaacgaagatgatatgaaggcagtccgagagcttcatggtaacggcgtgggttttgattgcataataggcaccgacgtgacatacaatcctgatgctatactccctctcttcaagactgctaggggagtgatttctgagaaagctaacgaggactcggtacctgctctcattctttgctacatccagcgacgagttgatgaggactccatcctttctaatgcaacgtcccagggtttcaggcttgtggacaaatggataaatggagttcacgagagtaacggtaccatcagttcttggttctctggtaatgatgtctgcagtgctttccggcatacagtactttcagtactgtacttcgagctgtgaatgctgctatgcatgtgcaaggttactgtataacctgaaggatttttgtagcagctgtatcaagcaacggcaaaccaactttgaatctttaggccttgtttaatgatttcaattttacgtgaatcggactgtactggaatggattgagatagattttgacttctatggatttaaattgacttagtgccatccaatccatatggattaacggtgaaacgaataagcccttactgtgtttttttatatttgtg

SEQ ID NO: 6399 - DNA, 1888 bp, Zea Mays
cgcggagggctcgcgtcggggtccatctgaacatccgccagaccgccgccaccatgccgcaacctaccgccgattcgagcaccatggtcgccggcgagcatcagcaacaacagcaacctgccaccgcgcggatctcctcctcctcaaccagctccggaaggctcgtcactccgttctggaaagagaagtatgagagggacgcgaggaggtactgggacatcttctacaggcgccacgaggacaagttcttcaaggatcgacactacctggataaagaatgggggaaatactttaagggacgagatggagaaaagaaggtggttctagaggttggttgtggagctgggaacacaatctatccattgctttctacatacccagatatttttgtccacgcctgcgatttttctccacgagctgtcaatttggtcaagaaacacaaggacttcaaagctgaccggataaatgcatttgtttgtgatattgcatcagaacaactaaccgagaatgtggaaccttcttctgctgacattgtaacgatggaaagactgatgtcaaagggccaacaaataagtgagaacttctatgtcagaggtgatggtacgcgtgcatattacttttcaaatgaatatctggtagatttattttcaaaatgtggacttactcttgaggagatatgtgtgcacaacaagcaagttgaaaaccgttcactggagctggtgatgaacaggaattggatccaagctaccttcaccctaaattcagctagtcctcaaggtccaaatggtcaacacgatctccttgcttacgaaggagaggatgataaggtagttactgacacatctaagaagaaaagcagcggtgaagaaatcgatctttctgaagatttttgcaacatgtttgggacatcacacagccttgatgaggtacaaatcattggggtgaaagcaaaaggccacgacttcaaaataagaatgctcaggaaggaataccagcacacctgcagatcaactggcttaatgctctgggaatctgctcaattcatgtgctgtcttttagcagagaacccttcgatcgttgcaagcaaaagggtcctggagttgggctgtggctcagctggcatctgctcgatggttgctgcaagtttcactccctttgttttagctacagatggggatgaagaatcactggacctccttagacaaaatatctcctcgaacatggagcctaatttgctgagcagaatcatggttaggaagttattctggggcaacgaagatgatatgaaggcagtccgagagcttcatggtaacggcgtgggttttgattgcataataggcaccgacgtgacatacaatcctgatgctatactccctctcttcaagactgctaggggagtgatttctgagaaagctaacgaggactcggtacctgctctcattctttgctacatccagcgacgagttgatgaggactccatcctttctaatgcaacgtcccagggtttcaggcttgtggacaaatggataaatggagttcacgagagtaacggtaccatcagttcttggttctctggtaatgatgtctgcagtgctttccggcatacagtactttcagtactgtacttcgagctgtgaatgctgctatgcatgtgcaaggttactgtataacctgaaggatttttgtagcagctgtatcaagcaacggcaaaccaactttgaatctttaggccttgtttaatgatttcaattttacgtgaatcggactgtactggaatggattgagatagattttgacttctatggatttaaattgacttagtgccatccaatccatatggattaacggtgaaacgaataagcccttactgtgtttttttatatttgtg

SEQ ID NO: 6400 - DNA, 2392 bp, Zea Mays
gtcgtcgcggagggctcgcgtcggggtccatctgaacatccgccagaccgccgccaccatgccgcaacctaccgccgattcgagcaccatggtcgccggcgagcatcagcaacaacagcaacctgccaccgcgcggatctcctcctcctcaaccagctccggaaggctcgtcactccgttctggaaagagaagtatgagagggacgcgaggaggtactgggacatcttctacaggcgccacgaggacaagttcttcaaggatcgacactacctggataaagaatgggggaaatactttaagggacgagatggagaaaagaaggtggttctagaggtatgttgtatcttttttatttcgtgaacatgtcccttagcgcaagttttagaggtatgttgtatccttgctttgttggtaatgtcaatgatcctgtaaggttgttttctgtgactgctgttgtatggctgtagcagacaatcaaactgtgcataaattttactaccatcgtaacaataaataaaatttgaatatgagcactccttggtataaaatttggattagtatctgtatcgttaagggaatccacgctcaaatcagcgcagaacctatgccattttgtttttgtaatcagttttacactacatatatcgttattacatgaccgcgtcttgcaaatcttgtagtgatttcttgttttcataagtatgattcttgtgaagttcaatgtataggttggttgtggagctgggaacacaatctatccattgctttctacatacccagatatttttgtccacgcctgcgatttttctccacgagctgtcaatttggtcaagaaacacaaggacttcaaagctgaccggataaatgcatttgtttgtgatattgcatcagaacaactaaccgagaatgtggaaccttcttctgctgacattgtaacgatgttgcaccagataaaatgcctatagttctggagaatgttagaagtgtcttaaaacatggtggccgtgttctttttcgggactatgccttcggtgaccttgcacaggaaagactgatgtcaaagggccaacaaataagtgagaacttctatgtcagaggtgatggtacgcgtgcatattacttttcaaatgaatatctggtagatttattttcaaaatgtggacttactcttgaggagatatgtgtgcacaacaagcaagttgaaaaccgttcactggagctggtgatgaacaggaattggatccaagctaccttcaccctaaattcagctagtcctcaaggtccaaatggtcaacacgatctccttgcttacgaaggagaggatgataaggtagttactgacacatctaagaagaaaagcagcggtgaagaaatcgatctttctgaagatttttgcaacatgtttgggacatcacacagccttgatgaggtacaaatcattggggtgaaagcaaaaggccacgacttcaaaataagaatgctcaggaaggaataccagcacacctgcagatcaactggcttaatgctctgggaatctgctcaattcatgtgctgtcttttagcagagaacccttcgatcgttgcaagcaaaagggtcctggagttgggctgtggctcagctggcatctgctcgatggttgctgcaagtttcactccctttgttttagctacagatggggatgaagaatcactggacctccttagacaaaatatctcctcgaacatggagcctaatttgctgagcagaatcatggttaggaagttattctggggcaacgaagatgatatgaaggcagtccgagagcttcatggtaacggcgtgggttttgattgcataataggcaccgacgtgacatacaatcctgatgctatactccctctcttcaagactgctaggggagtgatttctgagaaagctaacgaggactcggtacctgctctcattctttgctacatccagcgacgagttgatgaggactccatcctttctaatgcaacgtcccagggtttcaggcttgtggacaaatggataaatggagttcacgagagtaacggtaccatcagttcttggttctctggtaatgatgtctgcagtgctttccggcatacagtactttcagtactgtacttcgagctgtgaatgctgctatgcatgtgcaaggttactgtataacctgaaggatttttgtagcagctgtatcaagcaacggcaaaccaactttgaatctttaggccttgtttaatgatttcaattttacgtgaatcggactgtactggaatggattgagatagattttgacttctatggatttaaattgacttagtgccatccaatccatatggattaacggtgaaacgaataagcccttactgtgtttttttatatttgtg

SEQ ID NO: 6401 - DNA, 2269 bp, Zea Mays
gacttgcgtcgtcgcggagggctcgcgtcggggtccatctgaacatccgccagaccgccgccaccatgccgcaacctaccgccgattcgagcaccatggtcgccggcgagcatcagcaacaacagcaacctgccaccgcgcggatctcctcctcctcaaccagctccggaaggctcgtcactccgttctggaaagagaagtatgagagggacgcgaggaggtactgggacatcttctacaggcgccacgaggacaagttcttcaaggatcgacactacctggataaagaatgggggaaatactttaagggacgagatggagaaaagaaggtggttctagaggtatgttgtatcttttttatttcgtgaacatgtcccttagcgcaagttttagaggtatgttgtatccttgctttgttggtaatgtcaatgatcctgtaaggttgttttctgtgactgctgttgtatggctgtagcagacaatcaaactgtgcataaattttactaccatcgtaacaataaataaaatttgaatatgagcactccttggtataaaatttggattagtatctgtatcgttaagggaatccacgctcaaatcagcgcagaacctatgccattttgtttttgtaatcagttttacactacatatatcgttattacatgaccgcgtcttgcaaatcttgtagtgatttcttgttttcataagtatgattcttgtgaagttcaatgtataggttggttgtggagctgggaacacaatctatccattgctttctacatacccagatatttttgtccacgcctgcgatttttctccacgagctgtcaatttggtcaagaaacacaaggacttcaaagctgaccggataaatgcatttgtttgtgatattgcatcagaacaactaaccgagaatgtggaaccttcttctgctgacattgtaacgatgttgcaccagataaaatgcctatagttctggagaatgttagaagtgtcttaaaacatggtggccgtgttctttttcgggactatgccttcggtgaccttgcacaggaaagactgatgtcaaagggccaacaaataagtgagaacttctatgtcagaggtgatggaattggatccaagctaccttcaccctaaattcagctagtcctcaaggtccaaatggtcaacacgatctccttgcttacgaaggagaggatgataaggtagttactgacacatctaagaagaaaagcagcggtgaagaaatcgatctttctgaagatttttgcaacatgtttgggacatcacacagccttgatgaggtacaaatcattggggtgaaagcaaaaggccacgacttcaaaataagaatgctcaggaaggaataccagcacacctgcagatcaactggcttaatgctctgggaatctgctcaattcatgtgctgtcttttagcagagaacccttcgatcgttgcaagcaaaagggtcctggagttgggctgtggctcagctggcatctgctcgatggttgctgcaagtttcactccctttgttttagctacagatggggatgaagaatcactggacctccttagacaaaatatctcctcgaacatggagcctaatttgctgagcagaatcatggttaggaagttattctggggcaacgaagatgatatgaaggcagtccgagagcttcatggtaacggcgtgggttttgattgcataataggcaccgacgtgacatacaatcctgatgctatactccctctcttcaagactgctaggggagtgatttctgagaaagctaacgaggactcggtacctgctctcattctttgctacatccagcgacgagttgatgaggactccatcctttctaatgcaacgtcccagggtttcaggcttgtggacaaatggataaatggagttcacgagagtaacggtaccatcagttcttggttctctggtaatgatgtctgcagtgctttccggcatacagtactttcagtactgtacttcgagctgtgaatgctgctatgcatgtgcaaggttactgtataacctgaaggatttttgtagcagctgtatcaagcaacggcaaaccaactttgaatctttaggccttgtttaatgatttcaattttacgtgaatcggactgtactggaatggattgagatagattttgacttctatggatttaaattgacttagtgccatccaatccatatggattaacggtgaaacgaataagcccttactgtgtttttttatatttgtg

SEQ ID NO: 6402 - DNA, 2001 bp, Zea Mays
cagacttgcgtcgtcgcggagggctcgcgtcggggtccatctgaacatccgccagaccgccgccaccatgccgcaacctaccgccgattcgagcaccatggtcgccggcgagcatcagcaacaacagcaacctgccaccgcgcggatctcctcctcctcaaccagctccggaaggctcgtcactccgttctggaaagtatgagagggacgcgaggaggtactgggacatcttctacaggcgccacgaggacaagttcttcaaggatcgacactacctggataaagaatgggggaaatactttaagggacgagatggagaaaagaaggtggttctagaggttggttgtggagctgggaacacaatctatccattgctttctacatacccagatatttttgtccacgcctgcgatttttctccacgagctgtcaatttggtcaagaaacacaaggacttcaaagctgaccggataaatgcatttgtttgtgatattgcatcagaacaactaaccgagaatgtggaaccttcttctgctgacattgtaacgatgttgcaccagataaaatgcctatagttctggagaatgttagaagtgtcttaaaacatggtggccgtgttctttttcgggactatgccttcggtgaccttgcacaggaaagactgatgtcaaagggccaacaaataagtgagaacttctatgtcagaggtgatggtacgcgtgcatattacttttcaaatgaatatctggtagatttattttcaaaatgtggacttactcttgaggagatatgtgtgcacaacaagcaagttgaaaaccgttcactggagctggtgatgaacaggaattggatccaagctaccttcaccctaaattcagctagtcctcaaggtccaaatggtcaacacgatctccttgcttacgaaggagaggatgataaggtagttactgacacatctaagaagaaaagcagcggtgaagaaatcgatctttctgaagatttttgcaacatgtttgggacatcacacagccttgatgaggtacaaatcattggggtgaaagcaaaaggccacgacttcaaaataagaatgctcaggaaggaataccagcacacctgcagatcaactggcttaatgctctgggaatctgctcaattcatgtgctgtcttttagcagagaacccttcgatcgttgcaagcaaaagggtcctggagttgggctgtggctcagctggcatctgctcgatggttgctgcaagtttcactccctttgttttagctacagatggggatgaagaatcactggacctccttagacaaaatatctcctcgaacatggagcctaatttgctgagcagaatcatggttaggaagttattctggggcaacgaagatgatatgaaggcagtccgagagcttcatggtaacggcgtgggttttgattgcataataggcaccgacgtgacatacaatcctgatgctatactccctctcttcaagactgctaggggagtgatttctgagaaagctaacgaggactcggtacctgctctcattctttgctacatccagcgacgagttgatgaggactccatcctttctaatgcaacgtcccagggtttcaggcttgtggacaaatggataaatggagttcacgagagtaacggtaccatcagttcttggttctctggtaatgatgtctgcagtgctttccggcatacagtactttcagtactgtacttcgagctgtgaatgctgctatgcatgtgcaaggttactgtataacctgaaggatttttgtagcagctgtatcaagcaacggcaaaccaactttgaatctttaggccttgtttaatgatttcaattttacgtgaatcggactgtactggaatggattgagatagattttgacttctatggatttaaattgacttagtgccatccaatccatatggattaacggtgaaacgaataagcccttactgtgtttttttatatttgtg

SEQ ID NO: 6403 - DNA, 1951 bp, Zea Mays
cagcagacttgcgtcgtcgcggagggctcgcgtcggggtccatctgaacatccgccagaccgccgccaccatgccgcaacctaccgccgattcgagcaccatggtcgccggcgagcatcagcaacaacagcaacctgccaccgcgcggatctcctcctcctcaaccagctccggaaggctcgtcactccgttctggaaagagaagtatgagagggacgcgaggaggtactgggacatcttctacaggcgccacgaggacaagttcttcaaggatcgacactacctggataaagaatgggggaaatactttaagggacgagatggagaaaagaaggtggttctagaggttggttgtggagctgggaacacaatctatccattgctttctacatacccagatatttttgtccacgcctgcgatttttctccacgagctgtcaatttggtcaagaaacacaaggacttcaaagctgaccggataaatgcatttgtttgtgatattgcatcagaacaactaaccgagaatgtggaaccttcttctgctgacattgtaacgatgatctttatgctctctgcagttgcaccagataaaatgcctatagttctggagaatgttagaagtgtcttaaaacatggtggccgtgttctttttcgggactatgccttcggtgaccttgcacaggaaagactgatgtcaaagggccaacaaataagtgagaacttctatgtcagaggtgatggtacgcgtgcatattacttttcaaatgaatatctggtagatttattttcaaaatgtggacttactcttgaggagatatgtgtgcacaacaagcaagttgaaaaccgttcactggagctggtgatgaacaggaattggatccaagctaccttcaccctaaattcagctagtcctcaaggtccaaatggtcaacacgatctccttgcttacgaaggagaggatgataaggtagttactgacacatctaagaagaaaagcagcggtgaagaaatcgatctttctgaagatttttgcaacatgtttgggacatcacacagccttgatgaggtacaaatcattggggtgaaagcaaaaggccacgacttcaaaataagaatgctcaggaaggaataccagcacacctgcagatcaactggcttaatgctctgggaatctgctcaattcatgtgctgtcttttagcagagaacccttcgatcgttgcaagcaaaagggtcctggagttgggctgtggctcagctggcatctgctcgatggttgctgcaagtttcactccctttgttttagctacagatggggatgaagaatcactggacctccttagacaaaatatctcctcgaacatggagcctaatttgctgagcagaatcatggttaggaagttattctggggcaacgaagatgatatgaaggcagtccgagagcttcatgactgctaggggagtgatttctgagaaagctaacgaggactcggtacctgctctcattctttgctacatccagcgacgagttgatgaggactccatcctttctaatgcaacgtcccagggtttcaggcttgtggacaaatggataaatggagttcacgagagtaacggtaccatcagttcttggttctctggtaatgatgtctgcagtgctttccggcatacagtactttcagtactgtacttcgagctgtgaatgctgctatgcatgtgcaaggttactgtataacctgaaggatttttgtagcagctgtatcaagcaacggcaaaccaactttgaatctttaggccttgtttaatgatttcaattttacgtgaatcggactgtactggaatggattgagatagattttgacttctatggatttaaattgacttagtgccatccaatccatatggattaacggtgaaacgaataagcccttactgtgtttttttatatttgtg

SEQ ID NO: 6404 - DNA, 1978 bp, Zea Mays
cgtccaatttccggtccaccatcagcagacttgcgtcgtcgcggagggctcgcgtcggggtccatctgaacatccgccagaccgccgccaccatgccgcaacctaccgccgattcgagcaccatggtcgccggcgagcatcagcaacaacagcaacctgccaccgcgcggatctcctcctcctcaaccagctccggaaggctcgtcactccgttctggaaagagaagtatgagagggacgcgaggaggtactgggacatcttctacaggcgccacgaggacaagttcttcaaggatcgacactacctggataaagaatgggggaaatactttaagggacgagatggagaaaagaaggtggttctagaggttggttgtggagctgggaacacaatctatccattgctttctacatacccagatatttttgtccacgcctgcgatttttctccacgagctgtcaatttggtcaagaaacacaaggacttcaaagctgaccggataaatgcatttgtttgtgatattgcatcagaacaactaaccgagaatgtggaaccttcttctgctgacattgtaacgatgcatggtggccgtgttctttttcgggactatgccttcggtgaccttgcacaggaaagactgatgtcaaagggccaacaaataagtgagaacttctatgtcagaggtgatggtacgcgtgcatattacttttcaaatgaatatctggtagatttattttcaaaatgtggacttactcttgaggagatatgtgtgcacaacaagcaagttgaaaaccgttcactggagctggtgatgaacaggaattggatccaagctaccttcaccctaaattcagctagtcctcaaggtccaaatggtcaacacgatctccttgcttacgaaggagaggatgataaggtagttactgacacatctaagaagaaaagcagcggtgaagaaatcgatctttctgaagatttttgcaacatgtttgggacatcacacagccttgatgaggtacaaatcattggggtgaaagcaaaaggccacgacttcaaaataagaatgctcaggaaggaataccagcacacctgcagatcaactggcttaatgctctgggaatctgctcaattcatgtgctgtcttttagcagagaacccttcgatcgttgcaagcaaaagggtcctggagttgggctgtggctcagctggcatctgctcgatggttgctgcaagtttcactccctttgttttagctacagatggggatgaagaatcactggacctccttagacaaaatatctcctcgaacatggagcctaatttgctgagcagaatcatggttaggaagttattctggggcaacgaagatgatatgaaggcagtccgagagcttcatggtaacggcgtgggttttgattgcataataggcaccgacgtgacatacaatcctgatgctatactccctctcttcaagactgctaggggagtgatttctgagaaagctaacgaggactcggtacctgctctcattctttgctacatccagcgacgagttgatgaggactccatcctttctaatgcaacgtcccagggtttcaggcttgtggacaaatggataaatggagttcacgagagtaacggtaccatcagttcttggttctctggtaatgatgtctgcagtgctttccggcatacagtactttcagtactgtacttcgagctgtgaatgctgctatgcatgtgcaaggttactgtataacctgaaggatttttgtagcagctgtatcaagcaacggcaaaccaactttgaatctttaggccttgtttaatgatttcaattttacgtgaatcggactgtactggaatggattgagatagattttgacttctatggatttaaattgacttagtgccatccaatccatatggattaacggtgaaacgaataagcccttactgtgtttttttatatttgtg

SEQ ID NO: 6405 - DNA, 1963 bp, Zea Mays
gttctcgtccaatttccggtccaccatcagcagacttgcgtcgtcgcggagggctcgcgtcggggtccatctgaacatccgccagaccgccgccaccatgccgcaacctaccgccgattcgagcaccatggtcgccggcgagcatcagcaacaacagcaacctgccaccgcgcggatctcctcctcctcaaccagctccggaaggctcgtcactccgttctggaaagagaagtatgagagggacgcgaggaggtactgggacatcttctacaggcgccacgaggacaagttcttcaaggatcgacactacctggataaagaatgggggaaatactttaagggacgagatggagaaaagaaggtggttctagaggttggttgtggagctgggaacacaatctatccattgctttctacatacccagatatttttgtccacgcctgcgatttttctccacgagctgtcaatttggtcaagaaacacaaggacttcaaagctgaccggataaatgcatttgtttgtgatattgcatcagaacaactaaccgagaatgtggaaccttcttctgctgacattgtaacgatgatctttatgctctctgcagttgcaccagataaaatgcctatagttctggagaatgttagaagtgtcttaaaacatggtggccgtgttctttttcgggactatgccttcggtgaccttgcacaggaaagactgatgtcaaagggccaacaaataagtgagaacttctatgtcagaggtgatgcaagttgaaaaccgttcactggagctggtgatgaacaggaattggatccaagctaccttcaccctaaattcagctagtcctcaaggtccaaatggtcaacacgatctccttgcttacgaaggagaggatgataaggtagttactgacacatctaagaagaaaagcagcggtgaagaaatcgatctttctgaagatttttgcaacatgtttgggacatcacacagccttgatgaggtacaaatcattggggtgaaagcaaaaggccacgacttcaaaataagaatgctcaggaaggaataccagcacacctgcagatcaactggcttaatgctctgggaatctgctcaattcatgtgctgtcttttagcagagaacccttcgatcgttgcaagcaaaagggtcctggagttgggctgtggctcagctggcatctgctcgatggttgctgcaagtttcactccctttgttttagctacagatggggatgaagaatcactggacctccttagacaaaatatctcctcgaacatggagcctaatttgctgagcagaatcatggttaggaagttattctggggcaacgaagatgatatgaaggcagtccgagagcttcatggtaacggcgtgggttttgattgcataataggcaccgacgtgacatacaatcctgatgctatactccctctcttcaagactgctaggggagtgatttctgagaaagctaacgaggactcggtacctgctctcattctttgctacatccagcgacgagttgatgaggactccatcctttctaatgcaacgtcccagggtttcaggcttgtggacaaatggataaatggagttcacgagagtaacggtaccatcagttcttggttctctggtaatgatgtctgcagtgctttccggcatacagtactttcagtactgtacttcgagctgtgaatgctgctatgcatgtgcaaggttactgtataacctgaaggatttttgtagcagctgtatcaagcaacggcaaaccaactttgaatctttaggccttgtttaatgatttcaattttacgtgaatcggactgtactggaatggattgagatagattttgacttctatggatttaaattgacttagtgccatccaatccatatggattaacggtgaaacgaataagcccttactgtgtttttttatatttgtg

SEQ ID NO: 6406 - DNA, 2453 bp, Zea Mays
ctcgttctcgtccaatttccggtccaccatcagcagacttgcgtcgtcgcggagggctcgcgtcggggtccatctgaacatccgccagaccgccgccaccatgccgcaacctaccgccgattcgagcaccatggtcgccggcgagcatcagcaacaacagcaacctgccaccgcgcggatctcctcctcctcaaccagctccggaaggctcgtcactccgttctggaaagagaagtatgagagggacgcgaggaggtactgggacatcttctacaggcgccacgaggacaagttcttcaaggatcgacactacctggataaagaatgggggaaatactttaagggacgagatggagaaaagaaggtggttctagaggtatgttgtatcttttttatttcgtgaacatgtcccttagcgcaagttttagaggtatgttgtatccttgctttgttggtaatgtcaatgatcctgtaaggttgttttctgtgactgctgttgtatggctgtagcagacaatcaaactgtgcataaattttactaccatcgtaacaataaataaaatttgaatatgagcactccttggtataaaatttggattagtatctgtatcgttaagggaatccacgctcaaatcagcgcagaacctatgccattttgtttttgtaatcagttttacactacatatatcgttattacatgaccgcgtcttgcaaatcttgtagtgatttcttgttttcataagtatgattcttgtgaagttcaatgtataggttggttgtggagctgggaacacaatctatccattgctttctacatacccagatatttttgtccacgcctgcgatttttctccacgagctgtcaatttggtcaagaaacacaaggacttcaaagctgaccggataaatgcatttgtttgtgatattgcatcagaacaactaaccgagaatgtggaaccttcttctgctgacattgtaacgatgatctttatgctctctgcagttgcaccagataaaatgcctatagttctggagaatgttagaagtgtcttaaaacatggtggccgtgttctttttcgggactatgccttcggtgaccttgcacaggaaagactgatgtcaaagggccaacaaataagtgagaacttctatgtcagaggtgatggtacgcgtgcatattacttttcaaatgaatatctggtagatttattttcaaaatgtggacttactcttgaggagatatgtgtgcacaacaagcaagttgaaaaccgttcactggagctggtgatgaacaggaattggatccaagctaccttcaccctaaattcagctagtcctcaaggtccaaatggtcaacacgatctccttgcttacgaaggagaggatgataaggtagttactgacacatctaagaagaaaagcagcggtgaagaaatcgatctttctgaagatttttgcaacatgtttgggacatcacacagccttgatgaggtacaaatcattggggtgaaagcaaaaggccacgacttcaaaataagaatgctcaggaaggaataccagcacacctgcagatcaactggcttaatgctctgggaatctgctcaattcatgtgctgtcttttagcagagaacccttcgatcgttgcaagcaaaagggtcctggagttgggctgtggctcagctggcatctgctcgatggttgctgcaagtttcactccctttgttttagctacagatggggatgaagaatcactggacctccttagacaaaatatctcctcgaacatggagcctaatttgctgagcagaatcatggttaggaagttattctggggcaacgaagatgatatgaaggcagtccgagagcttcatggtaacggcgtgggttttgattgcataataggcaccgacgtgacatacaatcctgatgctatactccctctcttcaagactgctaggggagtgatttctgagaaagctaacgaggactcggtacctgctctcattctttgctacatccagcgacgagttgatgaggactccatcctttctaatgcaacgtcccagggtttcaggcttgtggacaaatggataaatggagttcacgagagtaacggtaccatcagttcttggttctctggtaatgatgtctgcagtgctttccggcatacagtactttcagtactgtacttcgagctgtgaatgctgctatgcatgtgcaaggttactgtataacctgaaggatttttgtagcagctgtatcaagcaacggcaaaccaactttgaatctttaggccttgtttaatgatttcaattttacgtgaatcggactgtactggaatggattgagatagattttgacttctatggatttaaattgacttagtgccatccaatccatatggattaacggtgaaacgaataagcccttactgtgtttttttatatttgtg

SEQ ID NO: 6407 - DNA, 1942 bp, Zea Mays
ttctcgttctcgtccaatttccggtccaccatcagcagacttgcgtcgtcgcggagggctcgcgtcggggtccatctgaacatccgccagaccgccgccaccatgccgcaacctaccgccgattcgagcaccatggtcgccggcgagcatcagcaacaacagcaacctgccaccgcgcggatctcctcctcctcaaccagctccggaaggctcgtcactccgttctggaaagagaagtatgagagggacgcgaggaggtactgggacatcttctacaggcgccacgaggacaagttcttcaaggatcgacactacctggataaagaatgggggaaatactttaagggacgagatggagaaaagaaggtggttctagaggttggttgtggagctgggaacacaatctatccattgctttctacatacccagatatttttgtccacgcctgcgatttttctccacgagctgtcaatttggtcaagaaacacaaggacttcaaagctgaccggataaatgcatttgtttgtgatattgcatcagaacaactaaccgagaatgtggaaccttcttctgctgacattgtaacgatgttgcaccagataaaatgcctatagttctggagaatgttagaagtgtcttaaaacatggtggccgtgttctttttcgggactatgccttcggtgaccttgcacaggaaagactgatgtcaaagggccaacaaataagtgagaacttctatgtcagaggtgatggtacgcgtgcatattacttttcaaatgaatatctggtagatttattttcaaaatgtggacttactcttgaggagatatgtgtgcacaacaagcaagttgaaaaccgttcactggagctggtgatgaacaggaattggatccaagctaccttcaccctaaattcagctagtcctcaaggtccaaatggtcaacacgatctccttgcttacgaaggagaggatgataaggtacaaatcattggggtgaaagcaaaaggccacgacttcaaaataagaatgctcaggaaggaataccagcacacctgcagatcaactggcttaatgctctgggaatctgctcaattcatgtgctgtcttttagcagagaacccttcgatcgttgcaagcaaaagggtcctggagttgggctgtggctcagctggcatctgctcgatggttgctgcaagtttcactccctttgttttagctacagatggggatgaagaatcactggacctccttagacaaaatatctcctcgaacatggagcctaatttgctgagcagaatcatggttaggaagttattctggggcaacgaagatgatatgaaggcagtccgagagcttcatggtaacggcgtgggttttgattgcataataggcaccgacgtgacatacaatcctgatgctatactccctctcttcaagactgctaggggagtgatttctgagaaagctaacgaggactcggtacctgctctcattctttgctacatccagcgacgagttgatgaggactccatcctttctaatgcaacgtcccagggtttcaggcttgtggacaaatggataaatggagttcacgagagtaacggtaccatcagttcttggttctctggtaatgatgtctgcagtgctttccggcatacagtactttcagtactgtacttcgagctgtgaatgctgctatgcatgtgcaaggttactgtataacctgaaggatttttgtagcagctgtatcaagcaacggcaaaccaactttgaatctttaggccttgtttaatgatttcaattttacgtgaatcggactgtactggaatggattgagatagattttgacttctatggatttaaattgacttagtgccatccaatccatatggattaacggtgaaacgaataagcccttactgtgtttttttatatttgtg

SEQ ID NO: 6408 - DNA, 2225 bp, Zea Mays
tttagccttaactccacgttttttgagcagcgttgttagagttgaaatcttttggcaaaaacatgaagtgggctagtaccaaacataataaaaaaaacacaatcgtatcccatttattttgatgccgttgggccgtgggcctagctagttgggcagcctgacggctggatcctggatggccccgttctcgttctcgtccaatttccggtccaccatcagcagacttgcgtcgtcgcggagggctcgcgtcggggtccatctgaacatccgccagaccgccgccaccatgccgcaacctaccgccgattcgagcaccatggtcgccggcgagcatcagcaacaacagcaacctgccaccgcgcggatctcctcctcctcaaccagctccggaaggctcgtcactccgttctggaaagagaagtatgagagggacgcgaggaggtactgggacatcttctacaggcgccacgaggacaagttcttcaaggatcgacactacctggataaagaatgggggaaatactttaagggacgagatggagaaaagaaggtggttctagaggttggttgtggagctgggaacacaatctatccattgctttctacatacccagatatttttgtccacgcctgcgatttttctccacgagctgtcaatttggtcaagaaacacaaggacttcaaagctgaccggataaatgcatttgtttgtgatattgcatcagaacaactaaccgagaatgtggaaccttcttctgctgacattgtaacgatgttgcaccagataaaatgcctatagttctggagaatgttagaagtgtcttaaaacatggtggccgtgttctttttcgggactatgccttcggtgaccttgcacaggaaagactgatgtcaaagggccaacaaataagtgagaacttctatgtcagaggtgatggtacgcgtgcatattacttttcaaatgaatatctggtagatttattttcaaaatgtggacttactcttgaggagatatgtgtgcacaacaagcaagttgaaaaccgttcactggagctggtgatgaacaggaattggatccaagctaccttcaccctaaattcagctagtcctcaaggtccaaatggtcaacacgatctccttgcttacgaaggagaggatgataaggtagttactgacacatctaagaagaaaagcagcggtgaagaaatcgatctttctgaagatttttgcaacatgtttgggacatcacacagccttgatgaggtacaaatcattggggtgaaagcaaaaggccacgacttcaaaataagaatgctcaggaaggaataccagcacacctgcagatcaactggcttaatgctctgggaatctgctcaattcatgtgctgtcttttagcagagaacccttcgatcgttgcaagcaaaagggtcctggagttgggctgtggctcagctggcatctgctcgatggttgctgcaagtttcactccctttgttttagctacagatggggatgaagaatcactggacctccttagacaaaatatctcctcgaacatggagcctaatttgctgagcagaatcatggttaggaagttattctggggcaacgaagatgatatgaaggcagtccgagagcttcatggtaacggcgtgggttttgattgcataataggcaccgacgtgacatacaatcctgatgctatactccctctcttcaagactgctaggggagtgatttctgagaaagctaacgaggactcggtacctgctctcattctttgctacatccagcgacgagttgatgaggactccatcctttctaatgcaacgtcccagggtttcaggcttgtggacaaatggataaatggagttcacgagagtaacggtaccatcagttcttggttctctggtaatgatgtctgcagtgctttccggcatacagtactttcagtactgtacttcgagctgtgaatgctgctatgcatgtgcaaggttactgtataacctgaaggatttttgtagcagctgtatcaagcaacggcaaaccaactttgaatctttaggccttgtttaatgatttcaattttacgtgaatcggactgtactggaatggattgagatagattttgacttctatggatttaaattgacttagtgccatccaatccatatggattaacggtgaaacgaataagcccttactgtgtttttttatatttgtg

SEQ ID NO: 6409 - DNA, 748 bp, Zea Mays
gtgtgggacctgtcgagctcatgagcgttcctcaccagcgtgtgggcccgggaggtcagggtgcctttcccctttctccgcatgaacgacgccccgaactcaacaaactacgccgaatcctccaggggttgttatgggttcccggccctctccctctagcactaatctaccagccgcaactcccctgcctcctcgtttcgtttcaccagagccaaaatcgagcactagtaccagagcagaggtgagctgagagcagggagcaccgccaacaccgacctattcctcgaccgatgttcggggatccgcggcgagtctgggagcctcgtggagttgcttgtgaggcacctgtagccgagtggggaaggattgaccaccgaggcggctggaattcttcgtcgaacactgtgatccgtcacgcttcatgggttgggcttggcgctacttgaatcacgagaaggtggccccggaggaagacaaatacgaggagttcgacgaggtctaggtgtcgtctcccaatcagtttgttggcgccatgggacaataatgttattagttcattttaattattatcatttatcttgtaagacatttcattatgtaataatgattgtgacattcgtctctatacactgagtcatcatatgtgttgatctcgtttggcgcacatatgagacgcacccgggtttgccccttatatccgattgtgacattgagagaaaacttttcataaagaaatctttaaacatag

SEQ ID NO: 6410 - DNA, 2152 bp, Zea Mays
gtgtgggacctgtcgagctcatgagcgttcctcaccagcgtgtgggcccgggaggtcagggtgcctttcccctttctccgcatgaacgacgccccgaactcaacaaactacgccgaatcctccaggggttgttatgggttcccggccctctccctctagcactaatctaccagccgcaactcccctgcctcctcgtttcgtttcaccagagccaaaatcgagcactagtaccagagcagaggtgagctgagagcagggagcaccgccaacaccgacctattcctcgaccgatgttcggggatccgcggcgagtctgggagcctcgtggagttgcttgtgaggcacctgtagccgagtggggaaggattgaccaccgaggcggctggaattcttcgtcgaacactgtgatccgtcacgcttcatgggttgggcttggcgctacttgaatcacggtgagtaacccccttgacgatatcctatcattaccgctgctcgttactaccttcggaatgaagtttaagcacaggaatcgggtcctaggaaaacttcggccatggcgccgccgtaggggcctaggcgttgtcgggtttcggtgtccaggggatggaagggaacatggtctttggattcgtggccaacggtatgtattagatcgaggataacagtttagtaggatcgatcggtggtcatctgttttgtgatcgacggtccggattagatcgtgtgttcattaaatctgggcccggatcgctgatccaacggctcacactgcgtgccggtttacaacgttataagatctaatcccgtccgctgtgatccgaccagacggctcccatgcgcctgtaccccttcggtgcgggcaaagttgtaaaagagaccttggggaattagctaatcaacccgccatcctcggccattatgagataatctgaaatttacatagtagatcttgaacttatttaaagtagtggccgaagtccattgatctctatttattgataaaattaattcaaaatgattttaatatagaaataattccatagtcttgtgtaattcataattaatttattttaactcgtttttacccgtttgagttgcattaggttcgtattaatattatctacaacctagtaaccttaatttgatatgtagcatgttgttgaaatcgagaacttgattgttttagcctatgtttaacttatccaaacacatagaacttcggaaactcatatctcattcattataactccgattttagccattctcgaatccacgatctcgtagcaacgtgtagattattataatgcagtttatgcttatgtttgttgtgatccatatacaactttcagtccggaaaccatagcgggttctctcctgtagtggaactttgtaaaggcctcacaatgtaccctcgcctacttactttggcagtgtttaagggtttgatcaacccgaggcggcaaagggaaaacgtcttgtgggtaaagatgtgcaacctctgcaaagtgtaaaactggtatatcagtcgtgctcgcggacaagagcgactcaggactctcgcgtgattaacttataaaattaaacttaatgtgtcatatgtattacattgtggttttgttactaattttgatctattactttattgggatggtattaacttatacttagtaactgctaacaaaatttgaccaacttattaaaagtaatgttttaccttaaccattatttgttgatcagcctgacactatacatgagcccccaccgtaagtgagctcatgcacattattcccacacttgttgagcaatgaacttttgtgtgctcactcttgcgataaaactttcccccacatgtgaagagaaggtggccccggaggaagacaaatacgaggagttcgacgaggtctaggtgtcgtctcccaatcagtttgttggcgccatgggacaataatgttattagttcattttaattattatcatttatcttgtaagacatttcattatgtaataatgattgtgacattcgtctctatacactgagtcatcatatgtgttgatctcgtttggcgcacatatgagacgcacccgggtttgccccttatatccgattgtgacattgagagaaaacttttcataaagaaatctttaaacatag

SEQ ID NO: 6411 - DNA, 1173 bp, Zea Mays
gtgtgggacctgtcgagctcatgagcgttcctcaccagcgtgtgggcccgggaggtcagggtgcctttcccctttctccgcatgaacgacgccccgaactcaacaaactacgccgaatcctccaggggttgttatgggttcccggccctctccctctagcactaatctaccagccgcaactcccctgcctcctcgtttcgtttcaccagagccaaaatcgagcactagtaccagagcagaggtgagctgagagcagggagcaccgccaacaccgacctattcctcgaccgatgttcggggatccgcggcgagtctgggagcctcgtggagttgcttgtgaggcacctgtagccgagtggggaaggattgaccaccgaggcggctggaattcttcgtcgaacactgtgatccgtcacgcttcatgggttgggcttggcgctacttgaatcacgtgtttaagggtttgatcaacccgaggcggcaaagggaaaacgtcttgtgggtaaagatgtgcaacctctgcaaagtgtaaaactggtatatcagtcgtgctcgcggacaagagcgactcaggactctcgcgtgattaacttataaaattaaacttaatgtgtcatatgtattacattgtggttttgttactaattttgatctattactttattgggatggtattaacttatacttagtaactgctaacaaaatttgaccaacttattaaaagtaatgttttaccttaaccattatttgttgatcagcctgacactatacatgagcccccaccgtaagtgagctcatgcacattattcccacacttgttgagcaatgaacttttgtgtgctcactcttgcgataaaactttcccccacatgtgaagagaaggtggccccggaggaagacaaatacgaggagttcgacgaggtctaggtgtcgtctcccaatcagtttgttggcgccatgggacaataatgttattagttcattttaattattatcatttatcttgtaagacatttcattatgtaataatgattgtgacattcgtctctatacactgagtcatcatatgtgttgatctcgtttggcgcacatatgagacgcacccgggtttgccccttatatccgattgtgacattgagagaaaacttttcataaagaaatctttaaacatag

SEQ ID NO: 6412 - DNA, 817 bp, Zea Mays
ctctcgcgcggggttgcgactggcctgtggccccctatcagccgctctcactacgcttgttgactttctctaacgtgtgggacctgtcgagctcatgagcgttcctcaccagcgtgtgggcccgggaggtcagggtgcctttcccctttctccgcatgaacgacgccccgaactcaacaaactacgccgaatcctccaggggttgttatgggttcccggccctctccctctagcactaatctaccagccgcaactcccctgcctcctcgtttcgtttcaccagagccaaaatcgagcactagtaccagagcagaggtgagctgagagcagggagcaccgccaacaccgacctattcctcgaccgatgttcggggatccgcggcgagtctgggagcctcgtggagttgcttgtgaggcacctgtagccgagtggggaaggattgaccaccgaggcggctggaattcttcgtcgaacactgtgatccgtcacgcttcatgggttgggcttggcgctacttgaatcacggtggccccggaggaagacaaatacgaggagttcgacgaggtctaggtgtcgtctcccaatcagtttgttggcgccatgggacaataatgttattagttcattttaattattatcatttatcttgtaagacatttcattatgtaataatgattgtgacattcgtctctatacactgagtcatcatatgtgttgatctcgtttggcgcacatatgagacgcacccgggtttgccccttatatccgattgtgacattgagagaaaacttttcataaagaaatctttaaacatag

SEQ ID NO: 6413 - DNA, 2761 bp, Zea Mays
ctggcttcctgagggagccaggagttggaatcaatctctcttgcccgtgcagcctaggtcagccacagcactggggcgccgcccccatctccctcgcgtagatgttcctccttataggctaagggagatccctggtaggatccgcaatcctaccaatttggtaccagagaccttcgatcctccggccaccatgagttcttcgtcgcaatccccaccggcctccatggctaccgtgcctccagccaccacgccgcacaccgtgccaccctccaccgccgccacgctcgacctgacctccacgctgggccttcccaccgccggatcgtcatacaatctgcccacgatgacgaaatcacagcggccatcctccacttctccacgaacttggcagcgctgcaagctgatctatccgagatcaagctccacctggcgggcacccagccgcaacccacactatcgtcgccgtctgtggccagcgcgacaatggcggcttcaccgcagaacggcgccatccgtaccgctccatcagctgcagttcccgcgctcgccgtcggagatcccagcatgggcgtggggacctgaaccggtcttttcgacgccgccgccgatcaccaccgtcgcgccactaggcgtcctgtacggggggggggggggtggatgggactctcttttctccccccaccacgacgcctcatccaagcaaccccgggcgcacgacaggcctgtcacggatccaatcccaccaaaattctacaagctggagttcaccacgtatgacggcaccaaggaccccttgaattggctcaatcactgtgagcagttcttcggtggacagaggacgtcggccatagatcgcacgtggcttgcgttctatcatcttcggggcgcggctcggacatggtactacaccatggagcaggataccgggatgccgacatgggagcgcttcaaagagctatgccacctacagtttgggcctcccgtccgggattcgcgcctcgcggagctcggtcgactacagttccgcacgacggtacaggagttcacggagtggttcaacgccgccctctgccacgcgcgcaacctcgacgcaattcagaaggcggagctgttcgtggggggcttaccagaacacatccacgtcgatgtggcgttgcgcgcaccccatgatcttcatacgatggtctacttggcccgcgccttcgagctacgcgccaacaacctcatggtgcagtttccgacaggcccccagcgcgtggcgcggcagcagcagcgggtcacccaggccccgaccgcgtcgagcggcgctccacggtcggccgcgactgcgctgccgccgatccgacaattttgtcgcctcacgccggcggagcagcaggaacatcgtcaccaaggcccgtgcttcaactgcgatgagccctacgttagaggccaccagtgcaaacgactcttctacttggagtcgagtgacttcgacatggaggaggacggcgcggtggacgctgcaccgaacgataagctagatgacgacttgccgccacaggacgtcactgtggccactgcgtgcgtggtctctctccatgcattcgcgggcatccgtacgaagaacacgatgatcatgcctgtggtgctcaagggcgcgcgcatcctggctctcgacaccggctccactcataattttctacagggtgtcgcgatgacccgactcggcctcaccccgctcgacggcgatcagctacgggtcaccgtggccaatggtgatcaccttcggtgcgctgggattgcacgccacgtgcccatctccatcgcaggcgacgagtgcaccatcacctgcgtcggcatcgacttgggctgcttcgacttcatcctcggcgtcgacttccttcgcaccctcggcgacatcacgtggaacctggagactatgacgctagccttccagcgcgatgctcgccgcatcgtgtggaacggggtccagggcaaggaggcgacgtgtacgacgccaccacggcggccgtggcagtggccgagccgcatcagccactgctagaccgactacttcagcaacacaacgcaatcttcgaggaaccacacggtcttccacccgcgcgaccgtacgaccaccgcatccacctactgcccggcacgacacctgtagtcgtgcgcccgtgccgctactcccagctccagaaggacgaactggagcgctagtgcacgtcgatgctggcacagggcatcatccaccctagcatgtccccgttctccgcaccggtgctactggttcgcaaggcggacaagacgtggtgcttctgcatcgactacaggtccctgaacgctaagacgtcgaaggacaaattcccgatcccggtggttgacgagctcctcgacgagctacatggtgcccacttcttcaccaagctcgacctcgactcagggtacaaccaggtaatgatctggaaccaagaagtttaacaactgcaaacatatgagggactccaaaaaagtcacggtacagcccagcaagaccctggtatgccatggtcaaatcctacaaagaagatgagcatggaatagcacaaattgaagtatagcgttgttggtatgtacaaattgtaaagcacagcaaatggaaggtatagtttagtccaagatgcatgctataatactttgtgaattcccattgacagaaaggctatcaatgtaattgtaagagagatgatgctacatatatataggcacggataaccgagggtttatagaaaca

SEQ ID NO: 6414 - DNA, 2996 bp, Zea Mays
atggaggtcggcggcgacctgcagtccctcctagaggcgatcaaatcctccgaggtgcttgaagatagaattgggctcatcaaccgactcgagagttcctttgagtattctgcggatgatctgagaccagtacttgacagtcttaatgtgtatgaccttaacggcaattttaggtatcttgggatgattctggatgttcaggttgctctaaaatgttcatatatagaaacaactggttgtctaggccaatttcttgcacttggtgcaaaggcgagctcatggtgtcgaaagcatatcgtatgttccatcgaatctgttgatgattctgaagatgtccaacaggaagaacactccaaaatactcccagagataattttgatggccttaaatatatcaatcaagattcttccttctgcggcaaaatgtgttactgtagatatggtgcataatattggtgattttatctcagagttgctaagtcttatggaaagctcaatagttgacaatgacaagaaaattcatggagctgctctggatatcactaaggctgcacctgtttttctagatgaaacaactaagctgtgccgggcatactctgaggccacaaaagtagacaactgcacaatgagtataactgatgaagatgctactgtgaaacacaacaaacaaggtcttgctagtgatgtcatcaggattacatcatccactattcagactatgtgtagattgggaacctatgcagcatccagtggtggaagccaggtgattttactgaatgtatcatggaagggtgtagtctcattactccaaagcggtaaagggatgattgaaggaaaagtaaatgtcagagaaataattgtaacccttctatctctgtccatagaatctctaagagttgctgctgaaacatggtgtgcaccgttactagaaacccttggtgctactgaagccagaagggcgttcctaccaatcaagtttttcttaataaatgctgtaaggatttgttcaacatatccatctgaagcaatgattatatacaagaacataatcaattgtgcagtagtgatcacatcctcaagcattctatttagcaagaagccacagttgaaggcagcaaatgagacccttgttgaattgttggagcctactttatttgttttactagatacacttatgaaatcatctgacttaacaccagaatccaaatgccagcttgcacatcatttttttgaaaacgaagaagataagagtccagatcttatgggacaagctaatcagagagagataaatttggcctcactggattgcattttctctatggattcagatgtggatcatagaaatagagcacttttacctgctgagttgcttgtgtttttgcactttctcaatgcttcatcatggttgacagaaatggtggtcatcacattatctaaaaagctacagactcttcttaatatattgacatcagaagacatctactcctatgtccttggcttccaaatccctgccttaaatggcgcagaccagtctcctgcagttgtttggcaacctgtgtatacttctatcatacaagcattgaaggcttttatgatttctactgttgcttcaagtgctgcttggaacgagttagaggctttcttacttgaaaatattttccatccccatttcctttgcttggaaattattacagagctgtggtgtttcttcattcgttatgctgaaactgagacttcaattaatctagttaatcaagtctcccttctactaaagactgttgcatcaccagaggatgttctttcacctctcagtgctttgcggaaagttgcacgatcattgtgcatcatcttgagctatgcatcttctgcaactgttgatcaaatatatacttgtgtgctgaatggtgaaaactcttccaagtcttcaatcttacacttagcattgctgatggaaggatttcctttggattcattgtctgatggtacaaaggaacttgctatgaagaaaatgtttacctcttttgctggctatctggagagctactccaagaaccaccgagtaatcaatgtgccaacttgtaaattgggtgttgtaggacttcctatacatgctctagcctctgcattgcagcataggaacggcactgggcgctcattcacctcgcaatggattcctttggctacttcgccgcccgcacatcctttacgcagctctggagatttgttcccagagatgctgccctttcgtacaatgcaagcacagggacgagcatagatgaaaacggattcatgctggagttgagggcttatcttcagaaagaggtcgccttgcacaccgataaatggtctgaagagcagattcggctcctggtttctgaggggagagcgctgaagaagctggttgaagcttgttgtgaaattccggttgttgctgagcctgagaaggcgccggttgcgaaggatgccagcacgaagaagaggaagatgccagatgggatctgtgaaggcatggcgatgctgcagaacggtctcaaggtcatgcgaggcgcctttggtgaaggggacttcgctgatctgaaggataggtttgctgcacacttgtctcgcctcgaggatgcagtttcccagtttgctagtttatccgacgaaatttgatatagtgcactgtatgtcgcgctgttacctttaactgcaaaagagcattcattctagtacagttcacgatcatagcacagctgatctctctcgtggcaagcaagctccagagtcatcgggttgacagatcgttcaacatggccagcacaacttcaaggtttgcaggtcatctccgcgccggcgcttgcgtggcgacggcccttgtggcttgttggcttgtggggcgaaaatgcaagaaaatggatgtgaattatcttttgtataataaccacacgacatcatgtactgctttaatttaacaattggtagtacaccctgcagacgaggcgaatacaatttttg

SEQ ID NO: 6415 - DNA, 2843 bp, Zea Mays
gagcaatggaggtcggcggcgacctgcagtccctcctagaggcgatcaaatcctccgaggtgcttgaagatagaattgggctcatcaaccgactcgagagttcctttgagtattctgcggatgatctgagaccagtacttgacagtcttaatgtatcttgggatgattctggatgttcaggttgctctaaaatgttcatatatagaaacaactggttgtctaggccaatttcttgcacttggtgcaaagattcttccttctgcggcaaaatgtgttactgtagatatggtgcataatattggtgattttatctcagagttgctaagtcttatggaaagctcaatagttgacaatgacaagaaaattcatggagctgctctggatatcactaaggctgcacctgtttttctagatgaaacaactaagctgtgccgggcatactctgaggccacaaaagtagacaactgcacaatgagtataactgatgaagatgctactgtgaaacacaacaaacaaggtcttgctagtgatgtcatcaggattacatcatccactattcagactatgtgtagattgggaacctatgcagcatccagtggtggaagccaggtgattttactgaatgtatcatggaagggtgtagtctcattactccaaagcggtaaagggatgattgaaggaaaagtaaatgtcagagaaataattgtaacccttctatctctgtccatagaatctctaagagttgctgctgaaacatggtgtgcaccgttactagaaacccttggtgctactgaagccagaagggcgttcctaccaatcaagtttttcttaataaatgctgtaaggatttgttcaacatatccatctgaagcaatgattatatacaagaacataatcaattgtgcagtagtgatcacatcctcaagcattctatttagcaagaagccacagttgaaggcagcaaatgagacccttgttgaattgttggagcctactttatttgttttactagatacacttatgaaatcatctgacttaacaccagaatccaaatgccagcttgcacatcatttttttgaaaacgaagaagataagagtccagatcttatgggacaagctaatcagagagagataaatttggcctcactggattgcattttctctatggattcagatgtggatcatagaaatagagcacttttacctgctgagttgcttgtgtttttgcactttctcaatgcttcatcatggttgacagaaatggtggtcatcacattatctaaaaagctacagactcttcttaatatattgacatcagaagacatctactcctatgtccttggcttccaaatccctgccttaaatggcgcagaccagtctcctgcagttgtttggcaacctgtgtatacttctatcatacaagcattgaaggcttttatgatttctactgttgcttcaagtgctgcttggaacgagttagaggctttcttacttgaaaatattttccatccccatttcctttgcttggaaattattacagagctgtggtgtttcttcattcgttatgctgaaactgagacttcaattaatctagttaatcaagtctcccttctactaaagactgttgcatcaccagaggatgttctttcacctctcagtgctttgcggaaagttgcacgatcattgtgcatcatcttgagctatgcatcttctgcaactgttgatcaaatatatacttgtgtgctgaatggtgaaaactcttccaagtcttcaatcttacacttagcattgctgatggaaggatttcctttggattcattgtctgatggtacaaaggaacttgctatgaagaaaatgtttacctcttttgctggctatctggagagctactccaagaaccaccgagtaatcaatgtgccaacttgtaaattgggtgttgtaggacttcctatacatgctctagcctctgcattgcagcataggaacggcactgggcgctcattcacctcgcaatggattcctttggctacttcgccgcccgcacatcctttacgcagctctggagatttgttcccagagatgctgccctttcgtacaatgcaagcacagggacgagcatagatgaaaacggattcatgctggagttgagggcttatcttcagaaagaggtcgccttgcacaccgataaatggtctgaagagcagattcggctcctggtttctgaggggagagcgctgaagaagctggttgaagcttgttgtgaaattccggttgttgctgagcctgagaaggcgccggttgcgaaggatgccagcacgaagaagaggaagatgccagatgggatctgtgaaggcatggcgatgctgcagaacggtctcaaggtcatgcgaggcgcctttggtgaaggggacttcgctgatctgaaggataggtttgctgcacacttgtctcgcctcgaggatgcagtttcccagtttgctagtttatccgacgaaatttgatatagtgcactgtatgtcgcgctgttacctttaactgcaaaagagcattcattctagtacagttcacgatcatagcacagctgatctctctcgtggcaagcaagctccagagtcatcgggttgacagatcgttcaacatggccagcacaacttcaaggtttgcaggtcatctccgcgccggcgcttgcgtggcgacggcccttgtggcttgttggcttgtggggcgaaaatgcaagaaaatggatgtgaattatcttttgtataataaccacacgacatcatgtactgctttaatttaacaattggtagtacaccctgcagacgaggcgaatacaatttttg

SEQ ID NO: 6416 - DNA, 3518 bp, Zea Mays
agcaccagcaccagcaccagcaccgtgccgcccctgggccggccagccgccagcgcgacatcgagcgagcaatggaggtcggcggcgacctgcagtccctcctagaggcgatcaaatcctccgaggtgcttgaagatagaattgggctcatcaaccgactcgagagttcctttgagtattctgcggatgatctgagaccagtacttgacagtcttaatgtgtatgaccttaacggcaattttaggtatcttgggatgattctggatgttcaggttgctctaaaatgttcatatatagaaacaactggttgtctaggccaatttcttgcacttggtgcaaaggcgagctcatggtgtcgaaagcatatcgtatgttccatcgaatctgttgatgattctgaagatgtccaacaggaagaacactccaaaatactcccagagataattttgatggccttaaatatatcaatcaagattcttccttctgcggcaaaatgtgttactgtagatatggtgcataatattggtgattttatctcagagttgctaagtcttatggaaagctcaatagttgacaatgacaagaaaattcatggagctgctctggatatcactaaggctgcacctgtttttctagatgaaacaactaagctgtgccgggcatactctgaggccacaaaagtagacaactgcacaatgagtataactgatgaagatgctactgtgaaacacaacaaacaaggtcttgctagtgatgtcatcaggattacatcatccactattcagactatgtgtagattgggaacctatgcagcatccagtggtggaagccaggtgattttactgaatgtatcatggaagggtgtagtctcattactccaaagcggtaaagggatgattgaaggaaaagtaaatgtcagagaaataattgtaacccttctatctctgtccatagaatctctaagagttgctgctgaaacatggtgtgcaccgttactagaaacccttggtgctactgaagccagaagggcgttcctaccaatcaagtttttcttaataaatgctgtaaggatttgttcaacatatccatctgaagcaatgattatatacaagaacataatcaattgtgcagtagtgatcacatcctcaagcattctatttagcaagaagccacagttgaaggcagcaaatgagacccttgttgaattgttggagcctactttatttgttttactagatacacttatgaaatcatctgacttaacaccagaatccaaatgccagcttgcacatcatttttttgaaaacgaagaagataagagtccagatcttatgggacaagctaatcagagagagataaatttggcctcactggattgcattttctctatggattcagatgtggatcatagaaatagagcacttttacctgctgagttgcttgtgtttttgcactttctcaatgcttcatcatggttgacagaaatggtggtcatcacattatctaaaaagctacagactcttcttaatatattgacatcagaagacatctactcctatgtccttggcttccaaatccctgccttaaatggcgcagaccagtctcctgcagttgtttggcaacctgtgtatacttctatcatacaagcattgaaggcttttatgatttctactgttgcttcaagtgctgcttggaacgagttagaggctttcttacttgaaaatattttccatccccatttcctttgcttggaaattattacagagctgtggtgtttcttcattcgttatgctgaaactgagacttcaattaatctagttaatcaagtctcccttctactaaagactgttgcatcaccagaggatgttctttcacctctcagtgctttgcggaaagttgcacgatcattgtgcatcatcttgagctatgcatcttctgcaactgttgatcaaatatatacttgtgtgctgaatggtgaaaactcttccaagtcttcaatcttacacttagcattgctgatggaaggatttcctttggattcattgtctgatggtacaaaggaacttgctatgaagaaaatgtttacctcttttgctggctatctggagagctactccaagaaccaccgagtaatcaatgtgccaacttgtaaattgggtgttgtaggacttcctatacatgctctagcctctgcattgcagcataggtaagtctgttctctaattaccagtattgttcactctgatgatgatgatggctgtcttatacacagtactttttttggcagtgtaataaatgttgatagtattgtagatgagaatagcatcactgctatgtttaagttcaccatctctctcataaagatgtttagaattgcgccagatagtagtaaggataaccttgccaagcacattagttccatgttggttattatctcaaacacgaggcatctttgtgcattcagtgagatggagaagttgactctgcagttgcgcacgctgttcgtttccacttctgataaatcaaatgctgtgctgtctcagtgcaaaccgtcaatggcttcctttatgtcaactctcggtcacttgaacgttaccgaagacgatgctaacgaactttgttctgcaatatgggatctgtatcatctcctgctgaaggaacggcactgggcgctcattcacctcgcaatggattcctttggctacttcgccgcccgcacatcctttacgcagctctggagatttgttcccagagatgctgccctttcgtacaatgcaagcacagggacgagcatagatgaaaacggattcatgctggagttgagggcttatcttcagaaagaggtcgccttgcacaccgataaatggtctgaagagcagattcggctcctggtttctgaggggagagcgctgaagaagctggttgaagcttgttgtgaaattccggttgttgctgagcctgagaaggcgccggttgcgaaggatgccagcacgaagaagaggaagatgccagatgggatctgtgaaggcatggcgatgctgcagaacggtctcaaggtcatgcgaggcgcctttggtgaaggggacttcgctgatctgaaggataggtttgctgcacacttgtctcgcctcgaggatgcagtttcccagtttgctagtttatccgacgaaatttgatatagtgcactgtatgtcgcgctgttacctttaactgcaaaagagcattcattctagtacagttcacgatcatagcacagctgatctctctcgtggcaagcaagctccagagtcatcgggttgacagatcgttcaacatggccagcacaacttcaaggtttgcaggtcatctccgcgccggcgcttgcgtggcgacggcccttgtggcttgttggcttgtggggcgaaaatgcaagaaaatggatgtgaattatcttttgtataataaccacacgacatcatgtactgctttaatttaacaattggtagtacaccctgcagacgaggcgaatacaatttttg

SEQ ID NO: 6417 - DNA, 3546 bp, Zea Mays
aaacccagcaggccagcaccagcaccagcaccagcaccgtgccgcccctgggccggccagccgccagcgcgacatcgagcgagcaatggaggtcggcggcgacctgcagtccctcctagaggcgatcaaatcctccgaggtgcttgaagatagaattgggctcatcaaccgactcgagagttcctttgagtattctgcggatgatctgagaccagtacttgacagtcttaatgtgtatgaccttaacggcaattttaggtatcttgggatgattctggatgttcaggttgctctaaaatgttcatatatagaaacaactggttgtctaggccaatttcttgcacttggtgcaaaggcgagctcatggtgtcgaaagcatatcgtatgttccatcgaatctgttgatgattctgaagatgtccaacaggaagaacactccaaaatactcccagagttctttggttctagataattttgatggccttaaatatatcaatcaagattcttccttctgcggcaaaatgtgttactgtagatatggtgcataatattggtgattttatctcagagttgctaagtcttatggaaagctcaatagttgacaatgacaagaaaattcatggagctgctctggatatcactaaggctgcacctgtttttctagatgaaacaactaagctgtgccgggcatactctgaggccacaaaagtagacaactgcacaatgagtataactgatgaagatgctactgtgaaacacaacaaacaaggtcttgctagtgatgtcatcaggattacatcatccactattcagactatgtgtagattgggaacctatgcagcatccagtggtggaagccaggtgattttactgaatgtatcatggaagggtgtagtctcattactccaaagcggtaaagggatgattgaaggaaaagtaaatgtcagagaaataattgtaacccttctatctctgtccatagaatctctaagagttgctgctgaaacatggtgtgcaccgttactagaaacccttggtgctactgaagccagaagggcgttcctaccaatcaagtttttcttaataaatgctgtaaggatttgttcaacatatccatctgaagcaatgattatatacaagaacataatcaattgtgcagtagtgatcacatcctcaagcattctatttagcaagaagccacagttgaaggcagcaaatgagacccttgttgaattgttggagcctactttatttgttttactagatacacttatgaaatcatctgacttaacaccagaatccaaatgccagcttgcacatcatttttttgaaaacgaagaagataagagtccagatcttatgggacaagctaatcagagagagataaatttggcctcactggattgcattttctctatggattcagatgtggatcatagaaatagagcacttttacctgctgagttgcttgtgtttttgcactttctcaatgcttcatcatggttgacagaaatggtggtcatcacattatctaaaaagctacagactcttcttaatatattgacatcagaagacatctactcctatgtccttggcttccaaatccctgccttaaatggcgcagaccagtctcctgcagttgtttggcaacctgtgtatacttctatcatacaagcattgaaggcttttatgatttctactgttgcttcaagtgctgcttggaacgagttagaggctttcttacttgaaaatattttccatccccatttcctttgcttggaaattattacagagctgtggtgtttcttcattcgttatgctgaaactgagacttcaattaatctagttaatcaagtctcccttctactaaagactgttgcatcaccagaggatgttctttcacctctcagtgctttgcggaaagttgcacgatcattgtgcatcatcttgagctatgcatcttctgcaactgttgatcaaatatatacttgtgtgctgaatggtgaaaactcttccaagtcttcaatcttacacttagcattgctgatggaaggatttcctttggattcattgtctgatggtacaaaggaacttgctatgaagaaaatgtttacctcttttgctggctatctggagagctactccaagaaccaccgagtaatcaatgtgccaacttgtaaattgggtgttgtaggacttcctatacatgctctagcctctgcattgcagcataggtaagtctgttctctaattaccagtattgttcactctgatgatgatgatggctgtcttatacacagtactttttttggcagtgtaataaatgttgatagtattgtagatgagaatagcatcactgctatgtttaagttcaccatctctctcataaagatgtttagaattgcgccagatagtagtaaggataaccttgccaagcacattagttccatgttggttattatctcaaacacgaggcatctttgtgcattcagtgagatggagaagttgactctgcagttgcgcacgctgttcgtttccacttctgataaatcaaatgctgtgctgtctcagtgcaaaccgtcaatggcttcctttatgtcaactctcggtcacttgaacgttaccgaagacgatgctaacgaactttgttctgcaatatgggatctgtatcatctcctgctgaaggaacggcactgggcgctcattcacctcgcaatggattcctttggctacttcgccgcccgcacatcctttacgcagctctggagatttgttcccagagatgctgccctttcgtacaatgcaagcacagggacgagcatagatgaaaacggattcatgctggagttgagggcttatcttcagaaagaggtcgccttgcacaccgataaatggtctgaagagcagattcggctcctggtttctgaggggagagcgctgaagaagctggttgaagcttgttgtgaaattccggttgttgctgagcctgagaaggcgccggttgcgaaggatgccagcacgaagaagaggaagatgccagatgggatctgtgaaggcatggcgatgctgcagaacggtctcaaggtcatgcgaggcgcctttggtgaaggggacttcgctgatctgaaggataggtttgctgcacacttgtctcgcctcgaggatgcagtttcccagtttgctagtttatccgacgaaatttgatatagtgcactgtatgtcgcgctgttacctttaactgcaaaagagcattcattctagtacagttcacgatcatagcacagctgatctctctcgtggcaagcaagctccagagtcatcgggttgacagatcgttcaacatggccagcacaacttcaaggtttgcaggtcatctccgcgccggcgcttgcgtggcgacggcccttgtggcttgttggcttgtggggcgaaaatgcaagaaaatggatgtgaattatcttttgtataataaccacacgacatcatgtactgctttaatttaacaattggtagtacaccctgcagacgaggcgaatacaatttttg

SEQ ID NO: 6418 - DNA, 3492 bp, Zea Mays
aaacccagcaggccagcaccagcaccagcaccagcaccgtgccgcccctgggccggccagccgccagcgcgacatcgagcgagcaatggaggtcggcggcgacctgcagtccctcctagaggcgatcaaatcctccgaggtgcttgaagatagaattgggctcatcaaccgactcgagagttcctttgagtattctgcggatgatctgagaccagtacttgacagtcttaatgtatcttgggatgattctggatgttcaggtctgtcgcactgcatgctacacaagtcaattttgcaggttgctctaaaatgttcatatatagaaacaactggttgtctaggccaatttcttgcacttggtgcaaaggcgagctcatggtgtcgaaagcatatcgtatgttccatcgaatctgttgatgattctgaagatgtccaacaggaagaacactccaaaatactcccagagttctttggttctagataattttgatggccttaaatatatcaatcaagattcttccttctgcggcaaaatgtgttactgtagatatggtgcataatattggtgattttatctcagagttgctaagtcttatggaaagctcaatagttgacaatgacaagaaaattcatggagctgctctggatatcactaaggctgcacctgtttttctagatgaaacaactaagctgtgccgggcatactctgaggccacaaaagtagacaactgcacaatgagtataactgatgaagatgctactgtgaaacacaacaaacaaggtcttgctagtgatgtcatcaggattacatcatccactattcagactatgtgtagattgggaacctatgcagcatccagtggtggaagccaggtgattttactgaatgtatcatggaagggtgtagtctcattactccaaagcggtaaagggatgattgaaggaaaagtaaatgtcagagaaataattgtaacccttctatctctgtccatagaatctctaagagttgctgctgaaacatggtgtgcaccgttactagaaacccttggtgctactgaagccagaagggcgttcctaccaatcaagtttttcttaataaatgctgtaaggatttgttcaacatatccatctgaagcaatgattatatacaagaacataatcaattgtgcagtagtgatcacatcctcaagcattctatttagcaagaagccacagttgaaggcagcaaatgagacccttgttgaattgttggagcctactttatttgttttactagatacacttatgaaatcatctgacttaacaccagaatccaaatgccagcttgcacatcatttttttgaaaacgaagaagataagagtccagatcttatgggacaagctaatcagagagagataaatttggcctcactggattgcattttctctatggattcagatgtggatcatagaaatagagcacttttacctgctgagttgcttgtgtttttgcactttctcaatgcttcatcatggttgacagaaatggtggtcatcacattatctaaaaagctacagactcttcttaatatattgacatcagaagacatctactcctatgtccttggcttccaaatccctgccttaaatggcgcagaccagtctcctgcagttgtttggcaacctgtgtatacttctatcatacaagcattgaaggcttttatgatttctactgttgcttcaagtgctgcttggaacgagttagaggctttcttacttgaaaatattttccatccccatttcctttgcttggaaattattacagagctgtggtgtttcttcattcgttatgctgaaactgagacttcaattaatctagttaatcaagtctcccttctactaaagactgttgcatcaccagaggatgttctttcacctctcagtgctttgcggaaagttgcacgatcattgtgcatcatcttgagctatgcatcttctgcaactgttgatcaaatatatacttgtgtgctgaatggtgaaaactcttccaagtcttcaatcttacacttagcattgctgatggaaggatttcctttggattcattgtctgatggtacaaaggaacttgctatgaagaaaatgtttacctcttttgctggctatctggagagctactccaagaaccaccgagtaatcaatgtgccaacttgtaaattgggtgttgtaggacttcctatacatgctctagcctctgcattgcagcatagtactttttttggcagtgtaataaatgttgatagtattgtagatgagaatagcatcactgctatgtttaagttcaccatctctctcataaagatgtttagaattgcgccagatagtagtaaggataaccttgccaagcacattagttccatgttggttattatctcaaacacgaggcatctttgtgcattcagtgagatggagaagttgactctgcagttgcgcacgctgttcgtttccacttctgataaatcaaatgctgtgctgtctcagtgcaaaccgtcaatggcttcctttatgtcaactctcggtcacttgaacgttaccgaagacgatgctaacgaactttgttctgcaatatgggatctgtatcatctcctgctgaaggaacggcactgggcgctcattcacctcgcaatggattcctttggctacttcgccgcccgcacatcctttacgcagctctggagatttgttcccagagatgctgccctttcgtacaatgcaagcacagggacgagcatagatgaaaacggattcatgctggagttgagggcttatcttcagaaagaggtcgccttgcacaccgataaatggtctgaagagcagattcggctcctggtttctgaggggagagcgctgaagaagctggttgaagcttgttgtgaaattccggttgttgctgagcctgagaaggcgccggttgcgaaggatgccagcacgaagaagaggaagatgccagatgggatctgtgaaggcatggcgatgctgcagaacggtctcaaggtcatgcgaggcgcctttggtgaaggggacttcgctgatctgaaggataggtttgctgcacacttgtctcgcctcgaggatgcagtttcccagtttgctagtttatccgacgaaatttgatatagtgcactgtatgtcgcgctgttacctttaactgcaaaagagcattcattctagtacagttcacgatcatagcacagctgatctctctcgtggcaagcaagctccagagtcatcgggttgacagatcgttcaacatggccagcacaacttcaaggtttgcaggtcatctccgcgccggcgcttgcgtggcgacggcccttgtggcttgttggcttgtggggcgaaaatgcaagaaaatggatgtgaattatcttttgtataataaccacacgacatcatgtactgctttaatttaacaattggtagtacaccctgcagacgaggcgaatacaatttttg

SEQ ID NO: 6419 - DNA, 3378 bp, Zea Mays
ggcaaaacccagcaggccagcaccagcaccagcaccagcaccgtgccgcccctgggccggccagccgccagcgcgacatcgagcgagcaatggaggtcggcggcgacctgcagtccctcctagaggcgatcaaatcctccgaggtgcttgaagatagaattgggctcatcaaccgactcgagagttcctttgagtattctgcggatgatctgagaccagtacttgacagtcttaatgtatcttgggatgattctggatgttcaggttgctctaaaatgttcatatatagaaacaactggttgtctaggccaatttcttgcacttggtgcaaagattcttccttctgcggcaaaatgtgttactgtagatatggtgcataatattggtgattttatctcagagttgctaagtcttatggaaagctcaatagttgacaatgacaagaaaattcatggagctgctctggatatcactaaggctgcacctgtttttctagatgaaacaactaagctgtgccgggcatactctgaggccacaaaagtagacaactgcacaatgagtataactgatgaagatgctactgtgaaacacaacaaacaaggtcttgctagtgatgtcatcaggattacatcatccactattcagactatgtgtagattgggaacctatgcagcatccagtggtggaagccaggtgattttactgaatgtatcatggaagggtgtagtctcattactccaaagcggtaaagggatgattgaaggaaaagtaaatgtcagagaaataattgtaacccttctatctctgtccatagaatctctaagagttgctgctgaaacatggtgtgcaccgttactagaaacccttggtgctactgaagccagaagggcgttcctaccaatcaagtttttcttaataaatgctgtaaggatttgttcaacatatccatctgaagcaatgattatatacaagaacataatcaattgtgcagtagtgatcacatcctcaagcattctatttagcaagaagccacagttgaaggcagcaaatgagacccttgttgaattgttggagcctactttatttgttttactagatacacttatgaaatcatctgacttaacaccagaatccaaatgccagcttgcacatcatttttttgaaaacgaagaagataagagtccagatcttatgggacaagctaatcagagagagataaatttggcctcactggattgcattttctctatggattcagatgtggatcatagaaatagagcacttttacctgctgagttgcttgtgtttttgcactttctcaatgcttcatcatggttgacagaaatggtggtcatcacattatctaaaaagctacagactcttcttaatatattgacatcagaagacatctactcctatgtccttggcttccaaatccctgccttaaatggcgcagaccagtctcctgcagttgtttggcaacctgtgtatacttctatcatacaagcattgaaggcttttatgatttctactgttgcttcaagtgctgcttggaacgagttagaggctttcttacttgaaaatattttccatccccatttcctttgcttggaaattattacagagctgtggtgtttcttcattcgttatgctgaaactgagacttcaattaatctagttaatcaagtctcccttctactaaagactgttgcatcaccagaggatgttctttcacctctcagtgctttgcggaaagttgcacgatcattgtgcatcatcttgagctatgcatcttctgcaactgttgatcaaatatatacttgtgtgctgaatggtgaaaactcttccaagtcttcaatcttacacttagcattgctgatggaaggatttcctttggattcattgtctgatggtacaaaggaacttgctatgaagaaaatgtttacctcttttgctggctatctggagagctactccaagaaccaccgagtaatcaatgtgccaacttgtaaattgggtgttgtaggacttcctatacatgctctagcctctgcattgcagcataggtaagtctgttctctaattaccagtattgttcactctgatgatgatgatggctgtcttatacacagtactttttttggcagtgtaataaatgttgatagtattgtagatgagaatagcatcactgctatgtttaagttcaccatctctctcataaagatgtttagaattgcgccagatagtagtaaggataaccttgccaagcacattagttccatgttggttattatctcaaacacgaggcatctttgtgcattcagtgagatggagaagttgactctgcagttgcgcacgctgttcgtttccacttctgataaatcaaatgctgtgctgtctcagtgcaaaccgtcaatggcttcctttatgtcaactctcggtcacttgaacgttaccgaagacgatgctaacgaactttgttctgcaatatgggatctgtatcatctcctgctgaaggaacggcactgggcgctcattcacctcgcaatggattcctttggctacttcgccgcccgcacatcctttacgcagctctggagatttgttcccagagatgctgccctttcgtacaatgcaagcacagggacgagcatagatgaaaacggattcatgctggagttgagggcttatcttcagaaagaggtcgccttgcacaccgataaatggtctgaagagcagattcggctcctggtttctgaggggagagcgctgaagaagctggttgaagcttgttgtgaaattccggttgttgctgagcctgagaaggcgccggttgcgaaggatgccagcacgaagaagaggaagatgccagatgggatctgtgaaggcatggcgatgctgcagaacggtctcaaggtcatgcgaggcgcctttggtgaaggggacttcgctgatctgaaggataggtttgctgcacacttgtctcgcctcgaggatgcagtttcccagtttgctagtttatccgacgaaatttgatatagtgcactgtatgtcgcgctgttacctttaactgcaaaagagcattcattctagtacagttcacgatcatagcacagctgatctctctcgtggcaagcaagctccagagtcatcgggttgacagatcgttcaacatggccagcacaacttcaaggtttgcaggtcatctccgcgccggcgcttgcgtggcgacggcccttgtggcttgttggcttgtggggcgaaaatgcaagaaaatggatgtgaattatcttttgtataataaccacacgacatcatgtactgctttaatttaacaattggtagtacaccctgcagacgaggcgaatacaatttttg

SEQ ID NO: 6420 - DNA, 3552 bp, Zea Mays
aagcggcaaaacccagcaggccagcaccagcaccagcaccagcaccgtgccgcccctgggccggccagccgccagcgcgacatcgagcgagcaatggaggtcggcggcgacctgcagtccctcctagaggcgatcaaatcctccgaggtgcttgaagatagaattgggctcatcaaccgactcgagagttcctttgagtattctgcggatgatctgagaccagtacttgacagtcttaatgtatcttgggatgattctggatgttcaggtctgtcgcactgcatgctacacaagtcaattttgcaggttgctctaaaatgttcatatatagaaacaactggttgtctaggccaatttcttgcacttggtgcaaaggcgagctcatggtgtcgaaagcatatcgtatgttccatcgaatctgttgatgattctgaagatgtccaacaggaagaacactccaaaatactcccagagataattttgatggccttaaatatatcaatcaagattcttccttctgcggcaaaatgtgttactgtagatatggtgcataatattggtgattttatctcagagttgctaagtcttatggaaagctcaatagttgacaatgacaagaaaattcatggagctgctctggatatcactaaggctgcacctgtttttctagatgaaacaactaagctgtgccgggcatactctgaggccacaaaagtagacaactgcacaatgagtataactgatgaagatgctactgtgaaacacaacaaacaaggtcttgctagtgatgtcatcaggattacatcatccactattcagactatgtgtagattgggaacctatgcagcatccagtggtggaagccaggtgattttactgaatgtatcatggaagggtgtagtctcattactccaaagcggtaaagggatgattgaaggaaaagtaaatgtcagagaaataattgtaacccttctatctctgtccatagaatctctaagagttgctgctgaaacatggtgtgcaccgttactagaaacccttggtgctactgaagccagaagggcgttcctaccaatcaagtttttcttaataaatgctgtaaggatttgttcaacatatccatctgaagcaatgattatatacaagaacataatcaattgtgcagtagtgatcacatcctcaagcattctatttagcaagaagccacagttgaaggcagcaaatgagacccttgttgaattgttggagcctactttatttgttttactagatacacttatgaaatcatctgacttaacaccagaatccaaatgccagcttgcacatcatttttttgaaaacgaagaagataagagtccagatcttatgggacaagctaatcagagagagataaatttggcctcactggattgcattttctctatggattcagatgtggatcatagaaatagagcacttttacctgctgagttgcttgtgtttttgcactttctcaatgcttcatcatggttgacagaaatggtggtcatcacattatctaaaaagctacagactcttcttaatatattgacatcagaagacatctactcctatgtccttggcttccaaatccctgccttaaatggcgcagaccagtctcctgcagttgtttggcaacctgtgtatacttctatcatacaagcattgaaggcttttatgatttctactgttgcttcaagtgctgcttggaacgagttagaggctttcttacttgaaaatattttccatccccatttcctttgcttggaaattattacagagctgtggtgtttcttcattcgttatgctgaaactgagacttcaattaatctagttaatcaagtctcccttctactaaagactgttgcatcaccagaggatgttctttcacctctcagtgctttgcggaaagttgcacgatcattgtgcatcatcttgagctatgcatcttctgcaactgttgatcaaatatatacttgtgtgctgaatggtgaaaactcttccaagtcttcaatcttacacttagcattgctgatggaaggatttcctttggattcattgtctgatggtacaaaggaacttgctatgaagaaaatgtttacctcttttgctggctatctggagagctactccaagaaccaccgagtaatcaatgtgccaacttgtaaattgggtgttgtaggacttcctatacatgctctagcctctgcattgcagcataggtaagtctgttctctaattaccagtattgttcactctgatgatgatgatggctgtcttatacacagtactttttttggcagtgtaataaatgttgatagtattgtagatgagaatagcatcactgctatgtttaagttcaccatctctctcataaagatgtttagaattgcgccagatagtagtaaggataaccttgccaagcacattagttccatgttggttattatctcaaacacgaggcatctttgtgcattcagtgagatggagaagttgactctgcagttgcgcacgctgttcgtttccacttctgataaatcaaatgctgtgctgtctcagtgcaaaccgtcaatggcttcctttatgtcaactctcggtcacttgaacgttaccgaagacgatgctaacgaactttgttctgcaatatgggatctgtatcatctcctgctgaaggaacggcactgggcgctcattcacctcgcaatggattcctttggctacttcgccgcccgcacatcctttacgcagctctggagatttgttcccagagatgctgccctttcgtacaatgcaagcacagggacgagcatagatgaaaacggattcatgctggagttgagggcttatcttcagaaagaggtcgccttgcacaccgataaatggtctgaagagcagattcggctcctggtttctgaggggagagcgctgaagaagctggttgaagcttgttgtgaaattccggttgttgctgagcctgagaaggcgccggttgcgaaggatgccagcacgaagaagaggaagatgccagatgggatctgtgaaggcatggcgatgctgcagaacggtctcaaggtcatgcgaggcgcctttggtgaaggggacttcgctgatctgaaggataggtttgctgcacacttgtctcgcctcgaggatgcagtttcccagtttgctagtttatccgacgaaatttgatatagtgcactgtatgtcgcgctgttacctttaactgcaaaagagcattcattctagtacagttcacgatcatagcacagctgatctctctcgtggcaagcaagctccagagtcatcgggttgacagatcgttcaacatggccagcacaacttcaaggtttgcaggtcatctccgcgccggcgcttgcgtggcgacggcccttgtggcttgttggcttgtggggcgaaaatgcaagaaaatggatgtgaattatcttttgtataataaccacacgacatcatgtactgctttaatttaacaattggtagtacaccctgcagacgaggcgaatacaatttttg

SEQ ID NO: 6421 - DNA, 1110 bp, Zea Mays
cacgaagccgagaagtgagagagggagagctgccgcatccgctctccgttggtgtagcagagtgaagcgcgaggataggccacagaccgttgcagtgttctcaggggtgaaatcaacgccgccccagtgcggattggcgctcgagacgagcgagaattcctcaccagagatttgcggccgccgtggcccgagatccaccatggacgaagcccggcacgacggaatccacgacgagcaagtgaccgaggagcccgaaacataacaggtggaaaatactgagcagcagctcgttgaaggcaagttgtgtccttgatctctcttctttacccaataatgttactattaatcactgtggcatgcttagattaatcttgatgggacctaataggtcaacctagtttgagttaccttataccttacttatcactgaacgtttgggtagtatgtgttattgttctatgtggttttgggtattaagatacattttattcatgaccatgctatttattgtcaatggaatattttttgttcatgataaggttattatgttaattggaacatggagcgaccacccgagaaaacagtgctaccacaagtgtagaatgggacgcccttggctgattaattaggaaagctagtgtgagttaatcttttcccgaaaggggcaagcggggtggaggatgcaggtgtagggaggtccttgggtctgagtgtcttgttaactttctggacgaaggattcctatgcagctttcggcccggaaaccgtagcgggttctctcctctagtggaactttgtaaatgcctcgcagtgtaccatcatctactcaccttggcaatgtttaagggtttgatcaacccgaggcgacaaagggaacacgtcttgtgggtaaatatgtgcaacctctgcagagtgtaaatgtaagtgcaatcaaccctaattgagggttttggtgattaatgacaaaacaaactaagattctaacaagtttgctcctagtatgtacacagtatttctacagaaaggagaagcacagatcttacgagcataaaagtataaagcacagcggatttaaaattccacatcaaatggcgtgctccaagtgctaag

SEQ ID NO: 6422 - DNA, 483 bp, Zea Mays
acaggttggataattgaacatgagacactatagccatctttggtcgacgaccaagaggagtgcaatggcgttgtaaattggcgtctccatatctgacgttgggcgaatttccactagggtgactggcgaatacatgtatcctacgtttacggccgccaatagcttctggggagggtgttggaaccaggtgatttcgttttagcagaaaagaggtgccttgagcagtgcaagttctcacatggtgatgtgattttgttcaagtgccctagcaatcataaggagatgcttgtgaagaggttgattgggcttcctggtgagaagatacagctccctgggtcccttaaccctactaagatcccagaagggcattgctgggttgaaggtgataactctactcgtagctgggattctagggcattcggtccgatactggttttcttcagtaatcatcagttcaaatgtgtccatgctgtacaactagtg

SEQ ID NO: 6423 - DNA, 1733 bp, Zea Mays
acaggttggataattgaacatgagacactatagccatctttggtcgacgaccaagaggagtgcaatggcgttgtaaattggcgtctccatatctgacgttgggcgaatttccactagggtgactggcgaatacatgtatcctacgtttacggccgccaatagcttctggggaggtgatttcgttttagcagaaaagaggtgccttgagcagtgcaagttctcacatggtgatgtgattttgttcaagtgccctagcaatcataaggagatgcttgtgaagaggttgattgggcttcctggtgagaagatacagctccctgggtcccttaaccctactaagatcccagaagggcattgctgggttgaaggtgataactctactcgtagctgggattctagggcattcggtccgggtatgctgtgtgcgatttaaaaaggtcagttaccagcaatgctacttgatataaattttgaaaactcctggagtgttcctttttgtgggaaagtttggacatgctccactgccattttaaagtgagactgggtgcctatatatcatatatgtatgtggagcatctgagttggaaatgtcattaacccctgtataatatatggtattgcattcatctttgctggaatatctaagaataatgctatatgcagtatatcttcaatcattcagatttgcatggtgagctgtagttattggcttattgcaagatactacattgtctcttgttgcctcttcaatggaattttattattctttagttttcgcctgaaatgaaattgatgcaccatatgcttgtagccagtgaaagctcctaaggaaccctttggatcaaactgcacaaactatgggtgtgtttggtttgacttttggctttggcttttgccacctaaaagccaaaagccaaccaaagggctggatctaggaagcagctttttctaaaagctgactttctcacagtgcaaatctgaaagcacccctaaacctgcttttagtgacttttcggatggaactgtgaaaacatatatcgaagaacttttaacgacttttagtgatttccaccaaacggtttttagctttttaacgactcacagcctacaacagctttttccacagctcacagcccacagcaacttttttcacagccacagctcaaccaaacagaccctatataccaatgagaacaaaaaaaactgaaaaacagggaataaagcgaaactacaacagttataggacagaagggcagacctggtgcaatgatgagagctgtctcactccatgtcgtaggttcgaacttcaaagcagcctcctcatttgcaggggaaggcttgccttagtttatcctatcccccgacctgctaatatgggagcctgtgacactgggtctgccctacaacagttataggacaacctatatctcaacaggcaagtacattattgcaccacaagttaggagcacacactttgtgtccttggtgataatgtttgaggctcaacaagttgcaatgatttcttcctatttatgttactgtattgcaatcatagaactgccaacaaaattttgttcccttttctgaaaaaaatgtgttgcattgactgccaagtatgaaactattgagttataaatctgctaccaatgagcttcgttgtgtgcttgtttagacagatactggttttcttcagtaatcatcagttcaaatgtgtccatgctgtacaactagtg

SEQ ID NO: 6424 - DNA, 1747 bp, Zea Mays
acaggttggataattgaacatgagacactatagccatctttggtcgacgaccaagaggagtgcaatggcgttgtaaattggcgtctccatatctgacgttgggcgaatttccactagggtgactggcgaatacatgtatcctacgtttacggccgccaatagcttctggggagggtgttggaaccaggtgatttcgttttagcagaaaagaggtgccttgagcagtgcaagttctcacatggtgatgtgattttgttcaagtgccctagcaatcataaggagatgcttgtgaagaggttgattgggcttcctggtgagaagatacagctccctgggtcccttaaccctactaagatcccagaagggcattgctgggttgaaggtgataactctactcgtagctgggattctagggcattcggtccgggtatgctgtgtgcgatttaaaaaggtcagttaccagcaatgctacttgatataaattttgaaaactcctggagtgttcctttttgtgggaaagtttggacatgctccactgccattttaaagtgagactgggtgcctatatatcatatatgtatgtggagcatctgagttggaaatgtcattaacccctgtataatatatggtattgcattcatctttgctggaatatctaagaataatgctatatgcagtatatcttcaatcattcagatttgcatggtgagctgtagttattggcttattgcaagatactacattgtctcttgttgcctcttcaatggaattttattattctttagttttcgcctgaaatgaaattgatgcaccatatgcttgtagccagtgaaagctcctaaggaaccctttggatcaaactgcacaaactatgggtgtgtttggtttgacttttggctttggcttttgccacctaaaagccaaaagccaaccaaagggctggatctaggaagcagctttttctaaaagctgactttctcacagtgcaaatctgaaagcacccctaaacctgcttttagtgacttttcggatggaactgtgaaaacatatatcgaagaacttttaacgacttttagtgatttccaccaaacggtttttagctttttaacgactcacagcctacaacagctttttccacagctcacagcccacagcaacttttttcacagccacagctcaaccaaacagaccctatataccaatgagaacaaaaaaaactgaaaaacagggaataaagcgaaactacaacagttataggacagaagggcagacctggtgcaatgatgagagctgtctcactccatgtcgtaggttcgaacttcaaagcagcctcctcatttgcaggggaaggcttgccttagtttatcctatcccccgacctgctaatatgggagcctgtgacactgggtctgccctacaacagttataggacaacctatatctcaacaggcaagtacattattgcaccacaagttaggagcacacactttgtgtccttggtgataatgtttgaggctcaacaagttgcaatgatttcttcctatttatgttactgtattgcaatcatagaactgccaacaaaattttgttcccttttctgaaaaaaatgtgttgcattgactgccaagtatgaaactattgagttataaatctgctaccaatgagcttcgttgtgtgcttgtttagacagatactggttttcttcagtaatcatcagttcaaatgtgtccatgctgtacaactagtg

SEQ ID NO: 6425 - DNA, 1904 bp, Zea Mays
acaggttggataattgaacatgagacactatagccatctttggtcgacgaccaagaggagtgcaatggcgttgtaaattggcgtctccatatctgacgttgggcgaatttccactagggtgactggcgaatacatgtatcctacgtttacggccgccaatagcttctggggagtttggtcttctggtttgtgctgaccagggtgttggaaccaggtgatttcgttttagcagaaaagaggtgccttgagcagtgcaagttctcacatggtgatgtgattttgttcaagtgccctagcaatcataaggagatgcttgtgaagaggttgattgggcttcctggtgagaagatacagctccctgggtcccttaaccctactaagatcccagaagggcattgctgggttgaaggtgataactctactcgtagctgggattctagggcattcggtccggtaagtttcttcttgttgttattgctcatgtctaattggctgaatgaaacttactagtgcatataatgctcctgctgtactgcattgaatactgatatcggatcttgttgtcacctgtttcaaaacgaagggtatgctgtgtgcgatttaaaaaggtcagttaccagcaatgctacttgatataaattttgaaaactcctggagtgttcctttttgtgggaaagtttggacatgctccactgccattttaaagtgagactgggtgcctatatatcatatatgtatgtggagcatctgagttggaaatgtcattaacccctgtataatatatggtattgcattcatctttgctggaatatctaagaataatgctatatgcagtatatcttcaatcattcagatttgcatggtgagctgtagttattggcttattgcaagatactacattgtctcttgttgcctcttcaatggaattttattattctttagttttcgcctgaaatgaaattgatgcaccatatgcttgtagccagtgaaagctcctaaggaaccctttggatcaaactgcacaaactatgggtgtgtttggtttgacttttggctttggcttttgccacctaaaagccaaaagccaaccaaagggctggatctaggaagcagctttttctaaaagctgactttctcacagtgcaaatctgaaagcacccctaaacctgcttttagtgacttttcggatggaactgtgaaaacatatatcgaagaacttttaacgacttttagtgatttccaccaaacggtttttagctttttaacgactcacagcctacaacagctttttccacagctcacagcccacagcaacttttttcacagccacagctcaaccaaacagaccctatataccaatgagaacaaaaaaaactgaaaaacagggaataaagcgaaactacaacagttataggacagaagggcagacctggtgcaatgatgagagctgtctcactccatgtcgtaggttcgaacttcaaagcagcctcctcatttgcaggggaaggcttgccttagtttatcctatcccccgacctgctaatatgggagcctgtgacactgggtctgccctacaacagttataggacaacctatatctcaacaggcaagtacattattgcaccacaagttaggagcacacactttgtgtccttggtgataatgtttgaggctcaacaagttgcaatgatttcttcctatttatgttactgtattgcaatcatagaactgccaacaaaattttgttcccttttctgaaaaaaatgtgttgcattgactgccaagtatgaaactattgagttataaatctgctaccaatgagcttcgttgtgtgcttgtttagacagatactggttttcttcagtaatcatcagttcaaatgtgtccatgctgtacaactagtg

SEQ ID NO: 6426 - DNA, 1724 bp, Zea Mays
cgcaccaacaccaccaccactgcatcgacgttcgtgcattatattcaaccagcatttgtcatggacctcatggtgtggcgcgtacgtatgctggcgcatttgtcgtggtcatggtcgccacggcgtggcgcggcgtagtcagtcagcgccgccggttggcgttgcgttgcgtccgtgcgtccgtggcatgcgtgtagcagcacgccagaacacccgtcaacaatgttgtggcttcgcttttactttacacatgcatggcaacgcacaaccttgttgcattgtcatttctgcgttgttaagcaactcaaaccaccatttaaaatgcacctctagataacatgttgcgctactagaggtctcaggtctctagagtctagaccacgaaaaagaattggtgatagcatagcatgtttaagtgtttccaagcatccatccatcagcatcatcgtcgagcagtggaggaccccaaacccgtgatggagccgtcgccgagcttcgacttccgggaggagtacaccagcgcgttccgcaccgagtcctacaacgacttctgggcgcgcgtcctggacatcaccctcgcgcacggcgcagggctggtgccgcgcccgggcggcgacggcggcgtcacggcgtcgtccaagcgcctcccttcataccgcctcttcgccgagcaactcctcgagccggaccagcgggccgtccgcgcggccctcgcctcgccccgcagcggccagctccaccccggcgtgcgcgacctcctcgtcacctactacaacgagacggcaagcgcgtccttcctgtgcagccacctcctcagggacatcgagcagatccgcctccggtaccgcccgctcaagaccacgctccgcaagctcgcctgcgacgtcgaggcgcccaacctctccgacgtctccgccgccctcggccagcccttcgccgcgctggccgtgtcgcagggcaagctccggcaggtgcagctcagctccgccgacctgcttaggagccttgacgccagcaggaagaaggcgcggctccggatcagtagcctcgcccggctcaggcagctgctctcggcctccttcgtcaccgtcgtcgccgccgttgccgtcgtgggcgcgttcatcggcgtgcatatcctggccgcgttcgcggcgttcccgatgatgtcgccggcttggctgggtctcttctctggccgatcggttcggcgagcactggtgcagctggaggccgcgaccaagggcacgtacatactgaaccgggacatggacaccataagccgcctcgtggcacggctgcgcgacgagggggagcacatgctcgcgctgctgcagctgtgcgtggagcacctcgccatggctggcgagaagggcaggctcgtgaaggaggtgctgaagcagctgtgcaagaacgaggagagctttaggcagcagctggatgacctggaggagcacctcttcttgtgcttcatgaccatcaacaaggccaggagcatggtgatgaacttcatagctggcgcagagcagaactccagttgaccacaagaaaaaaaagtgttcgtaggacagattgtaacttctgtacatactacgtagtttttatttctcagtacaggaaaaaaaagagagactaagatttcctaacactggtcattatgcttttattttaccttttctagacagtggctgatccaaaaattgactaatacccgagccgaaatgaac

SEQ ID NO: 6427 - DNA, 1122 bp, Zea Mays
atctttccaaattttactcgcctcctgtacctctctcccgtgtgaccatcacaacaaaaataaaatcaataatagagagagaagaggtagcaacaccggctgcttaatctcttcttttccctcctctttatctccagcgcatcgtaaagggaggagcggagcggcgaattcttgtggtttcccaagatgtcttctccaagcaagcgccgggagatggacctcatgaagctgtgaggattctggatgatgagcgactacaaggtggatatggtgaacgatgggatgcaggagttctttgttgaatttcgtgggcctaacgaaagcatttatcaaggaggtatatggagggttagagtagaactgccagatgcgtatccttacaaatccccatcgattggtttcatcaataagatatatcacccaaatgtcgatgaaatgtctggttcagtctgtttggatgtcatcaaccagacatggagcccaatgtttgatcttgttaatgtgttcgaggtcttccttccacaacttctgttatatcctaatccttctgatccattaaatggagatgcagctgcgttgatgatgcgtgatcgccctgcttatgaacaaaagagtactgtgaaaaatacgccaaaccagaggatgctggtgtcagcccagaagacgagtccagtgacgaagagctgagtgaagaggaaaatgactcgggtgatgaggagataatgggcaaaccagacacatagtcgagttggaacctagatctgtaatctgcacacgatgtttattgcagcaagtgcaattaaatagtccatggatgttcccgtgcagtctgaatgccatgtaaataaactgcaatttcatgttcgctaatcttatttccatctccagttgatcaattgaatttccagcataactgtcttgatatcatgaatgtaggtttgtgcatttagagctaatttaggaatctcatttttcgaagggatttttattttgacacgagaaattagtttattttactttgataaaatagaaatctcttggaaaaatagagtttccaaactaaccctgaaattggttggttgtttaatatctgtgcaatctttaggagaagcaaattcgtca

SEQ ID NO: 6428 - DNA, 1172 bp, Zea Mays
ccacaatccaaaagcgcctaggacattactggataaaaagtacagtgccgaattgtccgaatatctttccaaattttactcgcctcctgtacctctctcccgtgtgaccatcacaacaaaaataaaatcaataatagagagagaagaggtagcaacaccggctgcttaatctcttcttttccctcctctttatctccagcgcatcgtaaagggaggagcggagcggcgaattcttgtggtttcccaagatgtcttctccaagcaagcgccgggagatggacctcatgaagctgatgatgagcgactacaaggtggatatggtgaacgatgggatgcaggagttctttgttgaatttcgtgggcctaacgaaagcatttatcaaggaggtatatggagggttagagtagaactgccagatgcgtatccttacaaatccccatcgattggtttcatcaataagatatatcacccaaatgtcgatgaaatgtctggttcagtctgtttggatgtcatcaaccagacatggagcccaatgtttgatcttgttaatgtgttcgaggtcttccttccacaacttctgttatatcctaatccttctgatccattaaatggagatgcagctgcgttgatgatgcgtgatcgccctgcttatgaacaaaagagtactgtgaaaaatacgccaaaccagaggatgctggtgtcagcccagaagacgagtccagtgacgaagagctgagtgaagaggaaaatgactcgggtgatgaggagataatgggcaaaccagacacatagtcgagttggaacctagatctgtaatctgcacacgatgtttattgcagcaagtgcaattaaatagtccatggatgttcccgtgcagtctgaatgccatgtaaataaactgcaatttcatgttcgctaatcttatttccatctccagttgatcaattgaatttccagcataactgtcttgatatcatgaatgtaggtttgtgcatttagagctaatttaggaatctcatttttcgaagggatttttattttgacacgagaaattagtttattttactttgataaaatagaaatctcttggaaaaatagagtttccaaactaaccctgaaattggttggttgtttaatatctgtgcaatctttaggagaagcaaattcgtca

SEQ ID NO: 6429 - DNA, 1026 bp, Zea Mays
aaaatttccacaatccaaaagcgcctaggacattactggataaaaacgcatcgtaaagggaggagcggagcggcgaattcttgtggtttcccaagatgtcttctccaagcaagcgccgggagatggacctcatgaagctgatgatgagcgactacaaggtggatatggtgaacgatgggatgcaggagttctttgttgaatttcgtgggcctaacgaaagcatttatcaaggaggtatatggagggttagagtagaactgccagatgcgtatccttacaaatccccatcgattggtttcatcaataagatatatcacccaaatgtcgatgaaatgtctggttcagtctgtttggatgtcatcaaccagacatggagcccaatgtttgatcttgttaatgtgttcgaggtcttccttccacaacttctgttatatcctaatccttctgatccattaaatggagatgcagctgcgttgatgatgcgtgatcgccctgcttatgaacaaaaggtgaaagagtactgtgaaaaatacgccaaaccagaggatgctggtgtcagcccagaagacgagtccagtgacgaagagctgagtgaagaggaaaatgactcgggtgatgaggagataatgggcaaaccagacacatagtcgagttggaacctagatctgtaatctgcacacgatgtttattgcagcaagtgcaattaaatagtccatggatgttcccgtgcagtctgaatgccatgtaaataaactgcaatttcatgttcgctaatcttatttccatctccagttgatcaattgaatttccagcataactgtcttgatatcatgaatgtaggtttgtgcatttagagctaatttaggaatctcatttttcgaagggatttttattttgacacgagaaattagtttattttactttgataaaatagaaatctcttggaaaaatagagtttccaaactaaccctgaaattggttggttgtttaatatctgtgcaatctttaggagaagcaaattcgtca

SEQ ID NO: 6430 - DNA, 2299 bp, Zea Mays
atgacgagcggggtagggcgccaagaatggggcggggtcagacgccgtcacgtcgagaacggggtgtcaagccgaactggctcaagcgacgtcgaaaagaatgaagccggacagatagatgggggtcatgtccagctttgctccgtcggtctatccctagaacagctgcccaccccctaccccaccggcaccaccgaccaccgtgtccgccgccttcccttcgcctcccccaaccccgcggctgaccagcgccatgcgcatccgccggtacgccgcgcgcctcctctcctccacctcccccggctccgccgctaccgccgccccctcctcgccgccgcggccgcccgccgcatcctggctccacaccgacgacgacgactgctgcgccttctgcgagctcagccgcccagcctcgcaggagggcctggatgccatcaagcacaaagggtacattgccgaccgggtgctggaatccgttgtcagggccgacgagcgcgtcggcctacccgagcgaccgcctgttcccgaagttaaaaaatgcaagattgatcatgtacctcctgtgaataaagcttgtgtgggactgcaagttgtgaaacttgccgcgaaaccggaaggtgctgctcctgctagtgaagatgctgctgatcctgcaactaaagctggtgtttttgttgtcaatgatgctgctattgagcagggagttaaatgtatagcttctctctcaggtggtgcctccaagatggaggttacagtggagaattctcttgcaaatggaccgaccactgaattagaagtttccaattctcttgcaaatggaccgaccactgaattaggagtttccaagggcacgtcccttgctaatgaatcggctgatctgccaggggttacatgcattatgccagaagttacagacaaacctgttactgatctaggggttataagcaccgtggtggaagttagtgatacaggtcctgtcgttcatgaaactactgaactggaatctgcaggggaggattatattgctagtgaagccactgctgaaccagaagatgctggtagagcttcttgcaatgtagatgacactgctgctttagatgagccacagccgcctaactgtgatctgtacttaggcaatgtgcaggatggaaatgctatagatactgttaccagtacactgcagccttctcgatgtgatgctgcagaaggtggtggttctgtgaatttcacaaccaatattcctgttagagccagaggaccaacctttaagggaggagtgctgaaggataaatctgttgcacccagtgttttacttgtattggacgtattgactagaagcattggtaaatcagggagaacagatgttatttgttatgctaggcgaacaggtaagaggaaggcagagctgctgaaggtaaagaaggaaaatattgacttagaagatggtgttatatgtgagaaagaggagacactggtgagcactgatcgttgtgaatgtgtcttgtcaacagctgggtccatagatgttaaacttgccgacataaagaaagaccttatggataattccgctgtaggcaaggttaaaaagatgaagagaaatagatttgaatgtaatattgattactgccacatggtgttcaagacagaagctgagcttgctgtccacaagaagaacatgtgcacggtcagttcatgcagcagacatttcagatcccacagatacctgaggcgccaccagagtgcacacaacgatgatatgccttacaagtgcccatgggatggttgtaatatggctttcaagtggtcatgggatcgggctgagcatttcaaggtccatgctggggccaagccttacaaatgcacgacgcctgggtgcagcaaaatatttaagtttgtttcagatttcacccggcataggaggaggtgcaaacctcagaggtgtctcttctatgcattccaagaagaatccactaaatattatgtgacactgtcaatttggaaattactatggtaggctcttaatacctgaattactatcaagcaaatgagttccttgactgggaaagaagtactagccctcaaatataaatattgaagtattaggaatggaataattaggaggatgctgtatgatttaattttaatggcgaatcttacttccttaaatagatattattgtaataattcaatgcactgtttagatttgcactagattgtaaaagtgaatgcaatgttgagcctttgctacataagctaataagcaccttttgtagttgttcgtctttaccaaggaaaaaag

SEQ ID NO: 6431 - DNA, 2167 bp, Zea Mays
atgacgagcggggtagggcgccaagaatggggcggggtcagacgccgtcacgtcgagaacggggtgtcaagccgaactggctcaagcgacgtcgaaaagaatgaagccggacagatagatgggggtcatgtccagctttgctccgtcggtctatccctagaacagctgcccaccccctaccccaccggcaccaccgaccaccgtgtccgccgccttcccttcgcctcccccaaccccgcggctgaccagcgccatgcgcatccgccggtacgccgcgcgcctcctctcctccacctcccccggctccgccgctaccgccgccccctcctcgccgccgcggccgcccgccgcatcctggctccacaccgacgacgacgactgctgcgccttctgcgagctcagccgcccagcctcgcaggagggcctggatgccatcaagcacaaagggtacattgccgaccgggtgctggaatccgttgtcagggccgacgagcgcgtcggcctacccgagcgaccgcctgttcccgaagttaaaaaatgcaagattgatcatgtacctcctgtgaataaagcttgtgtgggactgcaagttgtgaaacttgccgcgaaaccggaaggtggtgcctccaagatggaggttacagtggagaattctcttgcaaatggaccgaccactgaattagaagtttccaattctcttgcaaatggaccgaccactgaattaggagtttccaagggcacgtcccttgctaatgaatcggctgatctgccaggggttacatgcattatgccagaagttacagacaaacctgttactgatctaggggttataagcaccgtggtggaagttagtgatacaggtcctgtcgttcatgaaactactgaactggaatctgcaggggaggattatattgctagtgaagccactgctgaaccagaagatgctggtagagcttcttgcaatgtagatgacactgctgctttagatgagccacagccgcctaactgtgatctgtacttaggcaatgtgcaggatggaaatgctatagatactgttaccagtacactgcagccttctcgatgtgatgctgcagaaggtggtggttctgtgaatttcacaaccaatattcctgttagagccagaggaccaacctttaagggaggagtgctgaaggataaatctgttgcacccagtgttttacttgtattggacgtattgactagaagcattggtaaatcagggagaacagatgttatttgttatgctaggcgaacaggtaagaggaaggcagagctgctgaaggtaaagaaggaaaatattgacttagaagatggtgttatatgtgagaaagaggagacactggtgagcactgatcgttgtgaatgtgtcttgtcaacagctgggtccatagatgttaaacttgccgacataaagaaagaccttatggataattccgctgtaggcaaggttaaaaagatgaagagaaatagatttgaatgtaatattgattactgccacatggtgttcaagacagaagctgagcttgctgtccacaagaagaacatgtgcacggtcagttcatgcagcagacatttcagatcccacagatacctgaggcgccaccagagtgcacacaacgatgatatgccttacaagtgcccatgggatggttgtaatatggctttcaagtggtcatgggatcgggctgagcatttcaaggtccatgctggggccaagccttacaaatgcacgacgcctgggtgcagcaaaatatttaagtttgtttcagatttcacccggcataggaggaggtgcaaacctcagaggtaaaagcttgcttgatactacagaattaggataatagtgaagtttgtgcttgctacagacctacagtagatgttttttatttgctaggagatccatcgtgcaactgttctgacaacttatagtgggactgtctgtttctttgttgaggaaaatgctaaaatcgttagcttagaaactcgagtttctcaaaatgtatgtacatttgcggaaggtagttgtgcactggttctggttatgatcgcgctgtatcggatctgagacttagagctgtaaatgggaaggtattatttattttattttgtttcaacataatattccatacttatttatctacttgga

SEQ ID NO: 6432 - DNA, 887 bp, Zea Mays
ataaactgtggaggactggaggtttaatgaattcggtgctgatggtggaccagcagctaaggcccttcggcccaaattcaacgtgtttgtcaaaaatgtatctgctcatctgggagtagctgtgccacacattgagttgaagcatgtgattgctgctacaattggtcttaagggtcttggaagcctcctttttattttgagcagctctctcggtgcttatctcctgctgctgtaccttgctttgatcactcctatcatccatgacttctacaactacgatatggagaaggcagaatttgcaggcctctttgcgaagttcacccaggatttggcgctgatcggagctctgctcttctttctgggcatgaagaactccatcccgaagcggcagggcggcaagaagaaggcccccaaggcgaagacgaactagggctgcttagatagctgcacgcctcaggcggggtgtatcaggccacaggtctatttcgaagcaggcccagcgcgatgcagcgaatgccatcgagctgcgcttttacatgtttatcatcagattccattttgcggggcacggcccggacaaaggtgtgaccggggtgggttaggcgactagattgcacgattatgtacttgcgatttgtttgttgaactgggttgccgacagttaatcttcatttgattttatcttgttagcagcgcaggaaccgttgctgattcagtggttggtagtttctttcacttcctgagttgttggtttagggcatgttcgttttgctcttaatccatgtggattgagtgggattggataggtttaatctcaaataagttaaaatctttcataattttttttaatctcatccaatccatatgagataggaataatcgaacaa

SEQ ID NO: 6433 - DNA, 680 bp, Zea Mays
gccggcgcgatgagggactgggcgccgtcgatcatcgccacggcgctgttcgcgctcctgtgcccgggcggcgtgctgcagatgcccggccggcaccgccccgtcgacctcatgaacatgaagaccagcttcccgtccacgccgtcatctacttcctgctgctcatgctcttcctcgtcatcctgcagcctcacctctacatctgacgttaattgcagattcatatttctggaaattagaggccagccactacttttgacttgacgacagtcacagggcatgatgcatcagacagcacataacttcgtccagcaaagtaaaaacaatgaggaaagctagatatatgcaggtgatacgcatgctgtatcatttcgtcggcacactggaagttcgagccgtatttcgtatatgactggactgcgttttgtgtctgatggagtgatggatcatgagcgacgctttgcgcgccgccgagcaccagggagaggcgcgtcgtccgccaggcagagaagcgcagacaggagccgggcagagacgacaggagccgggcagagaagcaccagggagaggagcagacgagcgccgcgccgctcctgcacgggcgtggagagggctcgggagggagagcgtcggagaagaccgtcggggagcccagtcgagcgtcggggaagacggtgcag

SEQ ID NO: 6434 - DNA, 1178 bp, Zea Mays
gatccagctttgctttgtagttgtagcgctagcagcttaactggtctgagctgaggctagctagtcgtgcaggaagaggaaggaatataatggctgagcgggaggtcgtcgaaggcgggacgacgacgggaggcgggctgtggcggaggtatgcgccgcacgtccagatggtgctggcgcagctgtgctacacgctcatgtacttcatcaccgaggccgccttcaaccagggtctcaacccctacgtctacatcacctaccgccatctgctcgtcgccgtcctcatctggcccttcgcatactacctggagaaggggctgaggcctaaaatgacgctcatgctgttcgtggagatattcgtgctctcccttctcgggcgtcgtctctgaagaggtaccccgcccagctctcgctgacggcgtggatgtgcacggtcgggggcatccagtcgaccgtgttcacgctgttcatgcagcacgagccggaggaatggcgcatcggcttcggcgtcaagttctggagcatcgtctactctggcctcgcctgcaacggcttcacggtgttcgtgcagctctggtgcaccgagaagaaaggccccgtcttcgtcaccatgttcaaccccctctccaccatcatggtcgccatcctggcctacttcatcttcggcgaaaacctatacgtcgggagcatcgtcggaggcggggttgtgattctgggcctctacatgctgctgtgggggaaggagaaagaccaggagcggggcacgggcaaagagcgggaacagctcgagacggactgcgagaagcaggcgaagaaggtcagcgactgtgtctacgaagcgcccaagacgacgaagtgactgccgccggccatgagcggcagacggctcaatcaagcgccatgccgtgctccagttcggttctatatttgtgatgtacagagtcaccgatccggtctcgcctcatcagctatgtatatatatgcatatgcaatgcggcaacagacagacgtctggctcagtctgtgaaaccgtgaacctgccctgaagctggagttttttggaaccgtaatatcaccaacactgggcttctgaaaatcggtatcccgaacaacgcaattggaattttagtattataatccgttgaacttcggaatttcggtatctgagtaagatttag

SEQ ID NO: 6435 - DNA, 1954 bp, Zea Mays
ttcagcttcatctcaccgattaggagaacacaccatcagttttcttgcatctttctttttttgacacaagtaaacccagcttttgtagaaagcaaacagctagcgtctggattctgtaaccatctcctcctacaatcgtatagcgatttgcccggcacatccaagccgacgcagacaccacagcagcgacaagttccctgctgctgcttgttcaggaagccaagggaggagaagaggagagcagagcagagattcggaaatgctatgtcgccgtctggctgttgctgtgcgcgcgttcaggccgccgtagctatcacctgtcaggctatcgcgtactacgtccacggtgacagcaccatgcatgcatcgggtatttttattcaggcagtagtggcctgcgtgactgggtgggagcggatcgagcagaggggtagacgaagacttctcttcaccatcccacggcacggcacgtcaacacaacaaggaagaggaaggaatataatggctgagcgggaggtcgtcgaaggcgggacgacgacgggaggcgggctgtggcggaggtatgcgccgcacgtccagatggtgctggcgcagctgtgctacacgctcatgtacttcatcaccgaggccgccttcaaccagggtctcaacccctacgtctacatcacctaccgccatctgctcgtcgccgtcctcatctggcccttcgcatactacctggagaaggggctgaggcctaaaatgacgctcatgctgttcgtggagatattcgtgctctcccttctcggggtgagcttaactctgaacatgtacttcacgagcctgaagtacacgtccccaacgttcgtcacttccgtggtgaacaccatcgcctcgatgacgttcgtcatcgccatcatcctcaggatggagatcgtggacgtgaagagcctacgcggggtcgccaaggtcgcagggaccgtggtgtcgttcgccggggtgaccaccatgactctgtacaaaggagcggccatcacgagcctctggaagtcgcctgttcagatcgccggcagcggcagcggcggcggaggcgtcgcccacgacagctgggtgaaagggtcagtcctcgcagtggccagctgcgtgtgctggtccatctggtacatcatgcaggcgtcgtctctgaagaggtaccccgcccagctctcgctgacggcgtggatgtgcacggtcgggggcatccagtcgaccgtgttcacgctgttcatgcagcacgagccggaggaatggcgcatcggcttcggcgtcaagttctggagcatcgtctactctggcctcgcctgcaacggcttcacggtgttcgtgcagctctggtgcaccgagaagaaaggccccgtcttcgtcaccatgttcaaccccctctccaccatcatggtcgccatcctggcctacttcatcttcggcgaaaacctatacgtcgggagcatcgtcggaggcggggttgtgattctgggcctctacatgctgctgtgggggaaggagaaagaccaggagcggggcacgggcaaagagcgggaacagctcgagacggactgcgagaagcaggcgaagaaggtcagcgactgtgtctacgaagcgcccaagacgacgaagtgactgccgccggccatgagcggcagacggctcaatcaagcgccatgccgtgctccagttcggttctatatttgtgatgtacagagtcaccgatccggtctcgcctcatcagctatgtatatatatgcatatgcaatgcggcaacagacagacgtctggctcagtctgtgaaaccgtgaacctgccctgaagctggagttttttggaaccgtaatatcaccaacactgggcttctgaaaatcggtatcccgaacaacgcaattggaattttagtattataatccgttgaacttcggaatttcggtatctgagtaagatttag

SEQ ID NO: 6436 - DNA, 628 bp, Zea Mays
atagttcttgtctcctttaataaaatttactggaagcggcagcgaagagctagctctagcagcgcgttgcggcggctatgtatgttgtgcatcagctagcgtttcattagttcttgttgtacttgtcctccgcgagcagctcctccaagaccctgtcgtcgaggcactccagctccaccttctccgagtcgggaacacgggccctccccctgctggccggagccgacgtggtggacgaggaggagccgccgctggtccggccgccgggagccgcgccagctgacgatcctccgctggcggggaagttgagcacggccgtggcgcccttcatggcgaatgcggcgcggtcgtaggccctggcggcctcctcggcggtgtcgaaggtgccgagccagacgcgggagccgccgcgctccgggtcccggatctccgcggcgaacttgccccacggccgcttccgcacgccgcggtacttgccctccttcttgtcgtcctccattaatcttagtagttcagcttgattcagcaagctatagcgagcaatagactatatatagtacgtatatactactagctagctctgtgatatattgtatagtcgtgctacactctctatataaccgggcta

SEQ ID NO: 6437 - DNA, 1729 bp, Zea Mays
aacatctcgccgtcatcacgtctctctttcaacttcgttcgcaagaagctcagaacagaacccatcaaaagcgaggctgcgagagagagagagagagagagagagagagagcgagagagagagagagagagagagagagagagagagagagagagagagagagagtgagtgagggaggcgccgccgcgccgacgccgagtcctttctccatcctgcatctgccgctgtttccgacaggatgtttctcacgaggacggagtacgaccgcggggtgaacaccttctctccggaggggcggctgttccaggtcgagtacgccatcgaggccatcaagttgggatccactgcgatcggtttgaagacaaaggatggtgttgtactcgccgttgagaaacgtgtgacctcaccactgctggaaccaagcagtgtggaaaaaataatggaaattgatgagcacataggctgtgccatgagtggacttattgctgatgctagaacactagtggaacatgctcgtgttgaaactcaggttctcatacggagagccaatgactgtagaatcttcgacacaagctatctgtgacttagctctgcgttttggcgaaggtgacgaagagtcaatgtcacggccatttggagtctctctcctaattgctggacatgatgagaatggacctagcctgtactacactgacccatctggtacattttggcaatgcaacgcaaaggcaattggatcaggttctgagggagctgatagttccttgcaggaacagtacaacaaggaattgaccctccaggaggcggagaccatagccctttctatcctgaagcaggttatggaagagaaggtgaccccaaacaacgtcgatattgccaaggttgcccccaagtaccacctctacacccctgccgaggtggaagccgtcatcgcgaggctgtgaaacgcttccgagctcttgctatccacgtcatcaatcggtaatagacgacccttgtacgaagcgtgggcaccatggtccttgattatggcttgattatggcaaggacagtcgatgttagtttgattcacagctcagccgggctcacttgtctttttaaatttttatgaattagcgttgagaactttgtactgccaagaaagttcattttttttaccctttcggtttctccgtttttgtgggcaattagctggtgctcgtgatgtgattgcagcctggaatttccagtcctgcgtgaaacggcagcggcggtatcctctgcttttcacgcgccagtcatttatttttgaatgaaaaaaaatacacgccctgcggtgggtacccgtaaaagtcgtccgtcgcccgacggaggcggcggccctccagtctccagttgaggccgcggcgggtggtggccgcgaccgcgaggggtttgggatgtgggtgggtgtggccgtgtgccgccggtgcgtgacgatcttgcccaggtttggcatgtaacgcggattcctcttggcgttcggggaaggatggtctccttttcgtaaggaagctcgcgcaggggtttccagcgcccgcagtggagaatcagcattcggtcccatcaaccttgactatggatggctagtggagatgtcgagtggaaaagctagccaagggatctttgtggtacaaggacactttgcgatgcatttgtcggtggatggagacaggtgttggcgtccttccccgccaaaaaagaaaagaaa

SEQ ID NO: 6438 - DNA, 354 bp, Zea Mays
aacatctcgccgtcatcacgtctctctttcaacttcgttcgcaagaagctcagaacagaacccatcaaaagcgaggctgcgagagagagagagagagagagagagagagagcgagagagagagagagagagagagagagagagagagagagagagagagagagagtgagtgagggaggcgccgccgcgccgacgccgagtcctttctccatcctgcatctgccgctgtttccgacaggatgtttctcacgaggacggagtacgaccgcggggtgaacaccttctctccggaggggcggctgttccaggtcgagtacgccatcgaggccatcaaggtagagggcgaggtgctgga

SEQ ID NO: 6439 - DNA, 570 bp, Zea Mays
accagcctcacttcactaattctgggcaaagcaagcaccgctacttgaagcatcttacacgaagctcttctagctattcctcttcccgcgaagaagtggtaatctgcttgatcagtaagtacacaataatggaccgggtgacgaagctggcttctcagcgtgcggtggtgatcttcagcgcgagctcatgctgcatgtgccacacggtgacgcgtctgttccgcgagctcggggtgaacccaacggtggtggagctagacgaggaccccagctggggaaaggagatggagaaggcactagcgaggctgctgggccgcagccctgcggtgccggcagtgttcatcgggggcaggctcgtcggctccaccgacaaggtcatgtcgctccacctcagcggcaatctcgacacaatgctacgcaacgcgggcgcactctgggtgtagtgcaagtgcagtgcagtgccagctgctctggagcgtttggttgtccacagataaaagaatctgttcttctcccgttatctacgcagtctggaataccaagattatgtgtggagagacaaaatccaaa

SEQ ID NO: 6440 - DNA, 2369 bp, Zea Mays
ttattgagaaatttaattgtactcatctatctaatctactttctctctcctcccccgtcccgtcgcttcgatcccccgagcttcgctcacaccggtcacctccgcctcctcccgcttcgcgcgcatctccttctatcgctccagcctccagcacacgtcctccatgccctcgcggttctgatccggccatagccatgcagcaccgctcgccggaggcggcttcggcatccgcctccccgacggccgcggcggtggaggccatggcgccgggcgtcggcggggttgagccggccgtgacgctcgaccaggttccgcgctggagcgacccggaccagcgcatctccctgctgtcccccaccgccgccggatccgagaccccggcctcgtccttcctctccttctccgacccgctcaccggcgacgacgcggccgcgggggccgggggccgtggcgcgtcgcggttccccgtcgattacgagatcaactcgaagatctacctctggcgaggccatccgtggaacctcgaggtcgacgccgtcgtcaactccaccaacgagaacttggacgaagctcatagcagtcctgggctccacgctgctgcaggttcggggctcgccgaggagtgcgccaccctgggtggctgccgcactgggatggctaagatgacaaatgcttatgatttgcctgccaggaaggtcatccatactgtgggcccaaaatatgctgtaaagtatcacacagctgcagagaatgcgcttagccactgctacaggtcttgtctagaactgctcattgagaatggccttgaaagaagccaagaattatcctcgtgaaccagctgctcatgtggcaataagaactgtgagacgttttctggagaaacaaaaggacaaaataacagctattgtcttctgtacgatatcatcatctgacacagagatatataagaggttgcttccactatatttccctcgggacaagcaagaagaagagatagccgcattgaaacttccagctgatgttggggatgagaatggtgagacagtaatagatgaaaggaaaataagaataaagcccttgcctgctggggaagcaaatagcaaaacaccaattcctacacttgcagatatcccgcttcctgattcgagtttgacacgtagaaggaattctttcaagttggactcatatttggatcctgcttttatgtctataattaaggatcctgatctccgacgcaaggagcaatgggaaaaatctcaggcaaacaagggacttaacttggctaacatgcttgggtttggtgatcttggcagtccaccattatctgctgctgaagaatattcacttcattcacgataccttgctaaagcgaattctatgaatctgtcagatgttgctgaaatgaaaataatttaccgtggaggagttgatagtgaagggcgtccagttatggtcattgttggtgctcactttcttcttcgctgcttggatctggaacgatttgttctatatgtagtaaaggaatttgaatctctgattcagaagccttacacaattgtctatttccactctgtggcatcattacaaccacagcctgatttaggattcatgaaacggttacaacagatactaggtcggaagcataaaaaaaatcttcatactatatacatactccacccgacactgggactgagaacagccgttatggcgatgcaactttttgttgacggggaggtctggaagaaagttgtatatgtcgacagacttgtgcagctattcagatatgtaccacgtgaacagctcaccattcctgattttgtgttccagcatgaccttgaagtgaatggtggaaagggcataatcgttgacccaagaacaaagcatatctaccagagaccatctggttgatctgtcataaacctgcaaatgaacgcttcacagtaccactctcactatgcacagactctccatgaatgactctgtccagtcctctgtagaagagtacccttctagagctgtgcattttgtatctagttgacattgttgctctgtgctattccttcgcctttttgggaggcatatttatgtatcttaataactattctgtataaacaaaaaaaatgctaaatgtctctcaatttgcctatagctgggcgtgctcgttaggttctgtaaatttttgacaggtccatagatattgagaaataggattgcagtctgttccgtctgagtaattgatcgccttggaatgtcttaataggctgaagactgatctgtttgctgttgcaaacaataagtagcaagtcccaaaggcgaggaagcataaactctggtctattttgcttttggttaactgcatgagatagtct

SEQ ID NO: 6441 - DNA, 2456 bp, Zea Mays
ttattgagaaatttaattgtactcatctatctaatctactttctctctcctcccccgtcccgtcgcttcgatcccccgagcttcgctcacaccggtcacctccgcctcctcccgcttcgcgcgcatctccttctatcgctccagcctccagcacacgtcctccatgccctcgcggttctgatccggccatagccatgcagcaccgctcgccggaggcggcttcggcatccgcctccccgacggccgcggcggtggaggccatggcgccgggcgtcggcggggttgagccggccgtgacgctcgaccaggttccgcgctggagcgacccggaccagcgcatctccctgctgtcccccaccgccgccggatccgagaccccggcctcgtccttcctctccttctccgacccgctcaccggcgacgacgcggccgcgggggccgggggccgtggcgcgtcgcggttccccgtcgattacgagatcaactcgaagatctacctctggcgaggccatccgtggaacctcgaggtcgacgccgtcgtcaactccaccaacgagaacttggacgaagctcatagcagtcctgggctccacgctgctgcaggttcggggctcgccgaggagtgcgccaccctgggtggctgccgcactgggatggctaagatgacaaatgcttatgatttgcctgccaggaaggtcatccatactgtgggcccaaaatatgctgtaaagtatcacacagctgcagagaatgcgcttagccactgctacaggtcttgtctagaactgctcattgagaatggccttgaaaggtttcacatcgaatgttcttcaacttttgcaagtaatttgttctgcctttgatgtggttagcattgctactggctgcatttacacagaagccaagaattatcctcgtgaaccagctgctcatgtggcaataagaactgtgagacgttttctggagaaacaaaaggacaaaataacagctattgtcttctgtacgatatcatcatctgacacagagatatataagaggttgcttccactatatttccctcgggacaagcaagaagaagagatagccgcattgaaacttccagctgatgttggggatgagaatggtgagacagtaatagatgaaaggaaaataagaataaagcccttgcctgctggggaagcaaatagcaaaacaccaattcctacacttgcagatatcccgcttcctgattcgagtttgacacgtagaaggaattctttcaagttggactcatatttggatcctgcttttatgtctataattaaggatcctgatctccgacgcaaggagcaatgggaaaaatctcaggcaaacaagggacttaacttggctaacatgcttgggtttggtgatcttggcagtccaccattatctgctgctgaagaatattcacttcattcacgataccttgctaaagcgaattctatgaatctgtcagatgttgctgaaatgaaaataatttaccgtggaggagttgatagtgaagggcgtccagttatggtcattgttggtgctcactttcttcttcgctgcttggatctggaacgatttgttctatatgtagtaaaggaatttgaatctctgattcagaagccttacacaattgtctatttccactctgtggcatcattacaaccacagcctgatttaggattcatgaaacggttacaacagatactaggtcggaagcataaaaaaaatcttcatactatatacatactccacccgacactgggactgagaacagccgttatggcgatgcaactttttgttgacggggaggtctggaagaaagttgtatatgtcgacagacttgtgcagctattcagatatgtaccacgtgaacagctcaccattcctgattttgtgttccagcatgaccttgaagtgaatggtggaaagggcataatcgttgacccaagaacaaagcatatctaccagagaccatctggttgatctgtcataaacctgcaaatgaacgcttcacagtaccactctcactatgcacagactctccatgaatgactctgtccagtcctctgtagaagagtacccttctagagctgtgcattttgtatctagttgacattgttgctctgtgctattccttcgcctttttgggaggcatatttatgtatcttaataactattctgtataaacaaaaaaaatgctaaatgtctctcaatttgcctatagctgggcgtgctcgttaggttctgtaaatttttgacaggtccatagatattgagaaataggattgcagtctgttccgtctgagtaattgatcgccttggaatgtcttaataggctgaagactgatctgtttgctgttgcaaacaataagtagcaagtcccaaaggcgaggaagcataaactctggtctattttgcttttggttaactgcatgagatagtct

SEQ ID NO: 6442 - DNA, 2391 bp, Zea Mays
ttattgagaaatttaattgtactcatctatctaatctactttctctctcctcccccgtcccgtcgcttcgatcccccgagcttcgctcacaccggtcacctccgcctcctcccgcttcgcgcgcatctccttctatcgctccagcctccagcacacgtcctccatgccctcgcggttctgatccggccatagccatgcagcaccgctcgccggaggcggcttcggcatccgcctccccgacggccgcggcggtggaggccatggcgccgggcgtcggcggggttgagccggccgtgacgctcgaccaggttccgcgctggagcgacccggaccagcgcatctccctgctgtcccccaccgccgccggatccgagaccccggcctcgtccttcctctccttctccgacccgctcaccggcgacgacgcggccgcgggggccgggggccgtggcgcgtcgcggttccccgtcgattacgagatcaactcgaagatctacctctggcgaggccatccgtggaacctcgaggtcgacgccgtcgtcaactccaccaacgagaacttggacgaagctcatagcagtcctgggctccacgctgctgcaggttcggggctcgccgaggagtgcgccaccctgggtggctgccgcactgggatggctaagatgacaaatgcttatgatttgcctgccaggtcatccatactgtgggcccaaaatatgctgtaaagtatcacacagctgcagagaatgcgcttagccactgctacaggtcttgtctagaactgctcattgagaatggccttgaaagcattgctactggctgcatttacacagaagccaagaattatcctcgtgaaccagctgctcatgtggcaataagaactgtgagacgttttctggagaaacaaaaggacaaaataacagctattgtcttctgtacgatatcatcatctgacacagagatatataagaggttgcttccactatatttccctcgggacaagcaagaagaagagatagccgcattgaaacttccagctgatgttggggatgagaatggtgagacagtaatagatgaaaggaaaataagaataaagcccttgcctgctggggaagcaaatagcaaaacaccaattcctacacttgcagatatcccgcttcctgattcgagtttgacacgtagaaggaattctttcaagttggactcatatttggatcctgcttttatgtctataattaaggatcctgatctccgacgcaaggagcaatgggaaaaatctcaggcaaacaagggacttaacttggctaacatgcttgggtttggtgatcttggcagtccaccattatctgctgctgaagaatattcacttcattcacgataccttgctaaagcgaattctatgaatctgtcagatgttgctgaaatgaaaataatttaccgtggaggagttgatagtgaagggcgtccagttatggtcattgttggtgctcactttcttcttcgctgcttggatctggaacgatttgttctatatgtagtaaaggaatttgaatctctgattcagaagccttacacaattgtctatttccactctgtggcatcattacaaccacagcctgatttaggattcatgaaacggttacaacagatactaggtcggaagcataaaaaaaatcttcatactatatacatactccacccgacactgggactgagaacagccgttatggcgatgcaactttttgttgacggggaggtctggaagaaagttgtatatgtcgacagacttgtgcagctattcagatatgtaccacgtgaacagctcaccattcctgattttgtgttccagcatgaccttgaagtgaatggtggaaagggcataatcgttgacccaagaacaaagcatatctaccagagaccatctggttgatctgtcataaacctgcaaatgaacgcttcacagtaccactctcactatgcacagactctccatgaatgactctgtccagtcctctgtagaagagtacccttctagagctgtgcattttgtatctagttgacattgttgctctgtgctattccttcgcctttttgggaggcatatttatgtatcttaataactattctgtataaacaaaaaaaatgctaaatgtctctcaatttgcctatagctgggcgtgctcgttaggttctgtaaatttttgacaggtccatagatattgagaaataggattgcagtctgttccgtctgagtaattgatcgccttggaatgtcttaataggctgaagactgatctgtttgctgttgcaaacaataagtagcaagtcccaaaggcgaggaagcataaactctggtctattttgcttttggttaactgcatgagatagtct

SEQ ID NO: 6443 - DNA, 2423 bp, Zea Mays
ttattgagaaatttaattgtactcatctatctaatctactttctctctcctcccccgtcccgtcgcttcgatcccccgagcttcgctcacaccggtcacctccgcctcctcccgcttcgcgcgcatctccttctatcgctccagcctccagcacacgtcctccatgccctcgcggttctgatccggccatagccatgcagcaccgctcgccggaggcggcttcggcatccgcctccccgacggccgcggcggtggaggccatggcgccgggcgtcggcggggttgagccggccgtgacgctcgaccaggttccgcgctggagcgacccggaccagcgcatctccctgctgtcccccaccgccgccggatccgagaccccggcctcgtccttcctctccttctccgacccgctcaccggcgacgacgcggccgcgggggccgggggccgtggcgcgtcgcggttccccgtcgattacgagatcaactcgaagatctacctctggcgaggccatccgtggaacctcgaggtcgacgccgtcgtcaactccaccaacgagaacttggacgaagctcatagcagtcctgggctccacgctgctgcaggttcggggctcgccgaggagtgcgccaccctgggtggctgccgcactgggatggctaagatgacaaatgcttatgatttgcctgccaggaaggtcatccatactgtgggcccaaaatatgctgtaaagtatcacacagctgcagagaatgcgcttagccactgctacaggtcttgtctagaactgctcattgagaatggccttgaaagtaatttgttctgcctttgatgtggttagcattgctactggctgcatttacacagaagccaagaattatcctcgtgaaccagctgctcatgtggcaataagaactgtgagacgttttctggagaaacaaaaggacaaaataacagctattgtcttctgtacgatatcatcatctgacacagagatatataagaggttgcttccactatatttccctcgggacaagcaagaagaagagatagccgcattgaaacttccagctgatgttggggatgagaatggtgagacagtaatagatgaaaggaaaataagaataaagcccttgcctgctggggaagcaaatagcaaaacaccaattcctacacttgcagatatcccgcttcctgattcgagtttgacacgtagaaggaattctttcaagttggactcatatttggatcctgcttttatgtctataattaaggatcctgatctccgacgcaaggagcaatgggaaaaatctcaggcaaacaagggacttaacttggctaacatgcttgggtttggtgatcttggcagtccaccattatctgctgctgaagaatattcacttcattcacgataccttgctaaagcgaattctatgaatctgtcagatgttgctgaaatgaaaataatttaccgtggaggagttgatagtgaagggcgtccagttatggtcattgttggtgctcactttcttcttcgctgcttggatctggaacgatttgttctatatgtagtaaaggaatttgaatctctgattcagaagccttacacaattgtctatttccactctgtggcatcattacaaccacagcctgatttaggattcatgaaacggttacaacagatactaggtcggaagcataaaaaaaatcttcatactatatacatactccacccgacactgggactgagaacagccgttatggcgatgcaactttttgttgacggggaggtctggaagaaagttgtatatgtcgacagacttgtgcagctattcagatatgtaccacgtgaacagctcaccattcctgattttgtgttccagcatgaccttgaagtgaatggtggaaagggcataatcgttgacccaagaacaaagcatatctaccagagaccatctggttgatctgtcataaacctgcaaatgaacgcttcacagtaccactctcactatgcacagactctccatgaatgactctgtccagtcctctgtagaagagtacccttctagagctgtgcattttgtatctagttgacattgttgctctgtgctattccttcgcctttttgggaggcatatttatgtatcttaataactattctgtataaacaaaaaaaatgctaaatgtctctcaatttgcctatagctgggcgtgctcgttaggttctgtaaatttttgacaggtccatagatattgagaaataggattgcagtctgttccgtctgagtaattgatcgccttggaatgtcttaataggctgaagactgatctgtttgctgttgcaaacaataagtagcaagtcccaaaggcgaggaagcataaactctggtctattttgcttttggttaactgcatgagatagtct

SEQ ID NO: 6444 - DNA, 2316 bp, Zea Mays
ttattgagaaatttaattgtactcatctatctaatctactttctctctcctcccccgtcccgtcgcttcgatcccccgagcttcgctcacaccggtcacctccgcctcctcccgcttcgcgcgcatctccttctatcgctccagcctccagcacacgtcctccatgccctcgcggttctgatccggccatagccatgcagcaccgctcgccggaggcggcttcggcatccgcctccccgacggccgcggcggtggaggccatggcgccgggcgtcggcggggttgagccggccgtgacgctcgaccaggttccgcgctggagcgacccggaccagcgcatctccctgctgtcccccaccgccgccggatccgagaccccggcctcgtccttcctctccttctccgacccgctcaccggcgacgacgcggccatccgtggaacctcgaggtcgacgccgtcgtcaactccaccaacgagaacttggacgaagctcatagcagtcctgggctccacgctgctgcaggttcggggctcgccgaggagtgcgccaccctgggtggctgccgcactgggatggctaagatgacaaatgcttatgatttgcctgccaggaaggtcatccatactgtgggcccaaaatatgctgtaaagtatcacacagctgcagagaatgcgcttagccactgctacaggtcttgtctagaactgctcattgagaatggccttgaaagcattgctactggctgcatttacacagaagccaagaattatcctcgtgaaccagctgctcatgtggcaataagaactgtgagacgttttctggagaaacaaaaggacaaaataacagctattgtcttctgtacgatatcatcatctgacacagagatatataagaggttgcttccactatatttccctcgggacaagcaagaagaagagatagccgcattgaaacttccagctgatgttggggatgagaatggtgagacagtaatagatgaaaggaaaataagaataaagcccttgcctgctggggaagcaaatagcaaaacaccaattcctacacttgcagatatcccgcttcctgattcgagtttgacacgtagaaggaattctttcaagttggactcatatttggatcctgcttttatgtctataattaaggatcctgatctccgacgcaaggagcaatgggaaaaatctcaggcaaacaagggacttaacttggctaacatgcttgggtttggtgatcttggcagtccaccattatctgctgctgaagaatattcacttcattcacgataccttgctaaagcgaattctatgaatctgtcagatgttgctgaaatgaaaataatttaccgtggaggagttgatagtgaagggcgtccagttatggtcattgttggtgctcactttcttcttcgctgcttggatctggaacgatttgttctatatgtagtaaaggaatttgaatctctgattcagaagccttacacaattgtctatttccactctgtggcatcattacaaccacagcctgatttaggattcatgaaacggttacaacagatactaggtcggaagcataaaaaaaatcttcatactatatacatactccacccgacactgggactgagaacagccgttatggcgatgcaactttttgttgacggggaggtctggaagaaagttgtatatgtcgacagacttgtgcagctattcagatatgtaccacgtgaacagctcaccattcctgattttgtgttccagcatgaccttgaagtgaatggtggaaagggcataatcgttgacccaagaacaaagcatatctaccagagaccatctggttgatctgtcataaacctgcaaatgaacgcttcacagtaccactctcactatgcacagactctccatgaatgactctgtccagtcctctgtagaagagtacccttctagagctgtgcattttgtatctagttgacattgttgctctgtgctattccttcgcctttttgggaggcatatttatgtatcttaataactattctgtataaacaaaaaaaatgctaaatgtctctcaatttgcctatagctgggcgtgctcgttaggttctgtaaatttttgacaggtccatagatattgagaaataggattgcagtctgttccgtctgagtaattgatcgccttggaatgtcttaataggctgaagactgatctgtttgctgttgcaaacaataagtagcaagtcccaaaggcgaggaagcataaactctggtctattttgcttttggttaactgcatgagatagtct

SEQ ID NO: 6445 - DNA, 2075 bp, Zea Mays
ttattgagaaatttaattgtactcatctatctaatctactttctctctcctcccccgtcccgtcgcttcgatcccccgagcttcgctcacaccggtcacctccgcctcctcccgcttcgcgcgcatctccttctatcgctccagcctccagcacacgtcctccatgccctcgcggttctgatccggccatagccatgcagcaccgctcgccggaggcggcttcggcatccgcctccccgacggccgcggcggtggaggccatggcgccgggcgtcggcggggttgagccggccgtgacgctcgaccaggttccgcgctggagcgacccggaccagcgcatctccctgctgtcccccaccgccgccggatccgagaccccggcctcgtccttcctctccttctccgacccgctcaccggcgacgacgcggccgcgggggccgggggccgtggcgcgtcgcggttccccgtcgattacgagatcaactcgaagatctacctctggcgaggccatccgtggaacctcgaggtcgacgccgtcgtcaactccaccaacgagaacttggacgaagctcatagcagtcctgggctccacgctgctgcaggttcggggctcgccgaggagtgcgccaccctgggtggctgccgcactgggatggctaagatgacaaatgcttatgatttgcctgccaggaaggtcatccatactgtgggcccaaaatatgctgtaaagtatcacacagctgcagagaatgcgcttagccactgctacaggtcttgtctagaactgctcattgagaatggccttgaaagcattgctactggctgcatttacacagaagccaagaattatcctcgtgaaccagctgctcatgtggcaataagaactgtgagacgttttctggagaaacaaaaggacaaaataacagctattgtcttctgtacgatatcatcatctgacacagagatatataagaggttgcttccactatatttccctcgggacaagcaagaagaagagatagccgcattgaaacttccagctgatgttggggatgagaatggtgagacagtaatagatgaaaggaaaataagaataaagcccttgcctgctggggaagcaaatagcaaaacaccaattcctacacttgcagatatcccgcttcctgattcgagtttgacacgtagaaggaattctttcaagttggactcatatttggatcctgcttttatgtctataattaaggatcctgatctccgacgcaaggagcaatgggaaaaatctcaggcaaacaagggacttaacttggctaacatgcttgggtttggtgatcttggcagtccaccattatctgctgctgaagaatattcacttcattcacgataccttgctaaagcgaattctatgaatctgtcagatgttgctgaaatgaaaataatttaccgtggaggagttgatagtgaagggcgtccagttatggtcattgttggtgctcactttcttcttcgctgcttggatctggaacgatttgttctatatgtagtaaaggaatttgaatctctgattcagaagccttacacaattgtctatttccactctgtggcatcattacaaccacagcctgatttaggattcatgaaacggttacaacagatactaggtcggaagcataaaaaaaatcttcatactatatacatactccacccgacactgggactgagaacagccgttatggcgatgcaactttttgttgacggggaggtctggaagaaagttgtatatgtcgacagacttgtgcagctattcagatatgtaccacgtgaacagctcaccattcctgattttgtgttccagcatgaccttgaagtgaatggtggaaagggcataatcgttgacccaagaacaaagcatatctaccagagaccatctggttgatctgtcataaacctgcaaatgaacgcttcacagctgaagactgatctgtttgctgttgcaaacaataagtagcaagtcccaaaggcgaggaagcataaactctggtctattttgcttttggttaactgcatgagatagtct

SEQ ID NO: 6446 - DNA, 2340 bp, Zea Mays
ttattgagaaatttaattgtactcatctatctaatctactttctctctcctcccccgtcccgtcgcttcgatcccccgagcttcgctcacaccggtcacctccgcctcctcccgcttcgcgcgcatctccttctatcgctccagcctccagcacacgtcctccatgccctcgcggttctgatccggccatagccatgcagcaccgctcgccggaggcggcttcggcatccgcctccccgacggccgcggcggtggaggccatggcgccgggcgtcggcggggttgagccggccgtgacgctcgaccaggttccgcgctggagcgacccggaccagcgcatctccctgctgtcccccaccgccgccggatccgagaccccggcctcgtccttcctctccttctccgacccgctcaccggcgacgacgcggccgcgggggccgggggccgtggcgcgtcgcggttccccgtcgattacgagatcaactcgaagatctacctctggcgaggccatccgtggaacctcgaggtcgacgccgtcgtcaactccaccaacgagaacttggacgaagctcatagcagtcctgggctccacgctgctgcaggttcggggctcgccgaggagtgcgccaccctgggtggctgccgcactgggatggctaagatgacaaatgcttatgatttgcctgccaggaaggtcatccatactgtgggcccaaaatatgctgtaaagtatcacacagctgcagagaatgcgcttagccactgctacaggtcttgtctagaactgctcattgagaatggccttgaaagcattgctactggctgcatttacacagaagccaagaattatcctcgtgaaccagctgctcatgtggcaataagaactgtgagacgttttctggagaaacaaaaggacaaaataacagctattgtcttctgtacgatatcatcatctgacacagagatatataagaggttgcttccactatatttccctcgggacaagcaagaagaagagatagccgcattgaaacttccagctgatgttggggatgagaatggtgagacagtaatagatgaaaggaaaataagaataaagcccttgcctgctggggaagcaaatagcaaaacaccaattcctacacttgcagatatcccgcttcctgattcgagtttgacacgtagaaggatcctgatctccgacgcaaggagcaatgggaaaaatctcaggcaaacaagggacttaacttggctaacatgcttgggtttggtgatcttggcagtccaccattatctgctgctgaagaatattcacttcattcacgataccttgctaaagcgaattctatgaatctgtcagatgttgctgaaatgaaaataatttaccgtggaggagttgatagtgaagggcgtccagttatggtcattgttggtgctcactttcttcttcgctgcttggatctggaacgatttgttctatatgtagtaaaggaatttgaatctctgattcagaagccttacacaattgtctatttccactctgtggcatcattacaaccacagcctgatttaggattcatgaaacggttacaacagatactaggtcggaagcataaaaaaaatcttcatactatatacatactccacccgacactgggactgagaacagccgttatggcgatgcaactttttgttgacggggaggtctggaagaaagttgtatatgtcgacagacttgtgcagctattcagatatgtaccacgtgaacagctcaccattcctgattttgtgttccagcatgaccttgaagtgaatggtggaaagggcataatcgttgacccaagaacaaagcatatctaccagagaccatctggttgatctgtcataaacctgcaaatgaacgcttcacagtaccactctcactatgcacagactctccatgaatgactctgtccagtcctctgtagaagagtacccttctagagctgtgcattttgtatctagttgacattgttgctctgtgctattccttcgcctttttgggaggcatatttatgtatcttaataactattctgtataaacaaaaaaaatgctaaatgtctctcaatttgcctatagctgggcgtgctcgttaggttctgtaaatttttgacaggtccatagatattgagaaataggattgcagtctgttccgtctgagtaattgatcgccttggaatgtcttaataggctgaagactgatctgtttgctgttgcaaacaataagtagcaagtcccaaaggcgaggaagcataaactctggtctattttgcttttggttaactgcatgagatagtct

SEQ ID NO: 6447 - DNA, 1694 bp, Zea Mays
cacaccgtcacgtatccggcatcaacgatcctccgttcccatcttccttatccagatggcggcgccggccaactccaccaccttctccggcgacgtgtgggcggagctccgcctggccgacgcccgcgacgtgccgcacatccaccgcctcatacaccatatggccgagttcgagctgctcaccgacctcttcgccgccaccgaagagctcctcacgtccacgctcttcccatcgccgacgccgcctcccttcacctccttcacagccctcgtccttgacctatcccccacccccatcctcccggactcctcttccaccatcgcctcccgccgcctcgacctctccgcgtccccgctcgcagacccggaggccgccaccttcgcctccccgcgcggcggcgggcgcgtcacggccgggttcgtgatctgcttccccaactactccaccttcctctccaagcccgggctgtacgttgaggacatcttcgtgcgcgcaccctggcgccgccgcggccttggccggatgatgctgtctgccgtcgccggcagggccgccgagctcgggatgggccgggtggagtggtgcgtgctcgactggaacaagaacgccatcgacttctacgaggggatgggcgccgatgtgctcccgcagtggcgcatctgccggctcgccggcgcagcccttgacaaatacaaggtcagccagaaggaggccgccggtgggaaggctgcagagtaggagggcctggaaattcgcttattgagagtgcctgccaataataaaggtggtggatttgcttgcgctgcttagctctggcatggtttagaactagatgattagtgattcagtgcatttgatcagctcattagggcgagatgggcaatcgggacttgttgtggtataaaccttgctgcattatgctagactgtcttctgatttgatgcacaagtatgtctttatgtttagtcatttcagcctgaacatgccttttccttgtcgatcagagtctcagctgagctgcttcaaaagaattcaccggggaaattcctacttttttaagggaaaataaactctcttgaaaaaatagaaatcttttagaaaataagtttcttaaactagcccttattatcgttattgctgttttccttggcccctggtccaagctttggctttcttcatcttctttccctgtacggccggagctcgcctttcttctcaagaaaacgctcgatataaattcacacgaggccaccccgttcgtcgccaccattgcagcaacatcttctcttagctccagtttcttagcgtctcgtctcgtctcgtctctgacctacgtacagagatcaagcagcaagtccacccttccatcaccgatggagaaggacggcgcgccgaagccggcggcggccaccgcaccggagccggaggggacccatcagccgacgtggtgggcacaaacgcagtgggccagcatcaagaggaaggcccgcggcgccagcgaatacgccatgctcaggacccgccagggcatcaccttgttcggagagcccaagctcgggtctttgatcaaggccaagggagcttcagccaacgatgagtcgtcccagtagtcatgcatgtgttcttgatgccacgggcggcagcaaacacggaaggctcattgctagccagtgtcattagtgtcaaggaagct

SEQ ID NO: 6448 - DNA, 2915 bp, Zea Mays
aaatggttatttaaatatagttattttcattttcatttgtttagataaagatgcaaaacaatgcatatcgaaaagttatcgaagagggaaaagattgagaatttttcaagataacaattttgagaaacactataaatttagaaagactgctatgacccctcgaccctcgtcttcatcttcccacttcagcccccaaacccgaacactcgcaatcgcaagtcgcaaatatctgtcgccgtctcgccaacagcaccaaccgcctcctagaactcgaccgccatggcgagccaaggcgagccgtcttcctccgatccgaaggggaagaaggattactcgacggcgatcctggagaggaagaagtcgccgaaccggctggtggtcgacgaggccaccaatgatgacaactccgtcgtcgctctgcacccggacaccatggagaggctccagctctttcgcggtgacacggtcctgctcaagggtaagaagagaaaggacactatctgcattgtgctcgcagacgagacgtgtgaggagccaaaggtccggatgaacaaggtcgtcaggaagaacttgagggttcggcttagtgatgtggtatctgtccatcaatgcccagatgtcaaatacgggaagcgtgtgcacatacttccaattgatgacaccattgaaggcatcactggcaacttatttgatgcctttctgaaaccatactttcttgaagcctatcgtcctttgaggaaaggagaccttttcctagtcaggggtggcatgagaagtgtagaattcaaagtcatagagactgatcctgcagagtattgtattgttgcaccagatacagaaatattctgtgagggtgagcctattaagagggaggatgaggaaagactcgatgaagttggctatgatgatgttggtggagttagaaagcagatggcccaaatcagagaactggttgaacttcccctgcgtcacccccagcttttcaagtctattggtgtgaagccaccaaagggcatattgctgtatgggcctcctggctctggcaagacccttattgctagagctgtagctaatgagacaggtgctttcttctttttgatcaatggaccagaaatcatgtcaaagctagcaggagaaagtgaaagcaacctcagaaaggcatttgaagaagctgagaaaaatgcaccttcaatcatttttattgatgagatagattccatagcacccaagagagaaaagacccatggagaagttgaaaggcgtattgtttcacagctcttgactcttatggatggcctcaagtctcgtgcacatgttattgttatgggtgccacaaaccgtccaaacagtatcgatcctgctcttagaaggtttggtcggtttgatcgtgagattgatatcggtgttccagatgaagttgggcgccttgaggttcttcggattcacacgaaaaacatgaagcttgctgaagatgttgacttggagatcattgcgaaggatactcatggttatgttggtgctgatcttgctgccctttgtactgaagctgctcttcaatgcattcgtgagaagatggatattatagatcttgaggatgagacaatagatgcggagatactgaactctatggctgtctcaaatgatcatttcaagactgcacttgggacaagcaacccatctgctctgcgtgaaactgttgttgaagtgccaaatgtctcttgggaagatattggtggcctggaaaatgttaagagggagctacaggagactgttcaatatccagtggagcatccagagaaatttgaaaagtttggcatgtctccttcaaagggtgttttgttttatggccctcctggctgtggcaagactttgttggccaaggcaattgccaatgaatgccaagctaacttcattagtgtgaagggtcctgaactgcttaccatgtggtttggtgagagtgaggccaatgtccgtgagatttttgacaaggctaggcagtctgctccatgtgtcctcttttttgatgagctcgactccattgctactcagagaggaagcagtgttggtgacgccggtggtgctgctgatagggtgttgaaccagctgcttactgagatggatggcatgaatgccaagaagacggtttttattatcggtgcaactaacagaccggacatcattgacccagccttgctgaggcctgggcgtcttgatcagcttatctatattcctctgcccgatgagcagtccaggcttcagatcttcaaagcctgtctcaggaagtctcctgtggccaaggatgttgacttgaatgctctcgccaaatacacccagggtttcagcggtgcagatatcacagagatctgccagcgcgcgtgcaagtatgccatcagggagaacatcgagaaggatatcgagagggagaggcgcagcaaagacaaccccgaggctatggaggaagacgaggtagacgacatcgctgagatcaaggctgctcacttcgaggagtccatgaagtacgcccgtcgcagcgtgagtgacgccgacatccgcaagtaccaggccttcgcccagacactccagcagtcccgcgggtttggcagcgagttccggttccccgaccaaccgacggcagctgctgctgcggccgatcccttcgcatccgctgcagcagcagctgacgatgatgacttatacagttaaattagcagtcctgtgttgtgacgcatattgagtactttgcttcgttatatgcttattatagtagactacgtgcaagacgcggagtcgctgtacctatataatacttaagttaatattttggtacgatcctctgaatcgtgccatgagccatggtttgtgttcatttgagattatcaaagatggccagctctaccattgtgaatgataaattt

SEQ ID NO: 6449 - DNA, 985 bp, Zea Mays
ctttgatgctttatacttggacactcggcatataacttgaaggttacggaatgactgaaacttgtgggatcatatctttagagtacccagaaaaaggacaaattcgtcaatttggttcaactggagcacttgtctcaggagttgaagcaaaaattgttgatgtagaaacattgatatgtctgccaccaaatcaactaggagaaatttgtgttcgaggaccgaacataatgcaagggtatttcaacaatgtgcaagctactgaatttacaatcaagcaagggtggttgcatactggtgatattggatactttgatgagggaggtcagcttttcgtagttgatagacttaaagaactgattaagtacaaaggttttcagattgcacctgccgagcttgaagggctacttctgtctcatccagaaattctggatgctgttgttatcccgttccccgatgctgaagctggtgaagttcctattgcttacgtcgtaaggtcctctgagagttctttgactgaagttgatgtccagaaatttattgaaaagcaggtcgcatactacaaaaaattgaggagggtgacctttgtggacagcgtaccaaaatctgcttcagggaagatcttgagaagagaactcatctctaaagtcagatcatccaagctatagcaagccggcttctgtgttcgtaatactgcttgcctcctatctactcccctcagtctaaattataagtcatagatcatagatgtatatcatatctaaatacatcgtatgcagagaagctagaacgacttccaatttgaaaatttgtcagattgagcgtaaaggtttacatgttactgagcggagcttatcaagcaatacattcagcttgacacagtttgtgggacatgtatacatggtggtgtcggatgacttgtatcgaatattgggcctgatttacattcactattcgaaaatagtacagatataaaacaaaactaaaa

SEQ ID NO: 6450 - DNA, 1473 bp, Zea Mays
gcgagacagagcggattacgcacctccacggctccccagtccccacgcaggccgctctgttctgccagcagttggcacaagcagcttgggcgcaaaagaacaactgcgatcgagcaagggacaatggcccgcaccgcggcgccggccgcgggctacggagaggacggagtgtaccactccgccaccggccaatccctcaccttcgccgcctttcgctccgccgtcctcaccacggccgtcgccctctcctcgcgcgcgggcgtccggcgcggcgacgtcgtcctcttcttcgcccccaactgcttcctctaccccgtctgcttcctgcccatgttccacatcttcggcttgtccgtcatcacgttcgcgcagatgcagcgtggcaattccgtcgtcgtgatgtcgcggtttgacatggactctgtgatggccgcggtgcagcggcaccgtgtcactcacctcttctgcgtgccgccggtcatgatagcgctcgccaagctcgggagcgttgggaaatatgacctcagctcgctcaggttcatcggctctggcgcagcaccgctcggcaaggacgtgatggagggagtggccaagaattttccagaagctgtgattgcccagggttacggaatgactgaaacttgtgggatcatatctttagagtacccagaaaaaggacaaattcgtcaatttggttcaactggagcacttgtctcaggagttgaagcaaaaattgttgatgtagaaacattgatatgtctgccaccaaatcaactaggagaaatttgtgttcgaggaccgaacataatgcaagggtatttcaacaatgtgcaagctactgaatttacaatcaagcaagggtggttgcatactggtgatattggatactttgatgagggaggtcagcttttcgtagttgatagacttaaagaactgattaagtacaaaggttttcagattgcacctgccgagcttgaagggctacttctgtctcatccagaaattctggatgctgttgttatcccgttccccgatgctgaagctggtgaagttcctattgcttacgtcgtaaggtcctctgagagttctttgactgaagttgatgtccagaaatttattgaaaagcaggtcgcatactacaaaaaattgaggagggtgacctttgtggacagcgtaccaaaatctgcttcagggaagatcttgagaagagaactcatctctaaagtcagatcatccaagctatagcaagccggcttctgtgttcagaagctagaacgacttccaatttgaaaatttgtcagattgagcgtaaaggtttacatgttactgagcggagcttatcaagcaatacattcagcttgacacagtttgtgggacatgtatacatggtggtgtcggatgacttgtatcgaatattgggcctgatttacattcactattcgaaaatagtacagatataaaacaaaactaaaa

SEQ ID NO: 6451 - DNA, 1497 bp, Zea Mays
gcgagacagagcggattacgcacctccacggctccccagtccccacgcaggccgctctgttctgccagcagttggcacaagcagcttgggcgcaaaagaacaactgcgatcgagcaagggacaatggcccgcaccgcggcgccggccgcgggctacggagaggacggagtgtaccactccgccaccggccaatccctcaccttcgccgcctttcgctccgccgtcctcaccacggccgtcgccctctcctcgcgcgcgggcgtccggcgcggcgacgtcgtcctcttcttcgcccccaactgcttcctctaccccgtctgcttcctgcccatgttccacatcttcggcttgtccgtcatcacgttcgcgcagatgcagcgtggcaattccgtcgtcgtgatgtcgcggtttgacatggactctgtgatggccgcggtgcagcggcaccgtgtcactcacctcttctgcgtgccgccggtcatgatagcgctcgccaagctcgggagcgttgggaaatatgacctcagctcgctcaggttcatcggctctggcgcagcaccgctcggcaaggacgtgatggagggagtggccaagaattttccagaagctgtgattgcccagggttacggaatgactgaaacttgtgggatcatatctttagagtacccagaaaaaggacaaattcgtcaatttggttcaactggagcacttgtctcaggagttgaagcaaaaattgttgatgtagaaacattgatatgtctgccaccaaatcaactaggagaaatttgtgttcgaggaccgaacataatgcaagggtatttcaacaatgtgcaagctactgaatttacaatcaagcaagggtggttgcatactggtgatattggatactttgatgagggaggtcagcttttcgtagttgatagacttaaagaactgattaagtacaaaggttttcaggttccccgatgctgaagctggtgaagttcctattgcttacgtcgtaaggtcctctgagagttctttgactgaagttgatgtccagaaatttattgaaaagcaggtcgcatactacaaaaaattgaggagggtgacctttgtggacagcgtaccaaaatctgcttcagggaagatcttgagaagagaactcatctctaaagtcagatcatccaagctatagcaagccggcttctgtgttcgtaatactgcttgcctcctatctactcccctcagtctaaattataagtcatagatcatagatgtatatcatatctaaatacatcgtatgcagagaagctagaacgacttccaatttgaaaatttgtcagattgagcgtaaaggtttacatgttactgagcggagcttatcaagcaatacattcagcttgacacagtttgtgggacatgtatacatggtggtgtcggatgacttgtatcgaatattgggcctgatttacattcactattcgaaaatagtacagatataaaacaaaactaaaa

SEQ ID NO: 6452 - DNA, 1499 bp, Zea Mays
gcgagacagagcggattacgcacctccacggctccccagtccccacgcaggccgctctgttctgccagcagttggcacaagcagcttgggcgcaaaagaacaactgcgatcgagcaagggacaatggcccgcaccgcggcgccggccgcgggctacggagaggacggagtgtaccactccgccaccggccaatccctcaccttcgccgcctttcgctccgccgtcctcaccacggccgtcgccctctcctcgcgcgcgggcgtccggcgcggcgacgtcgtcctcttcttcgcccccaactgcttcctctaccccgtctgcttcctgcccatgttccacatcttcggcttgtccgtcatcacgttcgcgcagatgcagcgtggcaattccgtcgtcgtgatgtcgcggtttgacatggactctgtgatggccgcggtgcagcggcaccgtgtcactcacctcttctgcgtgccgccggtcatgatagcgctcgccaagctcgggagcgttgggaaatatgacctcagctcgctcaggttcatcggctctggcgcagcaccgctcggcaaggacgtgatggagggagtggccaagaattttccagaagctgtgattgcccagggttacggaatgactgaaacttgtgggatcatatctttagagtacccagaaaaaggacaaattcgtcaatttggttcaactggagcacttgtctcaggagttgaagcaaaaattgttgatgtagaaacattgatatgtctgccaccaaatcaactaggagaaatttgtgttcgaggaccgaacataatgcaagggtatttcaacaatgtgcaagctactgaatttacaatcaagcaagggtggttgcatactggtgatattggatactttgatgagggaggtcagcttttcgtagttgatagacttaaagaactgattaagtacaaaggttttcagtcgaatttcatatttttcttcggcagattgcacctgccgagcttgaagggctacttctgtctcatccagaaattctggatgctgttgttatcccgttccccgatgctgaagctggtgaagttcctattgcttacgtcgtaaggtcctctgagagttctttgactgaagttgatgtccagaaatttattgaaaagcaggtcgcatactacaaaaaattgaggagggtgacctttgtggacagcgtaccaaaatctgcttcagggaagatcttgagaagagaactcatctctaaagtcagatcatccaagctatagcaagccggcttctgtgttcagaagctagaacgacttccaatttgaaaatttgtcagattgagcgtaaaggtttacatgttactgagcggagcttatcaagcaatacattcagcttgacacagtttgtgggacatgtatacatggtggtgtcggatgacttgtatcgaatattgggcctgatttacattcactattcgaaaatagtacagatataaaacaaaactaaaa

SEQ ID NO: 6453 - DNA, 1932 bp, Zea Mays
tatcattggagggagagtgcgagacagagcggattacgcacctccacggctccccagtccccacgcaggccgctctgttctgccagcagttggcacaagcagcttgggcgcaaaagaacaactgcgatcgagcaagggacaatggcccgcaccgcggcgccggccgcgggctacggagaggacggagtgtaccactccgccaccggccaatccctcaccttcgccgcctttcgctccgccgtcctcaccacggccgtcgccctctcctcgcgcgcgggcgtccggcgcggcgacgtcgtcctcttcttcgcccccaactgcttcctctaccccgtctgcttcttcgccgtcaccgccctcggcgccgtcgctaccacggccaaccccctctacacccctcgggaggtcgctaaacaggccaccgactcgcgggccaagctcgcaatcacggtctctgaactccttcccaaaatcgtggacctcggcttccccaccatcctgctcgacggcggcggcgacggcgacgcggccagtgccgccgcctccaagcctcagggagccagcgtgacgctttactcagacctcgtttccggggcgcgggagacggagtaccgccgcccgccgacgaagcagagcgacacgaccgcgctgatgtactcgtccggcacgacgggggcgagcaagggcgtaatcctgacacaccgcaacttcatctcggcggcggccatgatgacagcggaccaggacgcgctcggagaggggcccaacgtcttcctctgcttcctgcccatgttccacatcttcggcttgtccgtcatcacgttcgcgcagatgcagcgtggcaattccgtcgtcgtgatgtcgcggtttgacatggactctgtgatggccgcggtgcagcggcaccgtgtcactcacctcttctgcgtgccgccggtcatgatagcgctcgccaagctcgggagcgttgggaaatatgacctcagctcgctcaggttcatcggctctggcgcagcaccgctcggcaaggacgtgatggagggagtggccaagaattttccagaagctgtgattgcccagggttacggaatgactgaaacttgtgggatcatatctttagagtacccagaaaaaggacaaattcgtcaatttggttcaactggagcacttgtctcaggagttgaagcaaaaattgttgatgtagaaacattgatatgtctgccaccaaatcaactaggagaaatttgtgttcgaggaccgaacataatgcaagggtatttcaacaatgtgcaagctactgaatttacaatcaagcaagggtggttgcatactggtgatattggatactttgatgagggaggtcagcttttcgtagttgatagacttaaagaactgattaagtacaaaggttttcagattgcacctgccgagcttgaagggctacttctgtctcatccagaaattctggatgctgttgttatcccgttccccgatgctgaagctggtgaagttcctattgcttacgtcgtaaggtcctctgagagttctttgactgaagttgatgtccagaaatttattgaaaagcaggtcgcatactacaaaaaattgaggagggtgacctttgtggacagcgtaccaaaatctgcttcagggaagatcttgagaagagaactcatctctaaagtcagatcatccaagctatagcaagccggcttctgtgttcagaagctagaacgacttccaatttgaaaatttgtcagattgagcgtaaaggtttacatgttactgagcggagcttatcaagcaatacattcagcttgacacagtttgtgggacatgtatacatggtggtgtcggatgacttgtatcgaatattgggcctgatttacattcactattcgaaaatagtacagatataaaacaaaactaaaa

SEQ ID NO: 6454 - DNA, 572 bp, Zea Mays
cagcgccggccaggagtcggcatccatgatggggttttcgaccaccaccgcgacgggaaccgtcgcggcctcggggagcttccatacggcggccgccgccccagccttcttcgccccgagcaggctatcggacggggtcgtcccggccatggccgcggcaacggcagcatgcgggtcggcgctgctagccatcgtacgcaccctagtccgatcgggaggtagggtctcgacggggtagcagacgaaaggcgggggtcggaggggacgggacgggatcggtcagtggtacggcatgaggcgatcggtaacaggggttccaaatattgccgcgaggcgacgcaaaggctggcgatcggcgatcggatcgggggaggaggaggggggcggtgcggcggcgggcggagccggagctggggccgatgcctgcgacgctcgctgctcttcccttgccttcccttcccacgggcggtggatggaggcggacgggggatccctctgctgcctctttgccgtggtgggccacaaaagggcaaagaccgcagcgaccaagcgtgggccgccccagcagctcc

SEQ ID NO: 6455 - DNA, 1952 bp, Zea Mays
ggaagaggctgtctcagacgaaaggctgctcgtctgagcaggggaggaaggaacagttggagctcttgctgccgactgagtgtggggagaggcgcgggaaggagatgagcacgagatgtttaggctgcaggatagtttggctttgataccaattgtaagtagagggactctaactctcatcaagaggatgatactatgagttggggcaattttctgtttatttcctcaaacactacacaatgtcatacccttagaggggttggggacacatatttatagccctaggggctgcactaccacacctcacacacactacacaacaggattgtcctctagatgctaaagagactacataggacagtcaaaagcgactgttgtcctctagatgctaaagcgactacagaggacagtcaaaaagcgactgctgtcctctagatgctaaagagactacagaggacagtcaagctgtcctctagatgctaaaggactacagaggacagtcaaaagcaggttgtcctctagatgctcaagacttattccatcaaagccacaacctgatcaagccttcggacaacccgttgtatggcttcggcgacaaggacacttttcctgtcggcaaaatagaattgcctctctccttcggtgtagcacccaatgcccgaagtgagcaaataacctttgatatcgtcgacatggtgtatccgtacaacgccatcatgggccggggctccatcaacaagtttgaggcagccattcacggactatacctgtgcatgaagataccagatccgttaggcgccatcacggtctacggcaatcagcagactgcgcgcaacatagagcgggacttcgtccccgggcaaagaaatgtgcactgcctcacggcccagtgcgaggtccctgcgtccgtcagccaaaccgacaaagagcacgacaaggcacatctgcagagcaacgacgggaccaagactgttcccctcgaccaggccacgcccaagcagacagtcaccatcagcgaagacctcacttcgcatgacgaggagaaactcctatgttgcttgtccaagaacaaagacgtcttcgcctggtccgccctcgacctgttcggggtcagccgatccataattgagcacagcttgggaatcgacccttcggtgagaccgaaaaaacagcggctccgcaaaatgtccgacgagaagacagaagccgccaaggccgaggtacatcacctcctggaagccaaatttatcgagccagtggcttaccccacgtggctctccaacgttgtgatggtgcagaaaaagagcggcaagtggcgaatgtgcatcgacttcaccagtctcaacaaggcctgcccaaaggacaatttcccgctgcctcggatcgacagaatagtcgatagcgcggccgggtgcgaagtcatgtctctcctcgactgcttctcgggttaccatcaaatatatatgtggatgacatcgtcgtcgctagcaggagcaaggaggaagacaaggccagcaccagcttcataacacccttcggcacatattgcttcatcagaatgccggagggactcaagaacgtcgggtccaccttctcccggcttaccaaaacagtgctcgaggggcaagtcggcagaaatatattcacatatgtggatgacatcgtcgtcgctagcaggagcaaggaggaccatcttgctgacctcgccgagacattcgcgaacatgcgggacgcacgacttcgcctgaacccagaaaagtgcgtcttcggcgttcgtcaggggaaaatattgggctacctggtatcacaccgcggcatcgaggccaacccaaccaaaatccaggccatcatcacatgatgcccccgcagtcagccagagacgtccagcgcctgacgggcagattggccgccctcaacagattcatctccaaatccgctgagcgaagtctccc

SEQ ID NO: 6456 - DNA, 2803 bp, Zea Mays
gcgcatgcctccgtccggtccgtccgaacgctcggaccggatgaatggatgactcctgcagtcagccacttcccttcgtcgctcgtcggcatggcgccacgcctctcacagccacctgaggcactgaggcagcgacccctcccccttgcggccttgcctcctccagaatcgcagacagcttccgccgaatgaatcgtccacttgtccgtagaattgtgcgatcctccggcggctaccaatgttacggtgctctcagtcttatgtttgggctgccactcgcctgtcgccattgcccatcaccatctgtatgatgggtgggtccgtcagtggcccgatcgcaacgtccaacctatcagcgctccttcatggatcatggattcagcggttgacacccagggttgattcttcgcagatccaatgagtaagagccactaatcagtgttctcctgattaccagagcagcgtgttgaacgttgccaatcctcgcgtggccgcgtgcctgcaacctgttcgacagatctccgtagccggctctggttagaggctgagccctcgcgcctgttaaaacggtccttgcttggggagacaccaagaaaggacatcattttagtagatccactaattgttaactactccatagtttatttttgcaacttctggttggacaaattaataaggataggatttgtgactcaagatgatgttctctttgcccatcttactgtgaaggagacattgacttacgcggcactactccgtctcccaagaacaatgacacagcaacaaaagaaagagcgagcgatggacatcatacatgagcttggccttgaaaggtgccaggacacaatgattggaggatcgtttgtacgtggggtttcagggggtgaaaggaaaagagtttgcattggaaatgagattttaatcaatccatctttactgtttctggatgagccaacatctgggctggattcaactacagctctaaggatcgttcagcttctccatgacatagctgaggatgggaagacggtaatcaccacaattcaccaaccatctagcaggctgtttcataagtttgacaagcttattctcctgggcaaaggaagtttgctatactttgggaaggcatctgaagccatgccatacttccagtccattggatgcgccccacttattgcaatgaaccctgcagagtttctactggatctcgccaatggcaacactaccgatgtctcagtcccttcagaattagatgacaaggtgcatatggaaaatcacaatttggagaacaataattccaagattgactacaggccatcagcacaagatgttcatgagtatttggtagatgcctatgagactcgagtggcttttaaggagaagaagaagcttctagcaccactgcctatcagtgatgatctgaaggcaactataacatcatcgaagcgagagtggggcacatcctggtggcagcaatattccatcctcttttgtagagggatcaaggaacgacgacatgattacctgagttggatgagaatcacccaggtcatagctacatcggttatcttaggtttactgtggtggcactctgatcccagcacactaaaaggtctagaggatcaggctggcctgctgtttttcatcgctgtgttttggggcttctttccagtgtttactgcaatctttacattccctcaagagagggcaatgctgaacaaagagcgcgcagtcgacatgtacaagctcagtgcatacttcttggccaggacgacgagtgatctaccacttgaccttttcctcccaatcatattcatggtgatcgtgtacttcatggcaggcctcaaagcaactgccacacatttctttctcagcatgttgaccgtctttctcagcataattgctgctcagggactcggattggcaattggagctactctgttggacatcaagaaggcgacaactctagcttcagttacagtcatgacattcatgctagcaggaggcttctttgtaaagagcgttccaccattcatctcctggctgcgctacctgtccttcaactaccacacgtacaggctcctgctgaaggtgcagtacgaccccgtgccggacatcctgaccaccacgaggcacatggacagcggtggcaccgaggtggcagctctcgtcgccatggtcatcgggtaccgggtgctggcctacctgtccctgagaagggcgaaggccctgggcagctagcgcatcccttcaccgcagtgactgaagcctgagctcgtggagcgggttgggtcattgggtgtgtagggaagtttgtgctatattgcgctgtgaaaagatggaagtctttttttttaacttttctgtctttttcaactaagttctgagcaagtaccaacactgaagaacaaggatctgtagcgagtgtaccagagacaagctgtgctgtaatttttccttcacaacgattgcgtggttaaagtgattgagtataagcgtgagtttagattgccggcatattcttaggatgggtagctctaggacaaattctgttcatactcccaagaacgcgtacatttcatcaatgacattatacgagttcttcgcgatggacagaagcacaggatgaaggcctgatgtcccataggtcagagggaaggtatgatcagtgtttgattcatctacatcacccttatacggtcccatttctgcaatgttcatatgttctaaaattctgggctccatcgatctttccaatctgtgactaaagctcttcttttttttaactgctattaaggtaaac

SEQ ID NO: 6457 - DNA, 2614 bp, Zea Mays
gcgcatgcctccgtccggtccgtccgaacgctcggaccggatgaatggatgactcctgcagtcagccacttcccttcgtcgctcgtcggcatggcgccacgcctctcacagccacctgaggcactgaggcagcgacccctcccccttgcggccttgcctcctccagaatcgcagacagcttccgccgaatgaatcgtccacttgtccgtagaattgtgcgatcctccggcggctaccaatgttacggtgctctcagtcttatgtttgggctgccactcgcctgtcgccattgcccatcaccatctgtatgatgggtgggtccgtcagtggcccgatcgcaacgtccaacctatcagcgctccttcatggatcatggattcagcggttgacacccagggttgattcttcgcagatccaatgagtggcatgtacaattctccgaaggaagcctcgcggcgtcttcaaaaatgttgagacaagatgagagggataggatttgtgactcaagatgatgttctctttgcccatcttactgtgaaggagacattgacttacgcggcactactccgtctcccaagaacaatgacacagcaacaaaagaaagagcgagcgatggacatcatacatgagcttggccttgaaaggtgccaggacacaatgattggaggatcgtttgtacgtggggtttcagggggtgaaaggaaaagagtttgcattggaaatgagattttaatcaatccatctttactgtttctggatgagccaacatctgggctggattcaactacagctctaaggatcgttcagcttctccatgacatagctgaggatgggaagacggtaatcaccacaattcaccaaccatctagcaggctgtttcataagtttgacaagcttattctcctgggcaaaggaagtttgctatactttgggaaggcatctgaagccatgccatacttccagtccattggatgcgccccacttattgcaatgaaccctgcagagtttctactggatctcgccaatggcaacactaccgatgtctcagtcccttcagaattagatgacaaggtgcatatggaaaatcacaatttggagaacaataattccaagattgactacaggccatcagcacaagatgttcatgagtatttggtagatgcctatgagactcgagtggcttttaaggagaagaagaagcttctagcaccactgcctatcagtgatgatctgaaggcaactataacatcatcgaagcgagagtggggcacatcctggtggcagcaatattccatcctcttttgtagagggatcaaggaacgacgacatgattacctgagttggatgagaatcacccaggtcatagctacatcggttatcttaggtttactgtggtggcactctgatcccagcacactaaaaggtctagaggatcaggctggcctgctgtttttcatcgctgtgttttggggcttctttccagtgtttactgcaatctttacattccctcaagagagggcaatgctgaacaaagagcgcgcagtcgacatgtacaagctcagtgcatacttcttggccaggacgacgagtgatctaccacttgaccttttcctcccaatcatattcatggtgatcgtgtacttcatggcaggcctcaaagcaactgccacacatttctttctcagcatgttgaccgtctttctcagcataattgctgctcagggactcggattggcaattggagctactctgttggacatcaagaaggcgacaactctagcttcagttacagtcatgacattcatgctagcaggaggcttctttgtaaagagcgttccaccattcatctcctggctgcgctacctgtccttcaactaccacacgtacaggctcctgctgaaggtgcagtacgaccccgtgccggacatcctgaccaccacgaggcacatggacagcggtggcaccgaggtggcagctctcgtcgccatggtcatcgggtaccgggtgctggcctacctgtccctgagaagggcgaaggccctgggcagctagcgcatcccttcaccgcagtgactgaagcctgagctcgtggagcgggttgggtcattgggtgtgtagggaagtttgtgctatattgcgctgtgaaaagatggaagtctttttttttaacttttctgtctttttcaactaagttctgagcaagtaccaacactgaagaacaaggatctgtagcgagtgtaccagagacaagctgtgctgtaatttttccttcacaacgattgcgtggttaaagtgattgagtataagcgtgagtttagattgccggcatattcttaggatgggtagctctaggacaaattctgttcatactcccaagaacgcgtacatttcatcaatgacattatacgagttcttcgcgatggacagaagcacaggatgaaggcctgatgtcccataggtcagagggaaggtatgatcagtgtttgattcatctacatcacccttatacggtcccatttctgcaatgttcatatgttctaaaattctgggctccatcgatctttccaatctgtgactaaagctcttcttttttttaactgctattaaggtaaac

SEQ ID NO: 6458 - DNA, 2761 bp, Zea Mays
gcgcatgcctccgtccggtccgtccgaacgctcggaccggatgaatggatgactcctgcagtcagccacttcccttcgtcgctcgtcggcatggcgccacgcctctcacagccacctgaggcactgaggcagcgacccctcccccttgcggccttgcctcctccagaatcgcagacagcttccgccgaatgaatcgtccacttgtccgtagaattgtgcgatcctccggcggctaccaatgttacggtgctctcagtcttatgtttgggctgccactcgcctgtcgccattgcccatcaccatctgtatgatgggtgggtccgtcagtggcccgatcgcaacgtccaacctatcagcgctccttcatggatcatggattcagcggttgacacccagggttgattcttcgcagatccaatgagtaagagccactaatcagtgttctcctgattaccagagcagcgtgttgaacgttgccaatcctcgcgtggccgcgtgcctgcaacctgttcgacagatctccgtagccggctctggttagaggctgagccctcgcgcctgttaaaacgtggcatgtacaattctccgaaggaagcctcgcggcgtcttcaaaaatgttgagacaagatgagagggataggatttgtgactcaagatgatgttctctttgcccatcttactgtgaaggagacattgacttacgcggcactactccgtctcccaagaacaatgacacagcaacaaaagaaagagcgagcgatggacatcatacatgagcttggccttgaaaggtgccaggacacaatgattggaggatcgtttgtacgtggggtttcagggggtgaaaggaaaagagtttgcattggaaatgagattttaatcaatccatctttactgtttctggatgagccaacatctgggctggattcaactacagctctaaggatcgttcagcttctccatgacatagctgaggatgggaagacggtaatcaccacaattcaccaaccatctagcaggctgtttcataagtttgacaagcttattctcctgggcaaaggaagtttgctatactttgggaaggcatctgaagccatgccatacttccagtccattggatgcgccccacttattgcaatgaaccctgcagagtttctactggatctcgccaatggcaacactaccgatgtctcagtcccttcagaattagatgacaaggtgcatatggaaaatcacaatttggagaacaataattccaagattgactacaggccatcagcacaagatgttcatgagtatttggtagatgcctatgagactcgagtggcttttaaggagaagaagaagcttctagcaccactgcctatcagtgatgatctgaaggcaactataacatcatcgaagcgagagtggggcacatcctggtggcagcaatattccatcctcttttgtagagggatcaaggaacgacgacatgattacctgagttggatgagaatcacccaggtcatagctacatcggttatcttaggtttactgtggtggcactctgatcccagcacactaaaaggtctagaggatcaggctggcctgctgtttttcatcgctgtgttttggggcttctttccagtgtttactgcaatctttacattccctcaagagagggcaatgctgaacaaagagcgcgcagtcgacatgtacaagctcagtgcatacttcttggccaggacgacgagtgatctaccacttgaccttttcctcccaatcatattcatggtgatcgtgtacttcatggcaggcctcaaagcaactgccacacatttctttctcagcatgttgaccgtctttctcagcataattgctgctcagggactcggattggcaattggagctactctgttggacatcaagaaggcgacaactctagcttcagttacagtcatgacattcatgctagcaggaggcttctttgtaaagagcgttccaccattcatctcctggctgcgctacctgtccttcaactaccacacgtacaggctcctgctgaaggtgcagtacgaccccgtgccggacatcctgaccaccacgaggcacatggacagcggtggcaccgaggtggcagctctcgtcgccatggtcatcgggtaccgggtgctggcctacctgtccctgagaagggcgaaggccctgggcagctagcgcatcccttcaccgcagtgactgaagcctgagctcgtggagcgggttgggtcattgggtgtgtagggaagtttgtgctatattgcgctgtgaaaagatggaagtctttttttttaacttttctgtctttttcaactaagttctgagcaagtaccaacactgaagaacaaggatctgtagcgagtgtaccagagacaagctgtgctgtaatttttccttcacaacgattgcgtggttaaagtgattgagtataagcgtgagtttagattgccggcatattcttaggatgggtagctctaggacaaattctgttcatactcccaagaacgcgtacatttcatcaatgacattatacgagttcttcgcgatggacagaagcacaggatgaaggcctgatgtcccataggtcagagggaaggtatgatcagtgtttgattcatctacatcacccttatacggtcccatttctgcaatgttcatatgttctaaaattctgggctccatcgatctttccaatctgtgactaaagctcttcttttttttaactgctattaaggtaaac

SEQ ID NO: 6459 - DNA, 2694 bp, Zea Mays
gcgcatgcctccgtccggtccgtccgaacgctcggaccggatgaatggatgactcctgcagtcagccacttcccttcgtcgctcgtcggcatggcgccacgcctctcacagccacctgaggcactgaggcagcgacccctcccccttgcggccttgcctcctccagaatcgcagacagcttccgccgaatgaatcgtccacttgtccgtagaattgtgcgatcctccggcggctaccaatgttacggtgctctcagtcttatgtttgggctgccactcgcctgtcgccattgcccatcaccatctgtatgatgggtgggtccgtcagtggcccgatcgcaacgtccaacctatcagcgctccttcatggatcatggattcagcggttgacacccagggttgattcttcgcagatccaatgagtaagagccactaatcagtgttctcctgattaccagagcagcgtgttgaacgttgccaatcctcgcgtggccgcgtgcctgcaacctgttcgacagatctccgtagccggctctggttagaggctgagccctcgcgcctgttaaaacgataggatttgtgactcaagatgatgttctctttgcccatcttactgtgaaggagacattgacttacgcggcactactccgtctcccaagaacaatgacacagcaacaaaagaaagagcgagcgatggacatcatacatgagcttggccttgaaaggtgccaggacacaatgattggaggatcgtttgtacgtggggtttcagggggtgaaaggaaaagagtttgcattggaaatgagattttaatcaatccatctttactgtttctggatgagccaacatctgggctggattcaactacagctctaaggatcgttcagcttctccatgacatagctgaggatgggaagacggtaatcaccacaattcaccaaccatctagcaggctgtttcataagtttgacaagcttattctcctgggcaaaggaagtttgctatactttgggaaggcatctgaagccatgccatacttccagtccattggatgcgccccacttattgcaatgaaccctgcagagtttctactggatctcgccaatggcaacactaccgatgtctcagtcccttcagaattagatgacaaggtgcatatggaaaatcacaatttggagaacaataattccaagattgactacaggccatcagcacaagatgttcatgagtatttggtagatgcctatgagactcgagtggcttttaaggagaagaagaagcttctagcaccactgcctatcagtgatgatctgaaggcaactataacatcatcgaagcgagagtggggcacatcctggtggcagcaatattccatcctcttttgtagagggatcaaggaacgacgacatgattacctgagttggatgagaatcacccaggtcatagctacatcggttatcttaggtttactgtggtggcactctgatcccagcacactaaaaggtctagaggatcaggctggcctgctgtttttcatcgctgtgttttggggcttctttccagtgtttactgcaatctttacattccctcaagagagggcaatgctgaacaaagagcgcgcagtcgacatgtacaagctcagtgcatacttcttggccaggacgacgagtgatctaccacttgaccttttcctcccaatcatattcatggtgatcgtgtacttcatggcaggcctcaaagcaactgccacacatttctttctcagcatgttgaccgtctttctcagcataattgctgctcagggactcggattggcaattggagctactctgttggacatcaagaaggcgacaactctagcttcagttacagtcatgacattcatgctagcaggaggcttctttgtaaagagcgttccaccattcatctcctggctgcgctacctgtccttcaactaccacacgtacaggctcctgctgaaggtgcagtacgaccccgtgccggacatcctgaccaccacgaggcacatggacagcggtggcaccgaggtggcagctctcgtcgccatggtcatcgggtaccgggtgctggcctacctgtccctgagaagggcgaaggccctgggcagctagcgcatcccttcaccgcagtgactgaagcctgagctcgtggagcgggttgggtcattgggtgtgtagggaagtttgtgctatattgcgctgtgaaaagatggaagtctttttttttaacttttctgtctttttcaactaagttctgagcaagtaccaacactgaagaacaaggatctgtagcgagtgtaccagagacaagctgtgctgtaatttttccttcacaacgattgcgtggttaaagtgattgagtataagcgtgagtttagattgccggcatattcttaggatgggtagctctaggacaaattctgttcatactcccaagaacgcgtacatttcatcaatgacattatacgagttcttcgcgatggacagaagcacaggatgaaggcctgatgtcccataggtcagagggaaggtatgatcagtgtttgattcatctacatcacccttatacggtcccatttctgcaatgttcatatgttctaaaattctgggctccatcgatctttccaatctgtgactaaagctcttcttttttttaactgctattaaggtaaac

SEQ ID NO: 6460 - DNA, 2751 bp, Zea Mays
tacgcgaacatcatgtattttatgtaacatatgaatgaaaacaataaaaacaaaaggaaaaaagaaaacaaaacaaaataaataaacaaataagaaaaaaacacaaacacaaacactggaaaaacacaacagcgttcgtcccaagtcctaacaaaaaaagcaccgatacctgccaaagtgccagctgcctacggccaccgcgcggcgcatgcctccgtccggtccgtccgaacgctcggaccggatgaatggatgactcctgcagtcagccacttcccttcgtcgctcgtcggcatggcgccacgcctctcacagccacctgaggcactgaggcagcgacccctcccccttgcggccttgcctcctccagaatcgcagacagcttccgccgaatgaatcgtccacttgtccgtagaattgtgcgatcctccggcggctaccaatgttacggtgctctcagtcttatgtttgggctgccactcgcctgtcgccattgcccatcaccatctgtatgatgggtgggtccgtcagtggcccgatcgcaacgtccaacctatcagcgctccttcatggatcatggattcagcggttgacacccagggttgattcttcgcagatccaatgagataggatttgtgactcaagatgatgttctctttgcccatcttactgtgaaggagacattgacttacgcggcactactccgtctcccaagaacaatgacacagcaacaaaagaaagagcgagcgatggacatcatacatgagcttggccttgaaaggtgccaggacacaatgattggaggatcgtttgtacgtggggtttcagggggtgaaaggaaaagagtttgcattggaaatgagattttaatcaatccatctttactgtttctggatgagccaacatctgggctggattcaactacagctctaaggatcgttcagcttctccatgacatagctgaggatgggaagacggtaatcaccacaattcaccaaccatctagcaggctgtttcataagtttgacaagcttattctcctgggcaaaggaagtttgctatactttgggaaggcatctgaagccatgccatacttccagtccattggatgcgccccacttattgcaatgaaccctgcagagtttctactggatctcgccaatggcaacactaccgatgtctcagtcccttcagaattagatgacaaggtgcatatggaaaatcacaatttggagaacaataattccaagattgactacaggccatcagcacaagatgttcatgagtatttggtagatgcctatgagactcgagtggcttttaaggagaagaagaagcttctagcaccactgcctatcagtgatgatctgaaggcaactataacatcatcgaagcgagagtggggcacatcctggtggcagcaatattccatcctcttttgtagagggatcaaggaacgacgacatgattacctgagttggatgagaatcacccaggtcatagctacatcggttatcttaggtttactgtggtggcactctgatcccagcacactaaaaggtctagaggatcaggctggcctgctgtttttcatcgctgtgttttggggcttctttccagtgtttactgcaatctttacattccctcaagagagggcaatgctgaacaaagagcgcgcagtcgacatgtacaagctcagtgcatacttcttggccaggacgacgagtgatctaccacttgaccttttcctcccaatcatattcatggtgatcgtgtacttcatggcaggcctcaaagcaactgccacacatttctttctcagcatgttgaccgtctttctcagcataattgctgctcagggactcggattggcaattggagctactctgttggacatcaagaaggcgacaactctagcttcagttacagtcatgacattcatgctagcaggaggcttctttgtaaagagcgttccaccattcatctcctggctgcgctacctgtccttcaactaccacacgtacaggctcctgctgaaggtgcagtacgaccccgtgccggacatcctgaccaccacgaggcacatggacagcggtggcaccgaggtggcagctctcgtcgccatggtcatcgggtaccgggtgctggcctacctgtccctgagaagggcgaaggccctgggcagctagcgcatcccttcaccgcagtgactgaagcctgagctcgtggagcgggttgggtcattgggtgtgtagggaagtttgtgctatattgcgctgtgaaaagatggaagtctttttttttaacttttctgtctttttcaactaagttctgagcaagtaccaacactgaagaacaaggatctgtagcgagtgtaccagagacaagctgtgctgtaatttttccttcacaacgattgcgtggttaaagtgattgagtataagcgtgagtttagattgccggcatattcttaggatgggtagctctaggacaaattctgttcatactcccaagaacgcgtacatttcatcaatgacattatacgagttcttcgcgatggacagaagcacaggatgaaggcctgatgtcccataggtcagagggaaggtatgatcagtgtttgattcatctacatcacccttatacggtcccatttctgcaatgttcatatgttctaaaattctgggctccatcgatctttccaatctgtgactaaagctcttcttttttttaactgctattaaggtaaac

SEQ ID NO: 6461 - DNA, 3594 bp, Zea Mays
atggagtcgacaatggagaagccggcggtgatggacgcggcgcgcggcggcggaggggtcgggcgggccaagtcggaccacctggcgccgtcgctgtcgctgagccggacggcgtcggcggagacggtgctgggcacggcggcggacgcggccaagcccgccgggttcgggaggaagcggcgctccgcgtcggtcggcggcggcaacaacaacagccacatccgcaagtcccggagcgcgcagctgaagctggacgtggaggacctcgtcagcagcggcgccgcgctcagccgcgcctccagcgccagcctcggcttctccttcaccttcaccggcttcaccccgccgctccagcacatgtgctccgccgacccgccttcattcagcgacgacgagaacccagtggacatcgaagccggcacacggcgcaagaaactggtgaccgagccgaccctgccgatatacctcaagcggaaaagcttcgtatctaagcggcggcgtgcgtggcagtttgcggaggtgaagtacagggtggcggggaagggctcgccgcgggagatactgggagggatatccgggtcggcgtcccccggcgaggtgctggcgctgatgggcccgtccggcagcggcaagacgacgctgctgagcatcctgggcgggagggccgccgccggcggcgccgtcgacggctgcatctcctacaacgacgagcccttcagcaagtccctcaagcgcagtcctctgagctctggcccagcagaaggactgggccaaaactttggtatactgggctatggtgtgagttcttgttttacggcccaagacgcttacacgggtctgctgttcatgggctataagcagcgtgttgaacgttgccaatcctcgcgtggccgcgtgcctgcaacctgttcgacagatctccgtagccggctctggttagaggctgagccctcgcgcctgttaaaacgtaagtctttgtgttcagatgtcaacgtcgctgaaaagtctgattctcggaaccatcattcctacagatcatgatgctcctcgtgagccttgtcactggttacaaggcgtcaaccggtcaagggctgcctccctgtctacttctgtccagtcgagtcgttctagctgtagctgttgataaggccctgatttactagtcttcactcttcagcagggtccttgcttggggagacaccaagaaaggacatcattttagtagatccactaattgttaactactccatagtttatttttgcaacttctggttggacaaattaataaggtaaaaccagcatagtttatttttgcaacttctggttggacaaattaataaggtaaaaccagcacgtaatttgcaatttgggacgcgagatgtaacatctcataattatcaggtggcatgtacaattctccgaaggaagcctcgcggcgtcttcaaaaatgttgagacaagatgagagggataggatttgtgactcaagatgatgttctctttgcccatcttactgtgaaggagacattgacttacgcggcactactccgtctcccaagaacaatgacacagcaacaaaagaaagagcgagcgatggacatcatacatgagcttggccttgaaaggtgccaggacacaatgattggaggatcgtttgtacgtggggtttcagggggtgaaaggaaaagagtttgcattggaaatgagattttaatcaatccatctttactgtttctggatgagccaacatctgggctggattcaactacagctctaaggatcgttcagcttctccatgacatagctgaggatgggaagacggtaatcaccacaattcaccaaccatctagcaggctgtttcataagtttgacaagcttattctcctgggcaaaggaagtttgctatactttgggaaggcatctgaagccatgccatacttccagtccattggatgcgccccacttattgcaatgaaccctgcagagtttctactggatctcgccaatggcaacactaccgatgtctcagtcccttcagaattagatgacaaggtgcatatggaaaatcacaatttggagaacaataattccaagattgactacaggccatcagcacaagatgttcatgagtatttggtagatgcctatgagactcgagtggcttttaaggagaagaagaagcttctagcaccactgcctatcagtgatgatctgaaggcaactataacatcatcgaagcgagagtggggcacatcctggtggcagcaatattccatcctcttttgtagagggatcaaggaacgacgacatgattacctgagttggatgagaatcacccaggtcatagctacatcggttatcttaggtttactgtggtggcactctgatcccagcacactaaaaggtctagaggatcaggctggcctgctgtttttcatcgctgtgttttggggcttctttccagtgtttactgcaatctttacattccctcaagagagggcaatgctgaacaaagagcgcgcagtcgacatgtacaagctcagtgcatacttcttggccaggacgacgagtgatctaccacttgaccttttcctcccaatcatattcatggtgatcgtgtacttcatggcaggcctcaaagcaactgccacacatttctttctcagcatgttgaccgtctttctcagcataattgctgctcagggactcggattggcaattggagctactctgttggacatcaagaaggcgacaactctagcttcagttacagtcatgacattcatgctagcaggaggcttctttgtaaagagcgttccaccattcatctcctggctgcgctacctgtccttcaactaccacacgtacaggctcctgctgaaggtgcagtacgaccccgtgccggacatcctgaccaccacgaggcacatggacagcggtggcaccgaggtggcagctctcgtcgccatggtcatcgggtaccgggtgctggcctacctgtccctgagaagggcgaaggccctgggcagctagcgcatcccttcaccgcagtgactgaagcctgagctcgtggagcgggttgggtcattgggtgtgtagggaagtttgtgctatattgcgctgtgaaaagatggaagtctttttttttaacttttctgtctttttcaactaagttctgagcaagtaccaacactgaagaacaaggatctgtagcgagtgtaccagagacaagctgtgctgtaatttttccttcacaacgattgcgtggttaaagtgattgagtataagcgtgagtttagattgccggcatattcttaggatgggtagctctaggacaaattctgttcatactcccaagaacgcgtacatttcatcaatgacattatacgagttcttcgcgatggacagaagcacaggatgaaggcctgatgtcccataggtcagagggaaggtatgatcagtgtttgattcatctacatcacccttatacggtcccatttctgcaatgttcatatgttctaaaattctgggctccatcgatctttccaatctgtgactaaagctcttcttttttttaactgctattaaggtaaac

SEQ ID NO: 6462 - DNA, 3688 bp, Zea Mays
atggagtcgacaatggagaagccggcggtgatggacgcggcgcgcggcggcggaggggtcgggcgggccaagtcggaccacctggcgccgtcgctgtcgctgagccggacggcgtcggcggagacggtgctgggcacggcggcggacgcggccaagcccgccgggttcgggaggaagcggcgctccgcgtcggtcggcggcggcaacaacaacagccacatccgcaagtcccggagcgcgcagctgaagctggacgtggaggacctcgtcagcagcggcgccgcgctcagccgcgcctccagcgccagcctcggcttctccttcaccttcaccggcttcaccccgccgctccagcacatgtgctccgccgacccgccttcattcagcgacgacgagaacccagtggacatcgaagccggcacacggcgcaagaaactggtgaccgagccgaccctgccgatatacctcaagcggaaaagcttcgtatctaagcggcggcgtgcgtggcagtttgcggaggtgaagtacagggtggcggggaagggctcgccgcgggagatactgggagggatatccgggtcggcgtcccccggcgaggtgctggcgctgatgggcccgtccggcagcggcaagacgacgctgctgagcatcctgggcgggagggccgccgccggcggcgccgtcgacggctgcatctcctacaacgacgagcccttcagcaagtccctcaagcgcagtcctctgagctctggcccagcagaaggactgggccaaaactttggtatactgggctatggtgtgagttcttgttttacggcccaagacgcttacacgggtctgctgttcatgggctataagcagcgtgttgaacgttgccaatcctcgcgtggccgcgtgcctgcaacctgttcgacagatctccgtagccggctctggttagaggctgagccctcgcgcctgttaaaacggtccttgcttggggagacaccaagaaaggacatcattttagtagatccactaattgttaactactccatagtttatttttgcaacttctggttggacaaattaataaggtaaaaccagcatagtttatttttgcaacttctggttggacaaattaataaggtaaaaccagcacgtaatttgcaatttgggacgcgagatgtaacatctcataattatcaggtggcatgtacaattctccgaaggaagcctcgcggcgtcttcaaaaatgttgagacaagatgagagggtaatgtgttatattgataaatgacatgaaacaattttggggccttttatgttctctgtagggtgttcaagttgaggcattgagagagtcaatggatgtgtcaagtttcttttctccaaaagggaatgaacctggaagtttgtggcaacacatagacaatctctcctttagtaatgtttttttttttgctccagggctgtattgtgctatcttccgtggtgtcttgcagtatgataactgttgattcacaggttgtaacttgtgagtacgcgtgttgacatatagttgaactcatatttgcttgcaggataggatttgtgactcaagatgatgttctctttgcccatcttactgtgaaggagacattgacttacgcggcactactccgtctcccaagaacaatgacacagcaacaaaagaaagagcgagcgatggacatcatacatgagcttggccttgaaaggtgccaggacacaatgattggaggatcgtttgtacgtggggtttcagggggtgaaaggaaaagagtttgcattggaaatgagattttaatcaatccatctttactgtttctggatgagccaacatctgggctggattcaactacagctctaaggatcgttcagcttctccatgacatagctgaggatgggaagacggtaatcaccacaattcaccaaccatctagcaggctgtttcataagtttgacaagcttattctcctgggcaaaggaagtttgctatactttgggaaggcatctgaagccatgccatacttccagtccattggatgcgccccacttattgcaatgaaccctgcagagtttctactggatctcgccaatggcaacactaccgatgtctcagtcccttcagaattagatgacaaggtgcatatggaaaatcacaatttggagaacaataattccaagattgactacaggccatcagcacaagatgttcatgagtatttggtagatgcctatgagactcgagtggcttttaaggagaagaagaagcttctagcaccactgcctatcagtgatgatctgaaggcaactataacatcatcgaagcgagagtggggcacatcctggtggcagcaatattccatcctcttttgtagagggatcaaggaacgacgacatgattacctgagttggatgagaatcacccaggtcatagctacatcggttatcttaggtttactgtggtggcactctgatcccagcacactaaaaggtctagaggatcaggctggcctgctgtttttcatcgctgtgttttggggcttctttccagtgtttactgcaatctttacattccctcaagagagggcaatgctgaacaaagagcgcgcagtcgacatgtacaagctcagtgcatacttcttggccaggacgacgagtgatctaccacttgaccttttcctcccaatcatattcatggtgatcgtgtacttcatggcaggcctcaaagcaactgccacacatttctttctcagcatgttgaccgtctttctcagcataattgctgctcagggactcggattggcaattggagctactctgttggacatcaagaaggcgacaactctagcttcagttacagtcatgacattcatgctagcaggaggcttctttgtaaagagcgttccaccattcatctcctggctgcgctacctgtccttcaactaccacacgtacaggctcctgctgaaggtgcagtacgaccccgtgccggacatcctgaccaccacgaggcacatggacagcggtggcaccgaggtggcagctctcgtcgccatggtcatcgggtaccgggtgctggcctacctgtccctgagaagggcgaaggccctgggcagctagcgcatcccttcaccgcagtgactgaagcctgagctcgtggagcgggttgggtcattgggtgtgtagggaagtttgtgctatattgcgctgtgaaaagatggaagtctttttttttaacttttctgtctttttcaactaagttctgagcaagtaccaacactgaagaacaaggatctgtagcgagtgtaccagagacaagctgtgctgtaatttttccttcacaacgattgcgtggttaaagtgattgagtataagcgtgagtttagattgccggcatattcttaggatgggtagctctaggacaaattctgttcatactcccaagaacgcgtacatttcatcaatgacattatacgagttcttcgcgatggacagaagcacaggatgaaggcctgatgtcccataggtcagagggaaggtatgatcagtgtttgattcatctacatcacccttatacggtcccatttctgcaatgttcatatgttctaaaattctgggctccatcgatctttccaatctgtgactaaagctcttcttttttttaactgctattaaggtaaac

SEQ ID NO: 6463 - DNA, 3462 bp, Zea Mays
cgtgtaacagctacagttttcctttagctgtatgtagccgtgcgcgcgcgagcacgtctccagccagctaggtaggcgaggtgacgatggagtcgacaatggagaagccggcggtgatggacgcggcgcgcggcggcggaggggtcgggcgggccaagtcggaccacctggcgccgtcgctgtcgctgagccggacggcgtcggcggagacggtgctgggcacggcggcggacgcggccaagcccgccgggttcgggaggaagcggcgctccgcgtcggtcggcggcggcaacaacaacagccacatccgcaagtcccggagcgcgcagctgaagctggacgtggaggacctcgtcagcagcggcgccgcgctcagccgcgcctccagcgccagcctcggcttctccttcaccttcaccggcttcaccccgccgctccagcacatgtgctccgccgacccgccttcattcagcgacgacgagaacccagtggacatcgaagccggcacacggcgcaagaaactggtgaccgagccgaccctgccgatatacctcaagtttgcggaggtgaagtacagggtggcggggaagggctcgccgcgggagatactgggagggatatccgggtcggcgtcccccggcgaggtgctggcgctgatgggcccgtccggcagcggcaagacgacgctgctgagcatcctgggcgggagggccgccgccggcggcgccgtcgacggctgcatctcctacaacgacgagcccttcagcaagtccctcaagcgcagtcctctgagctctggcccagcagaaggactgggccaaaactttggtatactgggctatggtgtgagttcttgttttacggcccaagacgcttacacgggtctgctgttcatgggctataagcagcgtgttgaacgttgccaatcctcgcgtggccgcgtgcctgcaacctgttcgacagatctccgtagccggctctggttagaggctgagccctcgcgcctgttaaaacgtaagtctttgtgttcagatgtcaacgtcgctgaaaagtctgattctcggaaccatcattcctacagatcatgatgctcctcgtgagccttgtcactggttacaaggcgtcaaccggtcaagggctgcctccctgtctacttctgtccagtcgagtcgttctagctgtagctgttgataaggccctgatttactagtcttcactcttcagcagggtccttgcttggggagacaccaagaaaggacatcattttagtagatccactaattgttaactactccatagtttatttttgcaacttctggttggacaaattaataaggataggatttgtgactcaagatgatgttctctttgcccatcttactgtgaaggagacattgacttacgcggcactactccgtctcccaagaacaatgacacagcaacaaaagaaagagcgagcgatggacatcatacatgagcttggccttgaaaggtgccaggacacaatgattggaggatcgtttgtacgtggggtttcagggggtgaaaggaaaagagtttgcattggaaatgagattttaatcaatccatctttactgtttctggatgagccaacatctgggctggattcaactacagctctaaggatcgttcagcttctccatgacatagctgaggatgggaagacggtaatcaccacaattcaccaaccatctagcaggctgtttcataagtttgacaagcttattctcctgggcaaaggaagtttgctatactttgggaaggcatctgaagccatgccatacttccagtccattggatgcgccccacttattgcaatgaaccctgcagagtttctactggatctcgccaatggcaacactaccgatgtctcagtcccttcagaattagatgacaaggtgcatatggaaaatcacaatttggagaacaataattccaagattgactacaggccatcagcacaagatgttcatgagtatttggtagatgcctatgagactcgagtggcttttaaggagaagaagaagcttctagcaccactgcctatcagtgatgatctgaaggcaactataacatcatcgaagcgagagtggggcacatcctggtggcagcaatattccatcctcttttgtagagggatcaaggaacgacgacatgattacctgagttggatgagaatcacccaggtcatagctacatcggttatcttaggtttactgtggtggcactctgatcccagcacactaaaaggtctagaggatcaggctggcctgctgtttttcatcgctgtgttttggggcttctttccagtgtttactgcaatctttacattccctcaagagagggcaatgctgaacaaagagcgcgcagtcgacatgtacaagctcagtgcatacttcttggccaggacgacgagtgatctaccacttgaccttttcctcccaatcatattcatggtgatcgtgtacttcatggcaggcctcaaagcaactgccacacatttctttctcagcatgttgaccgtctttctcagcataattgctgctcagggactcggattggcaattggagctactctgttggacatcaagaaggcgacaactctagcttcagttacagtcatgacattcatgctagcaggaggcttctttgtaaagagcgttccaccattcatctcctggctgcgctacctgtccttcaactaccacacgtacaggctcctgctgaaggtgcagtacgaccccgtgccggacatcctgaccaccacgaggcacatggacagcggtggcaccgaggtggcagctctcgtcgccatggtcatcgggtaccgggtgctggcctacctgtccctgagaagggcgaaggccctgggcagctagcgcatcccttcaccgcagtgactgaagcctgagctcgtggagcgggttgggtcattgggtgtgtagggaagtttgtgctatattgcgctgtgaaaagatggaagtctttttttttaacttttctgtctttttcaactaagttctgagcaagtaccaacactgaagaacaaggatctgtagcgagtgtaccagagacaagctgtgctgtaatttttccttcacaacgattgcgtggttaaagtgattgagtataagcgtgagtttagattgccggcatattcttaggatgggtagctctaggacaaattctgttcatactcccaagaacgcgtacatttcatcaatgacattatacgagttcttcgcgatggacagaagcacaggatgaaggcctgatgtcccataggtcagagggaaggtatgatcagtgtttgattcatctacatcacccttatacggtcccatttctgcaatgttcatatgttctaaaattctgggctccatcgatctttccaatctgtgactaaagctcttcttttttttaactgctattaaggtaaac

SEQ ID NO: 6464 - DNA, 2966 bp, Zea Mays
ccgagtcgctcgcgcgcggcgggtccgtccgtcgctggcagacgtatatatcgcccgcccgtgtaacagctacagttttcctttagctgtatgtagccgtgcgcgcgcgagcacgtctccagccagctaggtaggcgaggtgacgatggagtcgacaatggagaagccggcggtgatggacgcggcgcgcggcggcggaggggtcgggcgggccaagtcggaccacctggcgccgtcgctgtcgctgagccggacggcgtcggcggagacggtgctgggcacggcggcggacgcggccaagcccgccgggttcgggaggaagcggcgctccgcgtcggtcggcggcggcaacaacaacagccacatccgcaagtcccggagcgcgcagctgaagctggacgtggaggacctcgtcagcagcggcgccgcgctcagccgcgcctccagcgccagcctcggcttctccttcaccttcaccggcttcaccccgccgctccagcacatgtgctccgccgacccgccttcattcagcgacgacgagaacctggacatcgaagccggcacacggcgcaagaaactggtgaccgagccgaccctgccgatatacctcaagtttgcggaggtgaagtacagggtggcggggaagggctcgccgcgggagatactgggagggatatccgggtcggcgtcccccggcgaggtgctggcgctgatgggcccgtccggcagcggcaagacgacgctgctgagcatcctgggcgggagggccgccgccggcggcgccgtcgacggctgcatctcctacaacgacgagcccttcagcaagtccctcaagcgcaggataggatttgtgactcaagatgatgttctctttgcccatcttactgtgaaggagacattgacttacgcggcactactccgtctcccaagaacaatgacacagcaacaaaagaaagagcgagcgatggacatcatacatgagcttggccttgaaaggtgccaggacacaatgattggaggatcgtttgtacgtggggtttcagggggtgaaaggaaaagagtttgcattggaaatgagattttaatcaatccatctttactgtttctggatgagccaacatctgggctggattcaactacagctctaaggatcgttcagcttctccatgacatagctgaggatgggaagacggtaatcaccacaattcaccaaccatctagcaggctgtttcataagtttgacaagcttattctcctgggcaaaggaagtttgctatactttgggaaggcatctgaagccatgccatacttccagtccattggatgcgccccacttattgcaatgaaccctgcagagtttctactggatctcgccaatggcaacactaccgatgtctcagtcccttcagaattagatgacaaggtgcatatggaaaatcacaatttggagaacaataattccaagattgactacaggccatcagcacaagatgttcatgagtatttggtagatgcctatgagactcgagtggcttttaaggagaagaagaagcttctagcaccactgcctatcagtgatgatctgaaggcaactataacatcatcgaagcgagagtggggcacatcctggtggcagcaatattccatcctcttttgtagagggatcaaggaacgacgacatgattacctgagttggatgagaatcacccaggtcatagctacatcggttatcttaggtttactgtggtggcactctgatcccagcacactaaaaggtctagaggatcaggctggcctgctgtttttcatcgctgtgttttggggcttctttccagtgtttactgcaatctttacattccctcaagagagggcaatgctgaacaaagagcgcgcagtcgacatgtacaagctcagtgcatacttcttggccaggacgacgagtgatctaccacttgaccttttcctcccaatcatattcatggtgatcgtgtacttcatggcaggcctcaaagcaactgccacacatttctttctcagcatgttgaccgtctttctcagcataattgctgctcagggactcggattggcaattggagctactctgttggacatcaagaaggcgacaactctagcttcagttacagtcatgacattcatgctagcaggaggcttctttgtaaagagcgttccaccattcatctcctggctgcgctacctgtccttcaactaccacacgtacaggctcctgctgaaggtgcagtacgaccccgtgccggacatcctgaccaccacgaggcacatggacagcggtggcaccgaggtggcagctctcgtcgccatggtcatcgggtaccgggtgctggcctacctgtccctgagaagggcgaaggccctgggcagctagcgcatcccttcaccgcagtgactgaagcctgagctcgtggagcgggttgggtcattgggtgtgtagggaagtttgtgctatattgcgctgtgaaaagatggaagtctttttttttaacttttctgtctttttcaactaagttctgagcaagtaccaacactgaagaacaaggatctgtagcgagtgtaccagagacaagctgtgctgtaatttttccttcacaacgattgcgtggttaaagtgattgagtataagcgtgagtttagattgccggcatattcttaggatgggtagctctaggacaaattctgttcatactcccaagaacgcgtacatttcatcaatgacattatacgagttcttcgcgatggacagaagcacaggatgaaggcctgatgtcccataggtcagagggaaggtatgatcagtgtttgattcatctacatcacccttatacggtcccatttctgcaatgttcatatgttctaaaattctgggctccatcgatctttccaatctgtgactaaagctcttcttttttttaactgctattaaggtaaac

SEQ ID NO: 6465 - DNA, 3822 bp, Zea Mays
ccaggtccaagatgaggatgccggcaggcgagaggacgagtcatggagacggtgcagggagcgaggggccgagggcatggaacgggaggcgattgaggaatagaagccagggatccgccaggtggctggatggtggaggcaggcgatgcagcgcacggcggcacccggcccacagctcaggtgcaggtgcagtgccctgcgcgatacgtcgtcgtgagaccggcgtgtgtggagggtgcaagcccgtgcgggcgcggccagccggccacaccaccactttcccgcgccatcaatgcgcgggccgagggtcacccgtcgccctcgcgccgcgctggcgagcccctgcccctccgtcgcctccgacgtcgctctcgccatcgccccgcgcgccgcgccagagctcgcctcaatctcgctcgctctgcctgcctgcctgcctaccgagtcgctcgcgcgcggcgggtccgtccgtcgctggcagacgtatatatcgcccgcccgtgtaacagctacagttttcctttagctgtatgtagccgtgcgcgcgcgagcacgtctccagccagctaggtaggcgaggtgacgatggagtcgacaatggagaagccggcggtgatggacgcggcgcgcggcggcggaggggtcgggcgggccaagtcggaccacctggcgccgtcgctgtcgctgagccggacggcgtcggcggagacggtgctgggcacggcggcggacgcggccaagcccgccgggttcgggaggaagcggcgctccgcgtcggtcggcggcggcaacaacaacagccacatccgcaagtcccggagcgcgcagctgaagctggacgtggaggacctcgtcagcagcggcgccgcgctcagccgcgcctccagcgccagcctcggcttctccttcaccttcaccggcttcaccccgccgctccagcacatgtgctccgccgacccgccttcattcagcgacgacgagaacccagtggacatcgaagccggcacacggcgcaagaaactggtgaccgagccgaccctgccgatatacctcaagcggaaaagcttcgtatctaagcggcggcgtgcgtggcagtttgcggaggtgaagtacagggtggcggggaagggctcgccgcgggagatactgggagggatatccgggtcggcgtcccccggcgaggtgctggcgctgatgggcccgtccggcagcggcaagacgacgctgctgagcatcctgggcgggagggccgccgccggcggcgccgtcgacggctgcatctcctacaacgacgagcccttcagcaagtccctcaagcgcaggtggcatgtacaattctccgaaggaagcctcgcggcgtcttcaaaaatgttgagacaagatgagagggtaatgtgttatattgataaatgacatgaaacaattttggggccttttatgttctctgtagggtgttcaagttgaggcattgagagagtcaatggatgtgtcaagtttcttttctccaaaagggaatgaacctggaagtttgtggcaacacatagacaatctctcctttagtaatgtttttttttttgctccagggctgtattgtgctatcttccgtggtgtcttgcagtatgataactgttgattcacaggttgtaacttgtgagtacgcgtgttgacatatagttgaactcatatttgcttgcaggataggatttgtgactcaagatgatgttctctttgcccatcttactgtgaaggagacattgacttacgcggcactactccgtctcccaagaacaatgacacagcaacaaaagaaagagcgagcgatggacatcatacatgagcttggccttgaaaggtgccaggacacaatgattggaggatcgtttgtacgtggggtttcagggggtgaaaggaaaagagtttgcattggaaatgagattttaatcaatccatctttactgtttctggatgagccaacatctgggctggattcaactacagctctaaggatcgttcagcttctccatgacatagctgaggatgggaagacggtaatcaccacaattcaccaaccatctagcaggctgtttcataagtttgacaagcttattctcctgggcaaaggaagtttgctatactttgggaaggcatctgaagccatgccatacttccagtccattggatgcgccccacttattgcaatgaaccctgcagagtttctactggatctcgccaatggcaacactaccgatgtctcagtcccttcagaattagatgacaaggtgcatatggaaaatcacaatttggagaacaataattccaagattgactacaggccatcagcacaagatgttcatgagtatttggtagatgcctatgagactcgagtggcttttaaggagaagaagaagcttctagcaccactgcctatcagtgatgatctgaaggcaactataacatcatcgaagcgagagtggggcacatcctggtggcagcaatattccatcctcttttgtagagggatcaaggaacgacgacatgattacctgagttggatgagaatcacccaggtcatagctacatcggttatcttaggtttactgtggtggcactctgatcccagcacactaaaaggtctagaggatcaggctggcctgctgtttttcatcgctgtgttttggggcttctttccagtgtttactgcaatctttacattccctcaagagagggcaatgctgaacaaagagcgcgcagtcgacatgtacaagctcagtgcatacttcttggccaggacgacgagtgatctaccacttgaccttttcctcccaatcatattcatggtgatcgtgtacttcatggcaggcctcaaagcaactgccacacatttctttctcagcatgttgaccgtctttctcagcataattgctgctcagggactcggattggcaattggagctactctgttggacatcaagaaggcgacaactctagcttcagttacagtcatgacattcatgctagcaggaggcttctttgtaaagagcgttccaccattcatctcctggctgcgctacctgtccttcaactaccacacgtacaggctcctgctgaaggtgcagtacgaccccgtgccggacatcctgaccaccacgaggcacatggacagcggtggcaccgaggtggcagctctcgtcgccatggtcatcgggtaccgggtgctggcctacctgtccctgagaagggcgaaggccctgggcagctagcgcatcccttcaccgcagtgactgaagcctgagctcgtggagcgggttgggtcattgggtgtgtagggaagtttgtgctatattgcgctgtgaaaagatggaagtctttttttttaacttttctgtctttttcaactaagttctgagcaagtaccaacactgaagaacaaggatctgtagcgagtgtaccagagacaagctgtgctgtaatttttccttcacaacgattgcgtggttaaagtgattgagtataagcgtgagtttagattgccggcatattcttaggatgggtagctctaggacaaattctgttcatactcccaagaacgcgtacatttcatcaatgacattatacgagttcttcgcgatggacagaagcacaggatgaaggcctgatgtcccataggtcagagggaaggtatgatcagtgtttgattcatctacatcacccttatacggtcccatttctgcaatgttcatatgttctaaaattctgggctccatcgatctttccaatctgtgactaaagctcttcttttttttaactgctattaaggtaaac

SEQ ID NO: 6466 - DNA, 521 bp, Zea Mays
tagcacagcaacgctgtgcagcacgctcatcaaaaaacaataaaaatcaccctgaaaatcggtgctgcgaacaggatgagcagaaagagcacactaacgttgtgcagcaggctcgacaaaaaaaatcaccggtcaattgtcctgagccggagagcgctgctcaccacaggtttcggtggttactttaaagtaaacctgcatccttgagagcagcctcaaaatcttcttcacgttgccaattccgaacctaaagcacactgtgctggaaatagtcctcgatcttcttcatcacaacattatcggtttgaccacacagcaagttgaacacagcacctgtcaccagcaacagttcccagttagcaacattaataaactagaaaatctagacaagtacaaaaagtcttattatttgttttcttattaaccaaattaaagggccgtttccatcttaccataggagcacctaaatttctttcttacaaccttataaaaaaggatttaaaggggcactattttgcatc

SEQ ID NO: 6467 - DNA, 247 bp, Zea Mays
caccatcgaccagcgggctcgggttcaggctggtgaggatggggttcgacgacatgtacctgtgcagcccgggaggcatgtacgacaagttcggcaaggactacttcctgtgcacggggatggcgtccatgttggtgcccgtcgtcgtcaaccccggcgaggagtggaaggcggcgcaggtcatcgagcatgacaacctgtaacttctgtatacaggttgagacctcgagggggccccgtcccatgg

SEQ ID NO: 6468 - DNA, 2826 bp, Zea Mays
ccttttccgctccagacacagcagcccctcttgtaccagtaaaccgtgctgctatcccccgctaccgctacccgccgcgctgctgcggctcgcctccctcctccccagtccccacgccccgccgccgccgccgccacctcctctcgctccctccttttaccccgagcttaagctcgcgcgtacctgcctacctatccgtaggagaggaagaggggacaaggcccggtcggtcggtcggtcggtcggggggctctcggatctcgccgctgcctccccgttcgttcgttcgttcgttgggatctcgcgccatggccgccgtcgcgccgcccccggcccccgcgccggcaccggttccggctcctgctcctgccaccgtccctgtcgcggatcaaaccacggatctgctgcagaagctgtcgctcgactcgcagcccaaggcggcggacgcaacacagcctgctgctgccaccgccaaaaagggcgccgcggcgagccagccgctgagcgtggcgatcccgccggagccgtccatcacgccggtgatccaagactttacggatcccaacctgttttatctaccagcgtattactacggaggctacgacagttccatgagcgagtgggatgattatccgaggtatctaaattcagatggagtggagattgccccagcggtatacggagatatttatggatatgggtatgctccttacggggcatactctcctgccacttccccagttccaacagttgatggtcagatgtttggtgcacagcattaccagtatccaactgcgtatttccagcctcctacaccagttccttctaccactcaaagtgacctacagtcttctaaaaatcctgaaaagccagcagctaaagcagatccagccaagactactaacggtgttcccaatggtactgctcacagtaacagtggaactgtaccccttgcgtcgagccaacaaaattcatcactgacgcctgatggaacttatagggcgcccttgctaggtggagttccttctgctggttacctggacacgacatatgggtatgacagcacaggggcacactttgcatggtatgatggctctgcttatgcaaatggacaacaaagagcaactacaactaaccattttccatcctcaacatttggtaatggttccccagcaaggtatcagaacaagagcaccaccacaccgcagatgggtatgcagaatagaagacctacaactacatcaccagctcctacttatcccaataggatgtaccctagctcccgaccgtacacccagtatgggaattcaataaaaactggccttccctacgggagcaacggttatgattccaggatatatgggcgatggggtcttggtatggataacaggtacaggcctaggggccgtaatggatactatggttatggcaacgagagtcaggatggaacaatcgagttaaacagaggtcctagatctggccgtttcaagaaccagaaattgtacggccatactgtcactattgctgtgaaagggcagagccttccttctggtgaaagcaaggatgatagtgccgtgcctgatagagcacagttcaatagagacgatttccctgttcagtatgatgctgcaaagttctttgtcattaaatcgtacagtgaggatgacatccacaagagtgtaaaatacaatgtgtgggcaagcacaaccaatggaaataagaagctcgatgctgcttatcaagaagctcagtcgaagggttctgcgtgccctatattcttgtttttctcagtgaatacaagtgggcagtttgttggtgttgctgaaatgacgggggctgtcgattttgagaaaaccctggggtattggcaacaggacaagtggaatggttccttctctgttaagtggcacattgtcaaggacgtgcctaacaacattctcaaacacatcatcctagagaacaacgagaacaagcctgtcacgaacagccgcgacactcaagagaacaaggccttcagatgctcaagatattcaaggagcatgtcagcaagacgtccatcctggatgacttcgccttctatgagagtcgccagaagctgatgcaggataagaggtcgaaacagcagcaggtccaaaagcaggtctgggacagtaggacccccatttctgtcactggaagcgagcaacagcaggaagctgccaatgggaagcccaatccgtctgtaccaaacggtgtccctgcagaggtgaaggcggcgaaggcttctgcagagaacggcaccgccactccagctatttcctacgcggcaaaggtggcccaagcagcaacagagaaacctgtgctcgccaacggagtcgctaagaccggttagctggaccgcccaaccgatgctccatagctagccgcgagcgacggtcgacgtccccaagagctcgaccgaatcactgtacaagggaaactggtgaccaaccaaggcaggctgtggaactgggcaggcatggcgccctagagcgttgcggctccatctcgtcgctgctggagagcagctggctagctgttagcgttttccctagtctctctctctgttccccgtttcagtttgcttatagcccgaagacttttctgctgtagtattggaatgccagagacctttggccggacaagaggaatttgcgaaggccgtctggctgggtgtgttgcgtcgtcattggggtcgagtatggccggttgtgttcgtcgttatattgagtggatccgaatgaatgtgggttagattggagctttccttttctttctctttcctttacctgtttgattattgcggac
